United States Patent Application Publication US 2026/0240958 A1 - sequence listing, part 17

SEQ ID NO: 15677 - RNA, 9485 nt, synthetic construct
  source 1..9485: mol_type = other RNA
aggaaataagagagaaaagaagagtaagaagaaatataagagccaccatggcccctaagaagaagcgtaaagtgagccggatggaacgcctcgtctacgaggtgcggcagaagtgcagaaacatcgaggacatctgcatctcctgcggatctctgaacgtgaccctggagcacccactgttcatcggcggcatgtgccagaactgtaaaaactgttttctggagtgtgcctatcaatacgacgatgacggctaccagagctactgcaccatctgttgcggcggaagagaggtgctgatgtgtggaaataacaactgctgccggtgcttctgcgtggaatgcgtggacctgctggtgggccccggcgccgcccaggccgctattaaggaagatccttggaactgctacatgtgcggccacaagggcacatacggcctgctgagacggagagaggactggcctagcagactgcagatgttcttcgccaataaccacgaccaggagttcgacccccctaaggtgtaccctcccgtccccgccgagaagagaaagcccatccgggtcctgagcctgttcgatggcatcgccaccggtctgctggtgctgaaggacctgggcatccaggtggataggtacattgcctccgaggtgtgcgaggactccatcaccgtgggaatggtgcgtcatcagggcaagatcatgtacgtgggcgacgtgcggagcgtgacacagaagcatatccaggagtggggccctttcgacctggtgatcggcggcagcccttgcaatgacctgagcatcgtgaacccagcccggaagggcctgtacgagggaaccggcagactgttcttcgagttttacagactgctgcacgacgcccggcctaaggaaggcgacgaccggcccttcttttggctgttcgagaatgtggtggccatgggagtcagcgacaagcgggatattagccggttcctggagagcaaccccgtgatgatcgatgccaaggaagtgagcgccgcccaccgggccagatacttctggggcaatctgcctggcatgaacagacccctggccagcaccgtgaacgacaagctggagctgcaggagtgcctggagcacggccggatcgccaagttcagcaaggtgagaaccatcaccacccgaagcaacagcatcaaacaaggcaaggaccagcactttcctgtgttcatgaacgagaaggaggacatcctgtggtgtaccgagatggagagagtgttcgggttcccagtccactacacagatgtcagcaacatgtctagactggccagacagagactgctgggaagaagctggtccgtccctgtgatcagacacctgttcgcccctctgaaggagtacttcgcctgcgtgagcagcggcaacagcaacgccaacagccggggccccagcttctctagcggcctggtgccactgtccctgagagggagccacatgggccccatggagatctacaaaaccgtgagcgcctggaagcggcagcctgtgcgcgtgctgagcctgtttcggaatatcgataaagtcctgaaaagcctgggattcctggagagcggctctggctccggcggtggcaccctgaagtacgtggaggatgtgacaaacgtggtcagacgggatgtggagaagtggggccccttcgatctggtgtacggcagcacccaacccctgggcagctcttgtgaccggtgccctggctggtacatgtttcagttccaccggatcctgcagtacgccctgccgagacaggagtcccagcggccattcttttggattttcatggacaacttgctgctgaccgaggatgaccaggaaactaccactcggttcctgcagaccgaagccgtgaccctgcaggacgtgagaggccgggactaccagaacgccatgcgggtgtggtccaacatccctggactgaaaagcaagcacgcacctctgacccctaaagaagaggagtacctgcaggcccaggtgcggagcagaagcaagctggacgcccctaaggtggatctgctggtgaagaattgcctcctgcccctgagagagtacttcaagtatttcagccagaatagtctgcccctgggaggcagcggcggcggcgccctggtgacatttgaggacgtcgccgtgcggttcacccaggaggaatgggctctgctggatccttctcagaaaatcctgtaccgggacgtgatgagagagacataccggaatctgacctccgtgggcatcaactgggaatgttgggaccttgaagcctgcttcagaagcctgggaagaaacctgagagtgcaggtggtgaagagaaagtgcgagctgaccaacagcggcccctgcgccgagggcggcccaagcagcggcgcccctcctcccagcggcggcagcccagccggctccccaacctctaccgaggagggcacctctgagtccgccacccccgagagcggccctggcacctccaccgagcccagcgagggcagcgcacccggcagccctgccggcagccccacctccacagaggagggaaccagcaccgagcccagcgaaggcagcgccccaggcaccagcaccgagcctagtgagcaggagattaaacggatcaacaagatcagaagaagacttgtgaaagacagcaacaccaagaaggccggcaagacaggccccatgaaaaccctgctggttagagtgatgacacccgatctgagagagcggctggaaaacctgagaaagaagcctgaaaatatcccccagcccatcagcaatacatctagagccaacctgaataagctgctgaccgattacaccgaaatgaagaaggcgatcctgcatgtgtactgggaagagttccagaaggaccctgtgggcctgatgagccgggtggcccagcctgccagcaagaagatcgatcagaacaagctgaaacctgagatggacgagaagggcaacctgaccaccgccggctttgcctgctctcagtgtggccagcccctgttcgtgtacaagctggagcaggtgtctgagaagggcaaggcttacaccaactacttcggacggtgcaatgtggccgagcacgaaaagctgatcctgctggcccagctgaagcccgagaaggatagcgacgaagccgtgacatatagcctgggaaagtttgggcagagggccctggatttctacagcattcatgtgaccaaggagtccacccaccccgtgaagcccctggcccagatcgccggaaacagatacgcctccggacctgtgggaaaggccctgagcgacgcatgtatgggcacaatcgcctccttcctgtctaagtaccaggacatcatcatcgaacaccagaaggtggtgaagggcaaccagaagagactggagagcctgcgggagctggccggcaaggaaaacctggaataccctagcgtgaccctgccacctcagcctcacaccaaggagggcgttgatgcctacaacgaagtgatcgcccgggtgcgaatgtgggtgaacctgaacctgtggcagaagctgaagctaagcagagatgatgccaagcctctgctgagactgaagggattcccttcctttcctctggtcgagagacaggccaacgaagtggactggtgggacatggtgtgtaacgtgaagaagctgatcaacgagaaaaaggaggatggcaaggtgttttggcagaatctggctggctacaagagacaggaagccctgagaccatacctgagcagcgaggaagatcggaagaagggaaagaaattcgctcggtaccagctgggcgacctgctgctgcacctggaaaagaagcacggcgaggactggggaaaggtgtacgacgaggcctgggagcggattgacaagaaagtggaaggcctgagcaagcacatcaagctggaagaggaacggagaagcgaggacgcccagagcaaggccgccctgaccgactggctgcgggctaaggccagcttcgtgatcgagggcctgaaggaggccgacaaggacgagttctgcagatgcgagctgaagctgcagaagtggtacggggacctgcggggaaagcccttcgccatcgaagccgagaacagcatcctggacatcagcggcttcagcaagcagtacaactgtgccttcatctggcagaaggacggcgtgaagaagctgaacctgtacctgatcatcaactacttcaagggcggcaagctgcggttcaagaagatcaaacctgaagccttcgaagccaacagattctacaccgtgatcaacaaaaagagcggcgagatcgtgcccatggaggtgaacttcaacttcgacgaccccaacctgatcatcctgcctctggcctttggcaagagacagggcagagaattcatctggaacgacctgctgtccctggaaaccggcagcctgaagctggccaacggaagagtgatcgagaagacactgtacaacagaagaacccggcaggatgagcctgccctgttcgtggccctgaccttcgagcggcgggaggtcctggactcctccaatatcaaaccaatgaacctgatcggcgtggcaagaggcgaaaacatccccgccgtgatcgccctgaccgaccccgagggctgcccactgagccggtttaaggatagcctgggaaacccaacccacatcctgagaatcggcgagagctataaggagaagcagcggaccatccaggccaagaaggaggtggagcagcggagagccggcggctacagccggaagtacgccagcaaagccaagaatctggcagacgatatggtgagaaacaccgctagagatctgctgtactacgccgtgacccaggatgccatgctgatcttcgccaacctgagccggggcttcggccggcagggcaagcggaccttcatggccgagagacagtacacacggatggaggactggctgaccgccaagctggcctacgagggcctgagcaagacctacctgtccaagacactggcccagtacacctccaagacatgcagcaactgtgggtttaccatcaccagcgccgactacgacagggtgctggagaagctgaagaagacagcaacaggctggatgaccacaattaacggcaaggagctgaaggtggagggccagattacctactacaacagatacaagagacagaacgtagtcaaggacctgtccgtcgagctggatagactgagcgaagaatctgtgaacaacgacatctcctcctggacaaagggcagaagcggagaagctctgagcctcctgaagaaaagattctcccatagacccgtgcaggagaagttcgtgtgcctgaactgcggcttcgagacacacgcagccgagcaagccgccctgaacatcgccagatcctggctgttcctgcggagccaggagtacaagaaataccagacaaacaagacaaccggcaacaccgataagagagccttcgtcgagacctggcagtccttttaccggaagaagcttaaggaggtgtggaaacctgccgtgcggtctggcggatctggcggaggctccagccaggagcccgtgagcttcgccgacgtggccgtgtacttcagcagggaggagtgggccctgctggaccccgcccagagggtgctgtacagggacgtgatgctggagacctacgagtgcatcgccagcctggcctgccccgcccccaagcccgccgtgatcagcatgctggagggcgaggaggacccctggatccccgaggacatggccggcgacctgggccccggcgagcccgtgagggagggcggcccaagcagcggcgcccctcctcccagcggcggcagcccagccggctccccaacctctaccgaggagggcacctctgagtccgccacccccgagagcggccctggcacctccaccgagcccagcgagggcagcgcacccggcagccctgccggcagccccacctccacagaggagggaaccagcaccgagcccagcgaaggcagcgccccaggcaccagcaccgagcctagtgagcaggagattaaacggatcaacaagatcagaagaagacttgtgaaagacagcaacaccaagaaggccggcaagacaggccccatgaaaaccctgctggttagagtgatgacacccgatctgagagagcggctggaaaacctgagaaagaagcctgaaaatatcccccagcccatcagcaatacatctagagccaacctgaataagctgctgaccgattacaccgaaatgaagaaggcgatcctgcatgtgtactgggaagagttccagaaggaccctgtgggcctgatgagccgggtggcccagcctgccagcaagaagatcgatcagaacaagctgaaacctgagatggacgagaagggcaacctgaccaccgccggctttgcctgctctcagtgtggccagcccctgttcgtgtacaagctggagcaggtgtctgagaagggcaaggcttacaccaactacttcggacggtgcaatgtggccgagcacgaaaagctgatcctgctggcccagctgaagcccgagaaggatagcgacgaagccgtgacatatagcctgggaaagtttgggcagagggccctggatttctacagcattcatgtgaccaaggagtccacccaccccgtgaagcccctggcccagatcgccggaaacagatacgcctccggacctgtgggaaaggccctgagcgacgcatgtatgggcacaatcgcctccttcctgtctaagtaccaggacatcatcatcgaacaccagaaggtggtgaagggcaaccagaagagactggagagcctgcgggagctggccggcaaggaaaacctggaataccctagcgtgaccctgccacctcagcctcacaccaaggagggcgttgatgcctacaacgaagtgatcgcccgggtgcgaatgtgggtgaacctgaacctgtggcagaagctgaagctaagcagagatgatgccaagcctctgctgagactgaagggattcccttcctttcctctggtcgagagacaggccaacgaagtggactggtgggacatggtgtgtaacgtgaagaagctgatcaacgagaaaaaggaggatggcaaggtgttttggcagaatctggctggctacaagagacaggaagccctgagaccatacctgagcagcgaggaagatcggaagaagggaaagaaattcgctcggtaccagctgggcgacctgctgctgcacctggaaaagaagcacggcgaggactggggaaaggtgtacgacgaggcctgggagcggattgacaagaaagtggaaggcctgagcaagcacatcaagctggaagaggaacggagaagcgaggacgcccagagcaaggccgccctgaccgactggctgcgggctaaggccagcttcgtgatcgagggcctgaaggaggccgacaaggacgagttctgcagatgcgagctgaagctgcagaagtggtacggggacctgcggggaaagcccttcgccatcgaagccgagaacagcatcctggacatcagcggcttcagcaagcagtacaactgtgccttcatctggcagaaggacggcgtgaagaagctgaacctgtacctgatcatcaactacttcaagggcggcaagctgcggttcaagaagatcaaacctgaagccttcgaagccaacagattctacaccgtgatcaacaaaaagagcggcgagatcgtgcccatggaggtgaacttcaacttcgacgaccccaacctgatcatcctgcctctggcctttggcaagagacagggcagagaattcatctggaacgacctgctgtccctggaaaccggcagcctgaagctggccaacggaagagtgatcgagaagacactgtacaacagaagaacccggcaggatgagcctgccctgttcgtggccctgaccttcgagcggcgggaggtcctggactcctccaatatcaaaccaatgaacctgatcggcgtggcaagaggcgaaaacatccccgccgtgatcgccctgaccgaccccgagggctgcccactgagccggtttaaggatagcctgggaaacccaacccacatcctgagaatcggcgagagctataaggagaagcagcggaccatccaggccaagaaggaggtggagcagcggagagccggcggctacagccggaagtacgccagcaaagccaagaatctggcagacgatatggtgagaaacaccgctagagatctgctgtactacgccgtgacccaggatgccatgctgatcttcgccaacctgagccggggcttcggccggcagggcaagcggaccttcatggccgagagacagtacacacggatggaggactggctgaccgccaagctggcctacgagggcctgagcaagacctacctgtccaagacactggcccagtacacctccaagacatgcagcaactgtgggtttaccatcaccagcgccgactacgacagggtgctggagaagctgaagaagacagcaacaggctggatgaccacaattaacggcaaggagctgaaggtggagggccagattacctactacaacagatacaagagacagaacgtagtcaaggacctgtccgtcgagctggatagactgagcgaagaatctgtgaacaacgacatctcctcctggacaaagggcagaagcggagaagctctgagcctcctgaagaaaagattctcccatagacccgtgcaggagaagttcgtgtgcctgaactgcggcttcgagacacacgcagccgagcaagccgccctgaacatcgccagatcctggctgttcctgcggagccaggagtacaagaaataccagacaaacaagacaaccggcaacaccgataagagagccttcgtcgagacctggcagtccttttaccggaagaagcttaaggaggtgtggaaacctgccgtgcggtctggcggatctggcggaggctcctagccaggagcccgtgagcttcgccgacgtggccgtgtacttcagcagggaggagtgggccctgctggaccccgcccagagggtgctgtacagggacgtgatgctggagacctacgagtgcatcgccagcctggcctgccccgcccccaagcccgccgtgatcagcatgctggagggcgaggaggacccctggatccccgaggacatggccggcgacctgggccccggcgagcccgtgagggagggatctggctccggcagcggccccaagaaaaagagaaaagtctaagctgccttctgcggggcttgccttctggccatgcccttcttctctcccttgcacctgtacctcttggtctttgaataaagcctgagtaggaaggctagcaaaaaaaaaaaaaaaaaaaaaaaaaaaaaaaaaaaaaaaaaaaaaaaaaaaaaaaaaaaaaaaaaaaaaaaaaaaaaaaa

SEQ ID NO: 15678 - RNA, 9485 nt, synthetic construct
  source 1..9485: mol_type = other RNA
aggaaataagagagaaaagaagagtaagaagaaatataagagccaccatggcccctaagaagaagcgtaaagtgagccggatggaacgcctcgtctacgaggtgcggcagaagtgcagaaacatcgaggacatctgcatctcctgcggatctctgaacgtgaccctggagcacccactgttcatcggcggcatgtgccagaactgtaaaaactgttttctggagtgtgcctatcaatacgacgatgacggctaccagagctactgcaccatctgttgcggcggaagagaggtgctgatgtgtggaaataacaactgctgccggtgcttctgcgtggaatgcgtggacctgctggtgggccccggcgccgcccaggccgctattaaggaagatccttggaactgctacatgtgcggccacaagggcacatacggcctgctgagacggagagaggactggcctagcagactgcagatgttcttcgccaataaccacgaccaggagttcgacccccctaaggtgtaccctcccgtccccgccgagaagagaaagcccatccgggtcctgagcctgttcgatggcatcgccaccggtctgctggtgctgaaggacctgggcatccaggtggataggtacattgcctccgaggtgtgcgaggactccatcaccgtgggaatggtgcgtcatcagggcaagatcatgtacgtgggcgacgtgcggagcgtgacacagaagcatatccaggagtggggccctttcgacctggtgatcggcggcagcccttgcaatgacctgagcatcgtgaacccagcccggaagggcctgtacgagggaaccggcagactgttcttcgagttttacagactgctgcacgacgcccggcctaaggaaggcgacgaccggcccttcttttggctgttcgagaatgtggtggccatgggagtcagcgacaagcgggatattagccggttcctggagagcaaccccgtgatgatcgatgccaaggaagtgagcgccgcccaccgggccagatacttctggggcaatctgcctggcatgaacagacccctggccagcaccgtgaacgacaagctggagctgcaggagtgcctggagcacggccggatcgccaagttcagcaaggtgagaaccatcaccacccgaagcaacagcatcaaacaaggcaaggaccagcactttcctgtgttcatgaacgagaaggaggacatcctgtggtgtaccgagatggagagagtgttcgggttcccagtccactacacagatgtcagcaacatgtctagactggccagacagagactgctgggaagaagctggtccgtccctgtgatcagacacctgttcgcccctctgaaggagtacttcgcctgcgtgagcagcggcaacagcaacgccaacagccggggccccagcttctctagcggcctggtgccactgtccctgagagggagccacatgggccccatggagatctacaaaaccgtgagcgcctggaagcggcagcctgtgcgcgtgctgagcctgtttcggaatatcgataaagtcctgaaaagcctgggattcctggagagcggctctggctccggcggtggcaccctgaagtacgtggaggatgtgacaaacgtggtcagacgggatgtggagaagtggggccccttcgatctggtgtacggcagcacccaacccctgggcagctcttgtgaccggtgccctggctggtacatgtttcagttccaccggatcctgcagtacgccctgccgagacaggagtcccagcggccattcttttggattttcatggacaacttgctgctgaccgaggatgaccaggaaactaccactcggttcctgcagaccgaagccgtgaccctgcaggacgtgagaggccgggactaccagaacgccatgcgggtgtggtccaacatccctggactgaaaagcaagcacgcacctctgacccctaaagaagaggagtacctgcaggcccaggtgcggagcagaagcaagctggacgcccctaaggtggatctgctggtgaagaattgcctcctgcccctgagagagtacttcaagtatttcagccagaatagtctgcccctgggaggcagcggcggcggcgccctggtgacatttgaggacgtcgccgtgcggttcacccaggaggaatgggctctgctggatccttctcagaaaatcctgtaccgggacgtgatgagagagacataccggaatctgacctccgtgggcatcaactgggaatgttgggaccttgaagcctgcttcagaagcctgggaagaaacctgagagtgcaggtggtgaagagaaagtgcgagctgaccaacagcggcccctgcgccgagggcggcccaagcagcggcgcccctcctcccagcggcggcagcccagccggctccccaacctctaccgaggagggcacctctgagtccgccacccccgagagcggccctggcacctccaccgagcccagcgagggcagcgcacccggcagccctgccggcagccccacctccacagaggagggaaccagcaccgagcccagcgaaggcagcgccccaggcaccagcaccgagcctagtgagcaggagattaaacggatcaacaagatcagaagaagacttgtgaaagacagcaacaccaagaaggccggcaagacaggccccatgaaaaccctgctggttagagtgatgacacccgatctgagagagcggctggaaaacctgagaaagaagcctgaaaatatcccccagcccatcagcaatacatctagagccaacctgaataagctgctgaccgattacaccgaaatgaagaaggcgatcctgcatgtgtactgggaagagttccagaaggaccctgtgggcctgatgagccgggtggcccagcctgccagcaagaagatcgatcagaacaagctgaaacctgagatggacgagaagggcaacctgaccaccgccggctttgcctgctctcagtgtggccagcccctgttcgtgtacaagctggagcaggtgtctgagaagggcaaggcttacaccaactacttcggacggtgcaatgtggccgagcacgaaaagctgatcctgctggcccagctgaagcccgagaaggatagcgacgaagccgtgacatatagcctgggaaagtttgggcagagggccctggatttctacagcattcatgtgaccaaggagtccacccaccccgtgaagcccctggcccagatcgccggaaacagatacgcctccggacctgtgggaaaggccctgagcgacgcatgtatgggcacaatcgcctccttcctgtctaagtaccaggacatcatcatcgaacaccagaaggtggtgaagggcaaccagaagagactggagagcctgcgggagctggccggcaaggaaaacctggaataccctagcgtgaccctgccacctcagcctcacaccaaggagggcgttgatgcctacaacgaagtgatcgcccgggtgcgaatgtgggtgaacctgaacctgtggcagaagctgaagctaagcagagatgatgccaagcctctgctgagactgaagggattcccttcctttcctctggtcgagagacaggccaacgaagtggactggtgggacatggtgtgtaacgtgaagaagctgatcaacgagaaaaaggaggatggcaaggtgttttggcagaatctggctggctacaagagacaggaagccctgagaccatacctgagcagcgaggaagatcggaagaagggaaagaaattcgctcggtaccagctgggcgacctgctgctgcacctggaaaagaagcacggcgaggactggggaaaggtgtacgacgaggcctgggagcggattgacaagaaagtggaaggcctgagcaagcacatcaagctggaagaggaacggagaagcgaggacgcccagagcaaggccgccctgaccgactggctgcgggctaaggccagcttcgtgatcgagggcctgaaggaggccgacaaggacgagttctgcagatgcgagctgaagctgcagaagtggtacggggacctgcggggaaagcccttcgccatcgaagccgagaacagcatcctggacatcagcggcttcagcaagcagtacaactgtgccttcatctggcagaaggacggcgtgaagaagctgaacctgtacctgatcatcaactacttcaagggcggcaagctgcggttcaagaagatcaaacctgaagccttcgaagccaacagattctacaccgtgatcaacaaaaagagcggcgagatcgtgcccatggaggtgaacttcaacttcgacgaccccaacctgatcatcctgcctctggcctttggcaagagacagggcagagaattcatctggaacgacctgctgtccctggaaaccggcagcctgaagctggccaacggaagagtgatcgagaagacactgtacaacagaagaacccggcaggatgagcctgccctgttcgtggccctgaccttcgagcggcgggaggtcctggactcctccaatatcaaaccaatgaacctgatcggcgtggcaagaggcgaaaacatccccgccgtgatcgccctgaccgaccccgagggctgcccactgagccggtttaaggatagcctgggaaacccaacccacatcctgagaatcggcgagagctataaggagaagcagcggaccatccaggccaagaaggaggtggagcagcggagagccggcggctacagccggaagtacgccagcaaagccaagaatctggcagacgatatggtgagaaacaccgctagagatctgctgtactacgccgtgacccaggatgccatgctgatcttcgccaacctgagccggggcttcggccggcagggcaagcggaccttcatggccgagagacagtacacacggatggaggactggctgaccgccaagctggcctacgagggcctgagcaagacctacctgtccaagacactggcccagtacacctccaagacatgcagcaactgtgggtttaccatcaccagcgccgactacgacagggtgctggagaagctgaagaagacagcaacaggctggatgaccacaattaacggcaaggagctgaaggtggagggccagattacctactacaacagatacaagagacagaacgtagtcaaggacctgtccgtcgagctggatagactgagcgaagaatctgtgaacaacgacatctcctcctggacaaagggcagaagcggagaagctctgagcctcctgaagaaaagattctcccatagacccgtgcaggagaagttcgtgtgcctgaactgcggcttcgagacacacgcagccgagcaagccgccctgaacatcgccagatcctggctgttcctgcggagccaggagtacaagaaataccagacaaacaagacaaccggcaacaccgataagagagccttcgtcgagacctggcagtccttttaccggaagaagcttaaggaggtgtggaaacctgccgtgcggtctggcggatctggcggaggctccttccagggcagcgtgaccttcagggacgtggccatcgacttcagccaggaggagtgggagtggctgcagcccgcccagagggacctgtacaggcacgtgatgctggagaactacggccacctggtgagcctgggcctggacatcagcaagccctacgtggtgagcctgctggagcagggcagggagccctggctggtgaagggcgacgtgaggagggaccccttcagcgtgagcgagagcaacggcggcccaagcagcggcgcccctcctcccagcggcggcagcccagccggctccccaacctctaccgaggagggcacctctgagtccgccacccccgagagcggccctggcacctccaccgagcccagcgagggcagcgcacccggcagccctgccggcagccccacctccacagaggagggaaccagcaccgagcccagcgaaggcagcgccccaggcaccagcaccgagcctagtgagcaggagattaaacggatcaacaagatcagaagaagacttgtgaaagacagcaacaccaagaaggccggcaagacaggccccatgaaaaccctgctggttagagtgatgacacccgatctgagagagcggctggaaaacctgagaaagaagcctgaaaatatcccccagcccatcagcaatacatctagagccaacctgaataagctgctgaccgattacaccgaaatgaagaaggcgatcctgcatgtgtactgggaagagttccagaaggaccctgtgggcctgatgagccgggtggcccagcctgccagcaagaagatcgatcagaacaagctgaaacctgagatggacgagaagggcaacctgaccaccgccggctttgcctgctctcagtgtggccagcccctgttcgtgtacaagctggagcaggtgtctgagaagggcaaggcttacaccaactacttcggacggtgcaatgtggccgagcacgaaaagctgatcctgctggcccagctgaagcccgagaaggatagcgacgaagccgtgacatatagcctgggaaagtttgggcagagggccctggatttctacagcattcatgtgaccaaggagtccacccaccccgtgaagcccctggcccagatcgccggaaacagatacgcctccggacctgtgggaaaggccctgagcgacgcatgtatgggcacaatcgcctccttcctgtctaagtaccaggacatcatcatcgaacaccagaaggtggtgaagggcaaccagaagagactggagagcctgcgggagctggccggcaaggaaaacctggaataccctagcgtgaccctgccacctcagcctcacaccaaggagggcgttgatgcctacaacgaagtgatcgcccgggtgcgaatgtgggtgaacctgaacctgtggcagaagctgaagctaagcagagatgatgccaagcctctgctgagactgaagggattcccttcctttcctctggtcgagagacaggccaacgaagtggactggtgggacatggtgtgtaacgtgaagaagctgatcaacgagaaaaaggaggatggcaaggtgttttggcagaatctggctggctacaagagacaggaagccctgagaccatacctgagcagcgaggaagatcggaagaagggaaagaaattcgctcggtaccagctgggcgacctgctgctgcacctggaaaagaagcacggcgaggactggggaaaggtgtacgacgaggcctgggagcggattgacaagaaagtggaaggcctgagcaagcacatcaagctggaagaggaacggagaagcgaggacgcccagagcaaggccgccctgaccgactggctgcgggctaaggccagcttcgtgatcgagggcctgaaggaggccgacaaggacgagttctgcagatgcgagctgaagctgcagaagtggtacggggacctgcggggaaagcccttcgccatcgaagccgagaacagcatcctggacatcagcggcttcagcaagcagtacaactgtgccttcatctggcagaaggacggcgtgaagaagctgaacctgtacctgatcatcaactacttcaagggcggcaagctgcggttcaagaagatcaaacctgaagccttcgaagccaacagattctacaccgtgatcaacaaaaagagcggcgagatcgtgcccatggaggtgaacttcaacttcgacgaccccaacctgatcatcctgcctctggcctttggcaagagacagggcagagaattcatctggaacgacctgctgtccctggaaaccggcagcctgaagctggccaacggaagagtgatcgagaagacactgtacaacagaagaacccggcaggatgagcctgccctgttcgtggccctgaccttcgagcggcgggaggtcctggactcctccaatatcaaaccaatgaacctgatcggcgtggcaagaggcgaaaacatccccgccgtgatcgccctgaccgaccccgagggctgcccactgagccggtttaaggatagcctgggaaacccaacccacatcctgagaatcggcgagagctataaggagaagcagcggaccatccaggccaagaaggaggtggagcagcggagagccggcggctacagccggaagtacgccagcaaagccaagaatctggcagacgatatggtgagaaacaccgctagagatctgctgtactacgccgtgacccaggatgccatgctgatcttcgccaacctgagccggggcttcggccggcagggcaagcggaccttcatggccgagagacagtacacacggatggaggactggctgaccgccaagctggcctacgagggcctgagcaagacctacctgtccaagacactggcccagtacacctccaagacatgcagcaactgtgggtttaccatcaccagcgccgactacgacagggtgctggagaagctgaagaagacagcaacaggctggatgaccacaattaacggcaaggagctgaaggtggagggccagattacctactacaacagatacaagagacagaacgtagtcaaggacctgtccgtcgagctggatagactgagcgaagaatctgtgaacaacgacatctcctcctggacaaagggcagaagcggagaagctctgagcctcctgaagaaaagattctcccatagacccgtgcaggagaagttcgtgtgcctgaactgcggcttcgagacacacgcagccgagcaagccgccctgaacatcgccagatcctggctgttcctgcggagccaggagtacaagaaataccagacaaacaagacaaccggcaacaccgataagagagccttcgtcgagacctggcagtccttttaccggaagaagcttaaggaggtgtggaaacctgccgtgcggtctggcggatctggcggaggctcctttccagggcagcgtgaccttcagggacgtggccatcgacttcagccaggaggagtgggagtggctgcagcccgcccagagggacctgtacaggcacgtgatgctggagaactacggccacctggtgagcctgggcctggacatcagcaagccctacgtggtgagcctgctggagcagggcagggagccctggctggtgaagggcgacgtgaggagggaccccttcagcgtgagcgagagcaacggatctggctccggcagcggccccaagaaaaagagaaaagtctaagctgccttctgcggggcttgccttctggccatgcccttcttctctcccttgcacctgtacctcttggtctttgaataaagcctgagtaggaaggctagcaaaaaaaaaaaaaaaaaaaaaaaaaaaaaaaaaaaaaaaaaaaaaaaaaaaaaaaaaaaaaaaaaaaaaaaaaaaaaaaa

SEQ ID NO: 15679 - RNA, 9485 nt, synthetic construct
  source 1..9485: mol_type = other RNA
aggaaataagagagaaaagaagagtaagaagaaatataagagccaccatggcccctaagaagaagcgtaaagtgagccggatggaacgcctcgtctacgaggtgcggcagaagtgcagaaacatcgaggacatctgcatctcctgcggatctctgaacgtgaccctggagcacccactgttcatcggcggcatgtgccagaactgtaaaaactgttttctggagtgtgcctatcaatacgacgatgacggctaccagagctactgcaccatctgttgcggcggaagagaggtgctgatgtgtggaaataacaactgctgccggtgcttctgcgtggaatgcgtggacctgctggtgggccccggcgccgcccaggccgctattaaggaagatccttggaactgctacatgtgcggccacaagggcacatacggcctgctgagacggagagaggactggcctagcagactgcagatgttcttcgccaataaccacgaccaggagttcgacccccctaaggtgtaccctcccgtccccgccgagaagagaaagcccatccgggtcctgagcctgttcgatggcatcgccaccggtctgctggtgctgaaggacctgggcatccaggtggataggtacattgcctccgaggtgtgcgaggactccatcaccgtgggaatggtgcgtcatcagggcaagatcatgtacgtgggcgacgtgcggagcgtgacacagaagcatatccaggagtggggccctttcgacctggtgatcggcggcagcccttgcaatgacctgagcatcgtgaacccagcccggaagggcctgtacgagggaaccggcagactgttcttcgagttttacagactgctgcacgacgcccggcctaaggaaggcgacgaccggcccttcttttggctgttcgagaatgtggtggccatgggagtcagcgacaagcgggatattagccggttcctggagagcaaccccgtgatgatcgatgccaaggaagtgagcgccgcccaccgggccagatacttctggggcaatctgcctggcatgaacagacccctggccagcaccgtgaacgacaagctggagctgcaggagtgcctggagcacggccggatcgccaagttcagcaaggtgagaaccatcaccacccgaagcaacagcatcaaacaaggcaaggaccagcactttcctgtgttcatgaacgagaaggaggacatcctgtggtgtaccgagatggagagagtgttcgggttcccagtccactacacagatgtcagcaacatgtctagactggccagacagagactgctgggaagaagctggtccgtccctgtgatcagacacctgttcgcccctctgaaggagtacttcgcctgcgtgagcagcggcaacagcaacgccaacagccggggccccagcttctctagcggcctggtgccactgtccctgagagggagccacatgggccccatggagatctacaaaaccgtgagcgcctggaagcggcagcctgtgcgcgtgctgagcctgtttcggaatatcgataaagtcctgaaaagcctgggattcctggagagcggctctggctccggcggtggcaccctgaagtacgtggaggatgtgacaaacgtggtcagacgggatgtggagaagtggggccccttcgatctggtgtacggcagcacccaacccctgggcagctcttgtgaccggtgccctggctggtacatgtttcagttccaccggatcctgcagtacgccctgccgagacaggagtcccagcggccattcttttggattttcatggacaacttgctgctgaccgaggatgaccaggaaactaccactcggttcctgcagaccgaagccgtgaccctgcaggacgtgagaggccgggactaccagaacgccatgcgggtgtggtccaacatccctggactgaaaagcaagcacgcacctctgacccctaaagaagaggagtacctgcaggcccaggtgcggagcagaagcaagctggacgcccctaaggtggatctgctggtgaagaattgcctcctgcccctgagagagtacttcaagtatttcagccagaatagtctgcccctgggaggcagcggcggcggcgccctggtgacatttgaggacgtcgccgtgcggttcacccaggaggaatgggctctgctggatccttctcagaaaatcctgtaccgggacgtgatgagagagacataccggaatctgacctccgtgggcatcaactgggaatgttgggaccttgaagcctgcttcagaagcctgggaagaaacctgagagtgcaggtggtgaagagaaagtgcgagctgaccaacagcggcccctgcgccgagggcggcccaagcagcggcgcccctcctcccagcggcggcagcccagccggctccccaacctctaccgaggagggcacctctgagtccgccacccccgagagcggccctggcacctccaccgagcccagcgagggcagcgcacccggcagccctgccggcagccccacctccacagaggagggaaccagcaccgagcccagcgaaggcagcgccccaggcaccagcaccgagcctagtgagcaggagattaaacggatcaacaagatcagaagaagacttgtgaaagacagcaacaccaagaaggccggcaagacaggccccatgaaaaccctgctggttagagtgatgacacccgatctgagagagcggctggaaaacctgagaaagaagcctgaaaatatcccccagcccatcagcaatacatctagagccaacctgaataagctgctgaccgattacaccgaaatgaagaaggcgatcctgcatgtgtactgggaagagttccagaaggaccctgtgggcctgatgagccgggtggcccagcctgccagcaagaagatcgatcagaacaagctgaaacctgagatggacgagaagggcaacctgaccaccgccggctttgcctgctctcagtgtggccagcccctgttcgtgtacaagctggagcaggtgtctgagaagggcaaggcttacaccaactacttcggacggtgcaatgtggccgagcacgaaaagctgatcctgctggcccagctgaagcccgagaaggatagcgacgaagccgtgacatatagcctgggaaagtttgggcagagggccctggatttctacagcattcatgtgaccaaggagtccacccaccccgtgaagcccctggcccagatcgccggaaacagatacgcctccggacctgtgggaaaggccctgagcgacgcatgtatgggcacaatcgcctccttcctgtctaagtaccaggacatcatcatcgaacaccagaaggtggtgaagggcaaccagaagagactggagagcctgcgggagctggccggcaaggaaaacctggaataccctagcgtgaccctgccacctcagcctcacaccaaggagggcgttgatgcctacaacgaagtgatcgcccgggtgcgaatgtgggtgaacctgaacctgtggcagaagctgaagctaagcagagatgatgccaagcctctgctgagactgaagggattcccttcctttcctctggtcgagagacaggccaacgaagtggactggtgggacatggtgtgtaacgtgaagaagctgatcaacgagaaaaaggaggatggcaaggtgttttggcagaatctggctggctacaagagacaggaagccctgagaccatacctgagcagcgaggaagatcggaagaagggaaagaaattcgctcggtaccagctgggcgacctgctgctgcacctggaaaagaagcacggcgaggactggggaaaggtgtacgacgaggcctgggagcggattgacaagaaagtggaaggcctgagcaagcacatcaagctggaagaggaacggagaagcgaggacgcccagagcaaggccgccctgaccgactggctgcgggctaaggccagcttcgtgatcgagggcctgaaggaggccgacaaggacgagttctgcagatgcgagctgaagctgcagaagtggtacggggacctgcggggaaagcccttcgccatcgaagccgagaacagcatcctggacatcagcggcttcagcaagcagtacaactgtgccttcatctggcagaaggacggcgtgaagaagctgaacctgtacctgatcatcaactacttcaagggcggcaagctgcggttcaagaagatcaaacctgaagccttcgaagccaacagattctacaccgtgatcaacaaaaagagcggcgagatcgtgcccatggaggtgaacttcaacttcgacgaccccaacctgatcatcctgcctctggcctttggcaagagacagggcagagaattcatctggaacgacctgctgtccctggaaaccggcagcctgaagctggccaacggaagagtgatcgagaagacactgtacaacagaagaacccggcaggatgagcctgccctgttcgtggccctgaccttcgagcggcgggaggtcctggactcctccaatatcaaaccaatgaacctgatcggcgtggcaagaggcgaaaacatccccgccgtgatcgccctgaccgaccccgagggctgcccactgagccggtttaaggatagcctgggaaacccaacccacatcctgagaatcggcgagagctataaggagaagcagcggaccatccaggccaagaaggaggtggagcagcggagagccggcggctacagccggaagtacgccagcaaagccaagaatctggcagacgatatggtgagaaacaccgctagagatctgctgtactacgccgtgacccaggatgccatgctgatcttcgccaacctgagccggggcttcggccggcagggcaagcggaccttcatggccgagagacagtacacacggatggaggactggctgaccgccaagctggcctacgagggcctgagcaagacctacctgtccaagacactggcccagtacacctccaagacatgcagcaactgtgggtttaccatcaccagcgccgactacgacagggtgctggagaagctgaagaagacagcaacaggctggatgaccacaattaacggcaaggagctgaaggtggagggccagattacctactacaacagatacaagagacagaacgtagtcaaggacctgtccgtcgagctggatagactgagcgaagaatctgtgaacaacgacatctcctcctggacaaagggcagaagcggagaagctctgagcctcctgaagaaaagattctcccatagacccgtgcaggagaagttcgtgtgcctgaactgcggcttcgagacacacgcagccgagcaagccgccctgaacatcgccagatcctggctgttcctgcggagccaggagtacaagaaataccagacaaacaagacaaccggcaacaccgataagagagccttcgtcgagacctggcagtccttttaccggaagaagcttaaggaggtgtggaaacctgccgtgcggtctggcggatctggcggaggctccagccagggcctggtgaccttcggcgacgtggccgtggtgttcagccaggaggagtgggagtggctgagcagcgagcagaggagcctgtactggagggtgatgctggacaactacaggaacctggccagcctgggcctgtgcgccagcaagcccgacatgatcgccctgctggagcagggcaaggacccctgcgtgctgaagaggaagaccgccaggggcctgaggcccgacctggaggccgtgggcggcccaagcagcggcgcccctcctcccagcggcggcagcccagccggctccccaacctctaccgaggagggcacctctgagtccgccacccccgagagcggccctggcacctccaccgagcccagcgagggcagcgcacccggcagccctgccggcagccccacctccacagaggagggaaccagcaccgagcccagcgaaggcagcgccccaggcaccagcaccgagcctagtgagcaggagattaaacggatcaacaagatcagaagaagacttgtgaaagacagcaacaccaagaaggccggcaagacaggccccatgaaaaccctgctggttagagtgatgacacccgatctgagagagcggctggaaaacctgagaaagaagcctgaaaatatcccccagcccatcagcaatacatctagagccaacctgaataagctgctgaccgattacaccgaaatgaagaaggcgatcctgcatgtgtactgggaagagttccagaaggaccctgtgggcctgatgagccgggtggcccagcctgccagcaagaagatcgatcagaacaagctgaaacctgagatggacgagaagggcaacctgaccaccgccggctttgcctgctctcagtgtggccagcccctgttcgtgtacaagctggagcaggtgtctgagaagggcaaggcttacaccaactacttcggacggtgcaatgtggccgagcacgaaaagctgatcctgctggcccagctgaagcccgagaaggatagcgacgaagccgtgacatatagcctgggaaagtttgggcagagggccctggatttctacagcattcatgtgaccaaggagtccacccaccccgtgaagcccctggcccagatcgccggaaacagatacgcctccggacctgtgggaaaggccctgagcgacgcatgtatgggcacaatcgcctccttcctgtctaagtaccaggacatcatcatcgaacaccagaaggtggtgaagggcaaccagaagagactggagagcctgcgggagctggccggcaaggaaaacctggaataccctagcgtgaccctgccacctcagcctcacaccaaggagggcgttgatgcctacaacgaagtgatcgcccgggtgcgaatgtgggtgaacctgaacctgtggcagaagctgaagctaagcagagatgatgccaagcctctgctgagactgaagggattcccttcctttcctctggtcgagagacaggccaacgaagtggactggtgggacatggtgtgtaacgtgaagaagctgatcaacgagaaaaaggaggatggcaaggtgttttggcagaatctggctggctacaagagacaggaagccctgagaccatacctgagcagcgaggaagatcggaagaagggaaagaaattcgctcggtaccagctgggcgacctgctgctgcacctggaaaagaagcacggcgaggactggggaaaggtgtacgacgaggcctgggagcggattgacaagaaagtggaaggcctgagcaagcacatcaagctggaagaggaacggagaagcgaggacgcccagagcaaggccgccctgaccgactggctgcgggctaaggccagcttcgtgatcgagggcctgaaggaggccgacaaggacgagttctgcagatgcgagctgaagctgcagaagtggtacggggacctgcggggaaagcccttcgccatcgaagccgagaacagcatcctggacatcagcggcttcagcaagcagtacaactgtgccttcatctggcagaaggacggcgtgaagaagctgaacctgtacctgatcatcaactacttcaagggcggcaagctgcggttcaagaagatcaaacctgaagccttcgaagccaacagattctacaccgtgatcaacaaaaagagcggcgagatcgtgcccatggaggtgaacttcaacttcgacgaccccaacctgatcatcctgcctctggcctttggcaagagacagggcagagaattcatctggaacgacctgctgtccctggaaaccggcagcctgaagctggccaacggaagagtgatcgagaagacactgtacaacagaagaacccggcaggatgagcctgccctgttcgtggccctgaccttcgagcggcgggaggtcctggactcctccaatatcaaaccaatgaacctgatcggcgtggcaagaggcgaaaacatccccgccgtgatcgccctgaccgaccccgagggctgcccactgagccggtttaaggatagcctgggaaacccaacccacatcctgagaatcggcgagagctataaggagaagcagcggaccatccaggccaagaaggaggtggagcagcggagagccggcggctacagccggaagtacgccagcaaagccaagaatctggcagacgatatggtgagaaacaccgctagagatctgctgtactacgccgtgacccaggatgccatgctgatcttcgccaacctgagccggggcttcggccggcagggcaagcggaccttcatggccgagagacagtacacacggatggaggactggctgaccgccaagctggcctacgagggcctgagcaagacctacctgtccaagacactggcccagtacacctccaagacatgcagcaactgtgggtttaccatcaccagcgccgactacgacagggtgctggagaagctgaagaagacagcaacaggctggatgaccacaattaacggcaaggagctgaaggtggagggccagattacctactacaacagatacaagagacagaacgtagtcaaggacctgtccgtcgagctggatagactgagcgaagaatctgtgaacaacgacatctcctcctggacaaagggcagaagcggagaagctctgagcctcctgaagaaaagattctcccatagacccgtgcaggagaagttcgtgtgcctgaactgcggcttcgagacacacgcagccgagcaagccgccctgaacatcgccagatcctggctgttcctgcggagccaggagtacaagaaataccagacaaacaagacaaccggcaacaccgataagagagccttcgtcgagacctggcagtccttttaccggaagaagcttaaggaggtgtggaaacctgccgtgcggtctggcggatctggcggaggctcctagccagggcctggtgaccttcggcgacgtggccgtggtgttcagccaggaggagtgggagtggctgagcagcgagcagaggagcctgtactggagggtgatgctggacaactacaggaacctggccagcctgggcctgtgcgccagcaagcccgacatgatcgccctgctggagcagggcaaggacccctgcgtgctgaagaggaagaccgccaggggcctgaggcccgacctggaggccgtgggatctggctccggcagcggccccaagaaaaagagaaaagtctaagctgccttctgcggggcttgccttctggccatgcccttcttctctcccttgcacctgtacctcttggtctttgaataaagcctgagtaggaaggctagcaaaaaaaaaaaaaaaaaaaaaaaaaaaaaaaaaaaaaaaaaaaaaaaaaaaaaaaaaaaaaaaaaaaaaaaaaaaaaaaa

SEQ ID NO: 15680 - RNA, 9485 nt, synthetic construct
  source 1..9485: mol_type = other RNA
aggaaataagagagaaaagaagagtaagaagaaatataagagccaccatggcccctaagaagaagcgtaaagtgagccggatggaacgcctcgtctacgaggtgcggcagaagtgcagaaacatcgaggacatctgcatctcctgcggatctctgaacgtgaccctggagcacccactgttcatcggcggcatgtgccagaactgtaaaaactgttttctggagtgtgcctatcaatacgacgatgacggctaccagagctactgcaccatctgttgcggcggaagagaggtgctgatgtgtggaaataacaactgctgccggtgcttctgcgtggaatgcgtggacctgctggtgggccccggcgccgcccaggccgctattaaggaagatccttggaactgctacatgtgcggccacaagggcacatacggcctgctgagacggagagaggactggcctagcagactgcagatgttcttcgccaataaccacgaccaggagttcgacccccctaaggtgtaccctcccgtccccgccgagaagagaaagcccatccgggtcctgagcctgttcgatggcatcgccaccggtctgctggtgctgaaggacctgggcatccaggtggataggtacattgcctccgaggtgtgcgaggactccatcaccgtgggaatggtgcgtcatcagggcaagatcatgtacgtgggcgacgtgcggagcgtgacacagaagcatatccaggagtggggccctttcgacctggtgatcggcggcagcccttgcaatgacctgagcatcgtgaacccagcccggaagggcctgtacgagggaaccggcagactgttcttcgagttttacagactgctgcacgacgcccggcctaaggaaggcgacgaccggcccttcttttggctgttcgagaatgtggtggccatgggagtcagcgacaagcgggatattagccggttcctggagagcaaccccgtgatgatcgatgccaaggaagtgagcgccgcccaccgggccagatacttctggggcaatctgcctggcatgaacagacccctggccagcaccgtgaacgacaagctggagctgcaggagtgcctggagcacggccggatcgccaagttcagcaaggtgagaaccatcaccacccgaagcaacagcatcaaacaaggcaaggaccagcactttcctgtgttcatgaacgagaaggaggacatcctgtggtgtaccgagatggagagagtgttcgggttcccagtccactacacagatgtcagcaacatgtctagactggccagacagagactgctgggaagaagctggtccgtccctgtgatcagacacctgttcgcccctctgaaggagtacttcgcctgcgtgagcagcggcaacagcaacgccaacagccggggccccagcttctctagcggcctggtgccactgtccctgagagggagccacatgggccccatggagatctacaaaaccgtgagcgcctggaagcggcagcctgtgcgcgtgctgagcctgtttcggaatatcgataaagtcctgaaaagcctgggattcctggagagcggctctggctccggcggtggcaccctgaagtacgtggaggatgtgacaaacgtggtcagacgggatgtggagaagtggggccccttcgatctggtgtacggcagcacccaacccctgggcagctcttgtgaccggtgccctggctggtacatgtttcagttccaccggatcctgcagtacgccctgccgagacaggagtcccagcggccattcttttggattttcatggacaacttgctgctgaccgaggatgaccaggaaactaccactcggttcctgcagaccgaagccgtgaccctgcaggacgtgagaggccgggactaccagaacgccatgcgggtgtggtccaacatccctggactgaaaagcaagcacgcacctctgacccctaaagaagaggagtacctgcaggcccaggtgcggagcagaagcaagctggacgcccctaaggtggatctgctggtgaagaattgcctcctgcccctgagagagtacttcaagtatttcagccagaatagtctgcccctgggaggcagcggcggcggcgccctggtgacatttgaggacgtcgccgtgcggttcacccaggaggaatgggctctgctggatccttctcagaaaatcctgtaccgggacgtgatgagagagacataccggaatctgacctccgtgggcatcaactgggaatgttgggaccttgaagcctgcttcagaagcctgggaagaaacctgagagtgcaggtggtgaagagaaagtgcgagctgaccaacagcggcccctgcgccgagggcggcccaagcagcggcgcccctcctcccagcggcggcagcccagccggctccccaacctctaccgaggagggcacctctgagtccgccacccccgagagcggccctggcacctccaccgagcccagcgagggcagcgcacccggcagccctgccggcagccccacctccacagaggagggaaccagcaccgagcccagcgaaggcagcgccccaggcaccagcaccgagcctagtgagcaggagattaaacggatcaacaagatcagaagaagacttgtgaaagacagcaacaccaagaaggccggcaagacaggccccatgaaaaccctgctggttagagtgatgacacccgatctgagagagcggctggaaaacctgagaaagaagcctgaaaatatcccccagcccatcagcaatacatctagagccaacctgaataagctgctgaccgattacaccgaaatgaagaaggcgatcctgcatgtgtactgggaagagttccagaaggaccctgtgggcctgatgagccgggtggcccagcctgccagcaagaagatcgatcagaacaagctgaaacctgagatggacgagaagggcaacctgaccaccgccggctttgcctgctctcagtgtggccagcccctgttcgtgtacaagctggagcaggtgtctgagaagggcaaggcttacaccaactacttcggacggtgcaatgtggccgagcacgaaaagctgatcctgctggcccagctgaagcccgagaaggatagcgacgaagccgtgacatatagcctgggaaagtttgggcagagggccctggatttctacagcattcatgtgaccaaggagtccacccaccccgtgaagcccctggcccagatcgccggaaacagatacgcctccggacctgtgggaaaggccctgagcgacgcatgtatgggcacaatcgcctccttcctgtctaagtaccaggacatcatcatcgaacaccagaaggtggtgaagggcaaccagaagagactggagagcctgcgggagctggccggcaaggaaaacctggaataccctagcgtgaccctgccacctcagcctcacaccaaggagggcgttgatgcctacaacgaagtgatcgcccgggtgcgaatgtgggtgaacctgaacctgtggcagaagctgaagctaagcagagatgatgccaagcctctgctgagactgaagggattcccttcctttcctctggtcgagagacaggccaacgaagtggactggtgggacatggtgtgtaacgtgaagaagctgatcaacgagaaaaaggaggatggcaaggtgttttggcagaatctggctggctacaagagacaggaagccctgagaccatacctgagcagcgaggaagatcggaagaagggaaagaaattcgctcggtaccagctgggcgacctgctgctgcacctggaaaagaagcacggcgaggactggggaaaggtgtacgacgaggcctgggagcggattgacaagaaagtggaaggcctgagcaagcacatcaagctggaagaggaacggagaagcgaggacgcccagagcaaggccgccctgaccgactggctgcgggctaaggccagcttcgtgatcgagggcctgaaggaggccgacaaggacgagttctgcagatgcgagctgaagctgcagaagtggtacggggacctgcggggaaagcccttcgccatcgaagccgagaacagcatcctggacatcagcggcttcagcaagcagtacaactgtgccttcatctggcagaaggacggcgtgaagaagctgaacctgtacctgatcatcaactacttcaagggcggcaagctgcggttcaagaagatcaaacctgaagccttcgaagccaacagattctacaccgtgatcaacaaaaagagcggcgagatcgtgcccatggaggtgaacttcaacttcgacgaccccaacctgatcatcctgcctctggcctttggcaagagacagggcagagaattcatctggaacgacctgctgtccctggaaaccggcagcctgaagctggccaacggaagagtgatcgagaagacactgtacaacagaagaacccggcaggatgagcctgccctgttcgtggccctgaccttcgagcggcgggaggtcctggactcctccaatatcaaaccaatgaacctgatcggcgtggcaagaggcgaaaacatccccgccgtgatcgccctgaccgaccccgagggctgcccactgagccggtttaaggatagcctgggaaacccaacccacatcctgagaatcggcgagagctataaggagaagcagcggaccatccaggccaagaaggaggtggagcagcggagagccggcggctacagccggaagtacgccagcaaagccaagaatctggcagacgatatggtgagaaacaccgctagagatctgctgtactacgccgtgacccaggatgccatgctgatcttcgccaacctgagccggggcttcggccggcagggcaagcggaccttcatggccgagagacagtacacacggatggaggactggctgaccgccaagctggcctacgagggcctgagcaagacctacctgtccaagacactggcccagtacacctccaagacatgcagcaactgtgggtttaccatcaccagcgccgactacgacagggtgctggagaagctgaagaagacagcaacaggctggatgaccacaattaacggcaaggagctgaaggtggagggccagattacctactacaacagatacaagagacagaacgtagtcaaggacctgtccgtcgagctggatagactgagcgaagaatctgtgaacaacgacatctcctcctggacaaagggcagaagcggagaagctctgagcctcctgaagaaaagattctcccatagacccgtgcaggagaagttcgtgtgcctgaactgcggcttcgagacacacgcagccgagcaagccgccctgaacatcgccagatcctggctgttcctgcggagccaggagtacaagaaataccagacaaacaagacaaccggcaacaccgataagagagccttcgtcgagacctggcagtccttttaccggaagaagcttaaggaggtgtggaaacctgccgtgcggtctggcggatctggcggaggctccatgctgcagaccgcctggaggcaggagcccgtgaccttcgaggacgtggccgtgtacttcacccagaacgagtgggccagcctggacagcgtgcagagggccctgtacagggaggtgatgctggagaactacgccaacgtggccagcctggccttccccttcaccacccccgtgctggtgagccagctggagcagggcgagctgccctggggcctggacccctgggagcccatgggcagggagggcggcccaagcagcggcgcccctcctcccagcggcggcagcccagccggctccccaacctctaccgaggagggcacctctgagtccgccacccccgagagcggccctggcacctccaccgagcccagcgagggcagcgcacccggcagccctgccggcagccccacctccacagaggagggaaccagcaccgagcccagcgaaggcagcgccccaggcaccagcaccgagcctagtgagcaggagattaaacggatcaacaagatcagaagaagacttgtgaaagacagcaacaccaagaaggccggcaagacaggccccatgaaaaccctgctggttagagtgatgacacccgatctgagagagcggctggaaaacctgagaaagaagcctgaaaatatcccccagcccatcagcaatacatctagagccaacctgaataagctgctgaccgattacaccgaaatgaagaaggcgatcctgcatgtgtactgggaagagttccagaaggaccctgtgggcctgatgagccgggtggcccagcctgccagcaagaagatcgatcagaacaagctgaaacctgagatggacgagaagggcaacctgaccaccgccggctttgcctgctctcagtgtggccagcccctgttcgtgtacaagctggagcaggtgtctgagaagggcaaggcttacaccaactacttcggacggtgcaatgtggccgagcacgaaaagctgatcctgctggcccagctgaagcccgagaaggatagcgacgaagccgtgacatatagcctgggaaagtttgggcagagggccctggatttctacagcattcatgtgaccaaggagtccacccaccccgtgaagcccctggcccagatcgccggaaacagatacgcctccggacctgtgggaaaggccctgagcgacgcatgtatgggcacaatcgcctccttcctgtctaagtaccaggacatcatcatcgaacaccagaaggtggtgaagggcaaccagaagagactggagagcctgcgggagctggccggcaaggaaaacctggaataccctagcgtgaccctgccacctcagcctcacaccaaggagggcgttgatgcctacaacgaagtgatcgcccgggtgcgaatgtgggtgaacctgaacctgtggcagaagctgaagctaagcagagatgatgccaagcctctgctgagactgaagggattcccttcctttcctctggtcgagagacaggccaacgaagtggactggtgggacatggtgtgtaacgtgaagaagctgatcaacgagaaaaaggaggatggcaaggtgttttggcagaatctggctggctacaagagacaggaagccctgagaccatacctgagcagcgaggaagatcggaagaagggaaagaaattcgctcggtaccagctgggcgacctgctgctgcacctggaaaagaagcacggcgaggactggggaaaggtgtacgacgaggcctgggagcggattgacaagaaagtggaaggcctgagcaagcacatcaagctggaagaggaacggagaagcgaggacgcccagagcaaggccgccctgaccgactggctgcgggctaaggccagcttcgtgatcgagggcctgaaggaggccgacaaggacgagttctgcagatgcgagctgaagctgcagaagtggtacggggacctgcggggaaagcccttcgccatcgaagccgagaacagcatcctggacatcagcggcttcagcaagcagtacaactgtgccttcatctggcagaaggacggcgtgaagaagctgaacctgtacctgatcatcaactacttcaagggcggcaagctgcggttcaagaagatcaaacctgaagccttcgaagccaacagattctacaccgtgatcaacaaaaagagcggcgagatcgtgcccatggaggtgaacttcaacttcgacgaccccaacctgatcatcctgcctctggcctttggcaagagacagggcagagaattcatctggaacgacctgctgtccctggaaaccggcagcctgaagctggccaacggaagagtgatcgagaagacactgtacaacagaagaacccggcaggatgagcctgccctgttcgtggccctgaccttcgagcggcgggaggtcctggactcctccaatatcaaaccaatgaacctgatcggcgtggcaagaggcgaaaacatccccgccgtgatcgccctgaccgaccccgagggctgcccactgagccggtttaaggatagcctgggaaacccaacccacatcctgagaatcggcgagagctataaggagaagcagcggaccatccaggccaagaaggaggtggagcagcggagagccggcggctacagccggaagtacgccagcaaagccaagaatctggcagacgatatggtgagaaacaccgctagagatctgctgtactacgccgtgacccaggatgccatgctgatcttcgccaacctgagccggggcttcggccggcagggcaagcggaccttcatggccgagagacagtacacacggatggaggactggctgaccgccaagctggcctacgagggcctgagcaagacctacctgtccaagacactggcccagtacacctccaagacatgcagcaactgtgggtttaccatcaccagcgccgactacgacagggtgctggagaagctgaagaagacagcaacaggctggatgaccacaattaacggcaaggagctgaaggtggagggccagattacctactacaacagatacaagagacagaacgtagtcaaggacctgtccgtcgagctggatagactgagcgaagaatctgtgaacaacgacatctcctcctggacaaagggcagaagcggagaagctctgagcctcctgaagaaaagattctcccatagacccgtgcaggagaagttcgtgtgcctgaactgcggcttcgagacacacgcagccgagcaagccgccctgaacatcgccagatcctggctgttcctgcggagccaggagtacaagaaataccagacaaacaagacaaccggcaacaccgataagagagccttcgtcgagacctggcagtccttttaccggaagaagcttaaggaggtgtggaaacctgccgtgcggtctggcggatctggcggaggctcctatgctgcagaccgcctggaggcaggagcccgtgaccttcgaggacgtggccgtgtacttcacccagaacgagtgggccagcctggacagcgtgcagagggccctgtacagggaggtgatgctggagaactacgccaacgtggccagcctggccttccccttcaccacccccgtgctggtgagccagctggagcagggcgagctgccctggggcctggacccctgggagcccatgggcagggagggatctggctccggcagcggccccaagaaaaagagaaaagtctaagctgccttctgcggggcttgccttctggccatgcccttcttctctcccttgcacctgtacctcttggtctttgaataaagcctgagtaggaaggctagcaaaaaaaaaaaaaaaaaaaaaaaaaaaaaaaaaaaaaaaaaaaaaaaaaaaaaaaaaaaaaaaaaaaaaaaaaaaaaaaa

SEQ ID NO: 15681 - RNA, 9485 nt, synthetic construct
  source 1..9485: mol_type = other RNA
aggaaataagagagaaaagaagagtaagaagaaatataagagccaccatggcccctaagaagaagcgtaaagtgagccggatggaacgcctcgtctacgaggtgcggcagaagtgcagaaacatcgaggacatctgcatctcctgcggatctctgaacgtgaccctggagcacccactgttcatcggcggcatgtgccagaactgtaaaaactgttttctggagtgtgcctatcaatacgacgatgacggctaccagagctactgcaccatctgttgcggcggaagagaggtgctgatgtgtggaaataacaactgctgccggtgcttctgcgtggaatgcgtggacctgctggtgggccccggcgccgcccaggccgctattaaggaagatccttggaactgctacatgtgcggccacaagggcacatacggcctgctgagacggagagaggactggcctagcagactgcagatgttcttcgccaataaccacgaccaggagttcgacccccctaaggtgtaccctcccgtccccgccgagaagagaaagcccatccgggtcctgagcctgttcgatggcatcgccaccggtctgctggtgctgaaggacctgggcatccaggtggataggtacattgcctccgaggtgtgcgaggactccatcaccgtgggaatggtgcgtcatcagggcaagatcatgtacgtgggcgacgtgcggagcgtgacacagaagcatatccaggagtggggccctttcgacctggtgatcggcggcagcccttgcaatgacctgagcatcgtgaacccagcccggaagggcctgtacgagggaaccggcagactgttcttcgagttttacagactgctgcacgacgcccggcctaaggaaggcgacgaccggcccttcttttggctgttcgagaatgtggtggccatgggagtcagcgacaagcgggatattagccggttcctggagagcaaccccgtgatgatcgatgccaaggaagtgagcgccgcccaccgggccagatacttctggggcaatctgcctggcatgaacagacccctggccagcaccgtgaacgacaagctggagctgcaggagtgcctggagcacggccggatcgccaagttcagcaaggtgagaaccatcaccacccgaagcaacagcatcaaacaaggcaaggaccagcactttcctgtgttcatgaacgagaaggaggacatcctgtggtgtaccgagatggagagagtgttcgggttcccagtccactacacagatgtcagcaacatgtctagactggccagacagagactgctgggaagaagctggtccgtccctgtgatcagacacctgttcgcccctctgaaggagtacttcgcctgcgtgagcagcggcaacagcaacgccaacagccggggccccagcttctctagcggcctggtgccactgtccctgagagggagccacatgggccccatggagatctacaaaaccgtgagcgcctggaagcggcagcctgtgcgcgtgctgagcctgtttcggaatatcgataaagtcctgaaaagcctgggattcctggagagcggctctggctccggcggtggcaccctgaagtacgtggaggatgtgacaaacgtggtcagacgggatgtggagaagtggggccccttcgatctggtgtacggcagcacccaacccctgggcagctcttgtgaccggtgccctggctggtacatgtttcagttccaccggatcctgcagtacgccctgccgagacaggagtcccagcggccattcttttggattttcatggacaacttgctgctgaccgaggatgaccaggaaactaccactcggttcctgcagaccgaagccgtgaccctgcaggacgtgagaggccgggactaccagaacgccatgcgggtgtggtccaacatccctggactgaaaagcaagcacgcacctctgacccctaaagaagaggagtacctgcaggcccaggtgcggagcagaagcaagctggacgcccctaaggtggatctgctggtgaagaattgcctcctgcccctgagagagtacttcaagtatttcagccagaatagtctgcccctgggaggcagcggcggcggcgccctggtgacatttgaggacgtcgccgtgcggttcacccaggaggaatgggctctgctggatccttctcagaaaatcctgtaccgggacgtgatgagagagacataccggaatctgacctccgtgggcatcaactgggaatgttgggaccttgaagcctgcttcagaagcctgggaagaaacctgagagtgcaggtggtgaagagaaagtgcgagctgaccaacagcggcccctgcgccgagggcggcccaagcagcggcgcccctcctcccagcggcggcagcccagccggctccccaacctctaccgaggagggcacctctgagtccgccacccccgagagcggccctggcacctccaccgagcccagcgagggcagcgcacccggcagccctgccggcagccccacctccacagaggagggaaccagcaccgagcccagcgaaggcagcgccccaggcaccagcaccgagcctagtgagcaggagattaaacggatcaacaagatcagaagaagacttgtgaaagacagcaacaccaagaaggccggcaagacaggccccatgaaaaccctgctggttagagtgatgacacccgatctgagagagcggctggaaaacctgagaaagaagcctgaaaatatcccccagcccatcagcaatacatctagagccaacctgaataagctgctgaccgattacaccgaaatgaagaaggcgatcctgcatgtgtactgggaagagttccagaaggaccctgtgggcctgatgagccgggtggcccagcctgccagcaagaagatcgatcagaacaagctgaaacctgagatggacgagaagggcaacctgaccaccgccggctttgcctgctctcagtgtggccagcccctgttcgtgtacaagctggagcaggtgtctgagaagggcaaggcttacaccaactacttcggacggtgcaatgtggccgagcacgaaaagctgatcctgctggcccagctgaagcccgagaaggatagcgacgaagccgtgacatatagcctgggaaagtttgggcagagggccctggatttctacagcattcatgtgaccaaggagtccacccaccccgtgaagcccctggcccagatcgccggaaacagatacgcctccggacctgtgggaaaggccctgagcgacgcatgtatgggcacaatcgcctccttcctgtctaagtaccaggacatcatcatcgaacaccagaaggtggtgaagggcaaccagaagagactggagagcctgcgggagctggccggcaaggaaaacctggaataccctagcgtgaccctgccacctcagcctcacaccaaggagggcgttgatgcctacaacgaagtgatcgcccgggtgcgaatgtgggtgaacctgaacctgtggcagaagctgaagctaagcagagatgatgccaagcctctgctgagactgaagggattcccttcctttcctctggtcgagagacaggccaacgaagtggactggtgggacatggtgtgtaacgtgaagaagctgatcaacgagaaaaaggaggatggcaaggtgttttggcagaatctggctggctacaagagacaggaagccctgagaccatacctgagcagcgaggaagatcggaagaagggaaagaaattcgctcggtaccagctgggcgacctgctgctgcacctggaaaagaagcacggcgaggactggggaaaggtgtacgacgaggcctgggagcggattgacaagaaagtggaaggcctgagcaagcacatcaagctggaagaggaacggagaagcgaggacgcccagagcaaggccgccctgaccgactggctgcgggctaaggccagcttcgtgatcgagggcctgaaggaggccgacaaggacgagttctgcagatgcgagctgaagctgcagaagtggtacggggacctgcggggaaagcccttcgccatcgaagccgagaacagcatcctggacatcagcggcttcagcaagcagtacaactgtgccttcatctggcagaaggacggcgtgaagaagctgaacctgtacctgatcatcaactacttcaagggcggcaagctgcggttcaagaagatcaaacctgaagccttcgaagccaacagattctacaccgtgatcaacaaaaagagcggcgagatcgtgcccatggaggtgaacttcaacttcgacgaccccaacctgatcatcctgcctctggcctttggcaagagacagggcagagaattcatctggaacgacctgctgtccctggaaaccggcagcctgaagctggccaacggaagagtgatcgagaagacactgtacaacagaagaacccggcaggatgagcctgccctgttcgtggccctgaccttcgagcggcgggaggtcctggactcctccaatatcaaaccaatgaacctgatcggcgtggcaagaggcgaaaacatccccgccgtgatcgccctgaccgaccccgagggctgcccactgagccggtttaaggatagcctgggaaacccaacccacatcctgagaatcggcgagagctataaggagaagcagcggaccatccaggccaagaaggaggtggagcagcggagagccggcggctacagccggaagtacgccagcaaagccaagaatctggcagacgatatggtgagaaacaccgctagagatctgctgtactacgccgtgacccaggatgccatgctgatcttcgccaacctgagccggggcttcggccggcagggcaagcggaccttcatggccgagagacagtacacacggatggaggactggctgaccgccaagctggcctacgagggcctgagcaagacctacctgtccaagacactggcccagtacacctccaagacatgcagcaactgtgggtttaccatcaccagcgccgactacgacagggtgctggagaagctgaagaagacagcaacaggctggatgaccacaattaacggcaaggagctgaaggtggagggccagattacctactacaacagatacaagagacagaacgtagtcaaggacctgtccgtcgagctggatagactgagcgaagaatctgtgaacaacgacatctcctcctggacaaagggcagaagcggagaagctctgagcctcctgaagaaaagattctcccatagacccgtgcaggagaagttcgtgtgcctgaactgcggcttcgagacacacgcagccgagcaagccgccctgaacatcgccagatcctggctgttcctgcggagccaggagtacaagaaataccagacaaacaagacaaccggcaacaccgataagagagccttcgtcgagacctggcagtccttttaccggaagaagcttaaggaggtgtggaaacctgccgtgcggtctggcggatctggcggaggctccaggcccagggccgtgaagttcgccgacgtggccgtgtacttcagcaccgaggagtggggctgcctgaggcccgcccagagggccctgtacagggacgtgatgagggagacctacggccacctgggcgccctgggctgcgccggccccaagcccgccctgatcagctggctggagaggaacaccgacgactgggagcccgccgccctggacccccaggagtgccccaagagggtgaccgtgcagggcggcccaagcagcggcgcccctcctcccagcggcggcagcccagccggctccccaacctctaccgaggagggcacctctgagtccgccacccccgagagcggccctggcacctccaccgagcccagcgagggcagcgcacccggcagccctgccggcagccccacctccacagaggagggaaccagcaccgagcccagcgaaggcagcgccccaggcaccagcaccgagcctagtgagcaggagattaaacggatcaacaagatcagaagaagacttgtgaaagacagcaacaccaagaaggccggcaagacaggccccatgaaaaccctgctggttagagtgatgacacccgatctgagagagcggctggaaaacctgagaaagaagcctgaaaatatcccccagcccatcagcaatacatctagagccaacctgaataagctgctgaccgattacaccgaaatgaagaaggcgatcctgcatgtgtactgggaagagttccagaaggaccctgtgggcctgatgagccgggtggcccagcctgccagcaagaagatcgatcagaacaagctgaaacctgagatggacgagaagggcaacctgaccaccgccggctttgcctgctctcagtgtggccagcccctgttcgtgtacaagctggagcaggtgtctgagaagggcaaggcttacaccaactacttcggacggtgcaatgtggccgagcacgaaaagctgatcctgctggcccagctgaagcccgagaaggatagcgacgaagccgtgacatatagcctgggaaagtttgggcagagggccctggatttctacagcattcatgtgaccaaggagtccacccaccccgtgaagcccctggcccagatcgccggaaacagatacgcctccggacctgtgggaaaggccctgagcgacgcatgtatgggcacaatcgcctccttcctgtctaagtaccaggacatcatcatcgaacaccagaaggtggtgaagggcaaccagaagagactggagagcctgcgggagctggccggcaaggaaaacctggaataccctagcgtgaccctgccacctcagcctcacaccaaggagggcgttgatgcctacaacgaagtgatcgcccgggtgcgaatgtgggtgaacctgaacctgtggcagaagctgaagctaagcagagatgatgccaagcctctgctgagactgaagggattcccttcctttcctctggtcgagagacaggccaacgaagtggactggtgggacatggtgtgtaacgtgaagaagctgatcaacgagaaaaaggaggatggcaaggtgttttggcagaatctggctggctacaagagacaggaagccctgagaccatacctgagcagcgaggaagatcggaagaagggaaagaaattcgctcggtaccagctgggcgacctgctgctgcacctggaaaagaagcacggcgaggactggggaaaggtgtacgacgaggcctgggagcggattgacaagaaagtggaaggcctgagcaagcacatcaagctggaagaggaacggagaagcgaggacgcccagagcaaggccgccctgaccgactggctgcgggctaaggccagcttcgtgatcgagggcctgaaggaggccgacaaggacgagttctgcagatgcgagctgaagctgcagaagtggtacggggacctgcggggaaagcccttcgccatcgaagccgagaacagcatcctggacatcagcggcttcagcaagcagtacaactgtgccttcatctggcagaaggacggcgtgaagaagctgaacctgtacctgatcatcaactacttcaagggcggcaagctgcggttcaagaagatcaaacctgaagccttcgaagccaacagattctacaccgtgatcaacaaaaagagcggcgagatcgtgcccatggaggtgaacttcaacttcgacgaccccaacctgatcatcctgcctctggcctttggcaagagacagggcagagaattcatctggaacgacctgctgtccctggaaaccggcagcctgaagctggccaacggaagagtgatcgagaagacactgtacaacagaagaacccggcaggatgagcctgccctgttcgtggccctgaccttcgagcggcgggaggtcctggactcctccaatatcaaaccaatgaacctgatcggcgtggcaagaggcgaaaacatccccgccgtgatcgccctgaccgaccccgagggctgcccactgagccggtttaaggatagcctgggaaacccaacccacatcctgagaatcggcgagagctataaggagaagcagcggaccatccaggccaagaaggaggtggagcagcggagagccggcggctacagccggaagtacgccagcaaagccaagaatctggcagacgatatggtgagaaacaccgctagagatctgctgtactacgccgtgacccaggatgccatgctgatcttcgccaacctgagccggggcttcggccggcagggcaagcggaccttcatggccgagagacagtacacacggatggaggactggctgaccgccaagctggcctacgagggcctgagcaagacctacctgtccaagacactggcccagtacacctccaagacatgcagcaactgtgggtttaccatcaccagcgccgactacgacagggtgctggagaagctgaagaagacagcaacaggctggatgaccacaattaacggcaaggagctgaaggtggagggccagattacctactacaacagatacaagagacagaacgtagtcaaggacctgtccgtcgagctggatagactgagcgaagaatctgtgaacaacgacatctcctcctggacaaagggcagaagcggagaagctctgagcctcctgaagaaaagattctcccatagacccgtgcaggagaagttcgtgtgcctgaactgcggcttcgagacacacgcagccgagcaagccgccctgaacatcgccagatcctggctgttcctgcggagccaggagtacaagaaataccagacaaacaagacaaccggcaacaccgataagagagccttcgtcgagacctggcagtccttttaccggaagaagcttaaggaggtgtggaaacctgccgtgcggtctggcggatctggcggaggctcctaggcccagggccgtgaagttcgccgacgtggccgtgtacttcagcaccgaggagtggggctgcctgaggcccgcccagagggccctgtacagggacgtgatgagggagacctacggccacctgggcgccctgggctgcgccggccccaagcccgccctgatcagctggctggagaggaacaccgacgactgggagcccgccgccctggacccccaggagtgccccaagagggtgaccgtgcagggatctggctccggcagcggccccaagaaaaagagaaaagtctaagctgccttctgcggggcttgccttctggccatgcccttcttctctcccttgcacctgtacctcttggtctttgaataaagcctgagtaggaaggctagcaaaaaaaaaaaaaaaaaaaaaaaaaaaaaaaaaaaaaaaaaaaaaaaaaaaaaaaaaaaaaaaaaaaaaaaaaaaaaaaa

SEQ ID NO: 15682 - RNA, 9485 nt, synthetic construct
  source 1..9485: mol_type = other RNA
aggaaataagagagaaaagaagagtaagaagaaatataagagccaccatggcccctaagaagaagcgtaaagtgagccggatggaacgcctcgtctacgaggtgcggcagaagtgcagaaacatcgaggacatctgcatctcctgcggatctctgaacgtgaccctggagcacccactgttcatcggcggcatgtgccagaactgtaaaaactgttttctggagtgtgcctatcaatacgacgatgacggctaccagagctactgcaccatctgttgcggcggaagagaggtgctgatgtgtggaaataacaactgctgccggtgcttctgcgtggaatgcgtggacctgctggtgggccccggcgccgcccaggccgctattaaggaagatccttggaactgctacatgtgcggccacaagggcacatacggcctgctgagacggagagaggactggcctagcagactgcagatgttcttcgccaataaccacgaccaggagttcgacccccctaaggtgtaccctcccgtccccgccgagaagagaaagcccatccgggtcctgagcctgttcgatggcatcgccaccggtctgctggtgctgaaggacctgggcatccaggtggataggtacattgcctccgaggtgtgcgaggactccatcaccgtgggaatggtgcgtcatcagggcaagatcatgtacgtgggcgacgtgcggagcgtgacacagaagcatatccaggagtggggccctttcgacctggtgatcggcggcagcccttgcaatgacctgagcatcgtgaacccagcccggaagggcctgtacgagggaaccggcagactgttcttcgagttttacagactgctgcacgacgcccggcctaaggaaggcgacgaccggcccttcttttggctgttcgagaatgtggtggccatgggagtcagcgacaagcgggatattagccggttcctggagagcaaccccgtgatgatcgatgccaaggaagtgagcgccgcccaccgggccagatacttctggggcaatctgcctggcatgaacagacccctggccagcaccgtgaacgacaagctggagctgcaggagtgcctggagcacggccggatcgccaagttcagcaaggtgagaaccatcaccacccgaagcaacagcatcaaacaaggcaaggaccagcactttcctgtgttcatgaacgagaaggaggacatcctgtggtgtaccgagatggagagagtgttcgggttcccagtccactacacagatgtcagcaacatgtctagactggccagacagagactgctgggaagaagctggtccgtccctgtgatcagacacctgttcgcccctctgaaggagtacttcgcctgcgtgagcagcggcaacagcaacgccaacagccggggccccagcttctctagcggcctggtgccactgtccctgagagggagccacatgggccccatggagatctacaaaaccgtgagcgcctggaagcggcagcctgtgcgcgtgctgagcctgtttcggaatatcgataaagtcctgaaaagcctgggattcctggagagcggctctggctccggcggtggcaccctgaagtacgtggaggatgtgacaaacgtggtcagacgggatgtggagaagtggggccccttcgatctggtgtacggcagcacccaacccctgggcagctcttgtgaccggtgccctggctggtacatgtttcagttccaccggatcctgcagtacgccctgccgagacaggagtcccagcggccattcttttggattttcatggacaacttgctgctgaccgaggatgaccaggaaactaccactcggttcctgcagaccgaagccgtgaccctgcaggacgtgagaggccgggactaccagaacgccatgcgggtgtggtccaacatccctggactgaaaagcaagcacgcacctctgacccctaaagaagaggagtacctgcaggcccaggtgcggagcagaagcaagctggacgcccctaaggtggatctgctggtgaagaattgcctcctgcccctgagagagtacttcaagtatttcagccagaatagtctgcccctgggaggcagcggcggcggcgccctggtgacatttgaggacgtcgccgtgcggttcacccaggaggaatgggctctgctggatccttctcagaaaatcctgtaccgggacgtgatgagagagacataccggaatctgacctccgtgggcatcaactgggaatgttgggaccttgaagcctgcttcagaagcctgggaagaaacctgagagtgcaggtggtgaagagaaagtgcgagctgaccaacagcggcccctgcgccgagggcggcccaagcagcggcgcccctcctcccagcggcggcagcccagccggctccccaacctctaccgaggagggcacctctgagtccgccacccccgagagcggccctggcacctccaccgagcccagcgagggcagcgcacccggcagccctgccggcagccccacctccacagaggagggaaccagcaccgagcccagcgaaggcagcgccccaggcaccagcaccgagcctagtgagcaggagattaaacggatcaacaagatcagaagaagacttgtgaaagacagcaacaccaagaaggccggcaagacaggccccatgaaaaccctgctggttagagtgatgacacccgatctgagagagcggctggaaaacctgagaaagaagcctgaaaatatcccccagcccatcagcaatacatctagagccaacctgaataagctgctgaccgattacaccgaaatgaagaaggcgatcctgcatgtgtactgggaagagttccagaaggaccctgtgggcctgatgagccgggtggcccagcctgccagcaagaagatcgatcagaacaagctgaaacctgagatggacgagaagggcaacctgaccaccgccggctttgcctgctctcagtgtggccagcccctgttcgtgtacaagctggagcaggtgtctgagaagggcaaggcttacaccaactacttcggacggtgcaatgtggccgagcacgaaaagctgatcctgctggcccagctgaagcccgagaaggatagcgacgaagccgtgacatatagcctgggaaagtttgggcagagggccctggatttctacagcattcatgtgaccaaggagtccacccaccccgtgaagcccctggcccagatcgccggaaacagatacgcctccggacctgtgggaaaggccctgagcgacgcatgtatgggcacaatcgcctccttcctgtctaagtaccaggacatcatcatcgaacaccagaaggtggtgaagggcaaccagaagagactggagagcctgcgggagctggccggcaaggaaaacctggaataccctagcgtgaccctgccacctcagcctcacaccaaggagggcgttgatgcctacaacgaagtgatcgcccgggtgcgaatgtgggtgaacctgaacctgtggcagaagctgaagctaagcagagatgatgccaagcctctgctgagactgaagggattcccttcctttcctctggtcgagagacaggccaacgaagtggactggtgggacatggtgtgtaacgtgaagaagctgatcaacgagaaaaaggaggatggcaaggtgttttggcagaatctggctggctacaagagacaggaagccctgagaccatacctgagcagcgaggaagatcggaagaagggaaagaaattcgctcggtaccagctgggcgacctgctgctgcacctggaaaagaagcacggcgaggactggggaaaggtgtacgacgaggcctgggagcggattgacaagaaagtggaaggcctgagcaagcacatcaagctggaagaggaacggagaagcgaggacgcccagagcaaggccgccctgaccgactggctgcgggctaaggccagcttcgtgatcgagggcctgaaggaggccgacaaggacgagttctgcagatgcgagctgaagctgcagaagtggtacggggacctgcggggaaagcccttcgccatcgaagccgagaacagcatcctggacatcagcggcttcagcaagcagtacaactgtgccttcatctggcagaaggacggcgtgaagaagctgaacctgtacctgatcatcaactacttcaagggcggcaagctgcggttcaagaagatcaaacctgaagccttcgaagccaacagattctacaccgtgatcaacaaaaagagcggcgagatcgtgcccatggaggtgaacttcaacttcgacgaccccaacctgatcatcctgcctctggcctttggcaagagacagggcagagaattcatctggaacgacctgctgtccctggaaaccggcagcctgaagctggccaacggaagagtgatcgagaagacactgtacaacagaagaacccggcaggatgagcctgccctgttcgtggccctgaccttcgagcggcgggaggtcctggactcctccaatatcaaaccaatgaacctgatcggcgtggcaagaggcgaaaacatccccgccgtgatcgccctgaccgaccccgagggctgcccactgagccggtttaaggatagcctgggaaacccaacccacatcctgagaatcggcgagagctataaggagaagcagcggaccatccaggccaagaaggaggtggagcagcggagagccggcggctacagccggaagtacgccagcaaagccaagaatctggcagacgatatggtgagaaacaccgctagagatctgctgtactacgccgtgacccaggatgccatgctgatcttcgccaacctgagccggggcttcggccggcagggcaagcggaccttcatggccgagagacagtacacacggatggaggactggctgaccgccaagctggcctacgagggcctgagcaagacctacctgtccaagacactggcccagtacacctccaagacatgcagcaactgtgggtttaccatcaccagcgccgactacgacagggtgctggagaagctgaagaagacagcaacaggctggatgaccacaattaacggcaaggagctgaaggtggagggccagattacctactacaacagatacaagagacagaacgtagtcaaggacctgtccgtcgagctggatagactgagcgaagaatctgtgaacaacgacatctcctcctggacaaagggcagaagcggagaagctctgagcctcctgaagaaaagattctcccatagacccgtgcaggagaagttcgtgtgcctgaactgcggcttcgagacacacgcagccgagcaagccgccctgaacatcgccagatcctggctgttcctgcggagccaggagtacaagaaataccagacaaacaagacaaccggcaacaccgataagagagccttcgtcgagacctggcagtccttttaccggaagaagcttaaggaggtgtggaaacctgccgtgcggtctggcggatctggcggaggctccttccaggaggccgtgaccttcaacgacgtggccgtggtgttcagcgaggaggagctgggcctgctggacagcacccagaggaagctgtacagggacgtgatgctggagaacttcaggaacctggtgagcctgggccacagcagcagcaagcccgacatgatcagccagctggagagggaggaggagaagctgtgcatgaaggagatcaggaccgagaggggcggcaggaaccccaacgaggccggcggcccaagcagcggcgcccctcctcccagcggcggcagcccagccggctccccaacctctaccgaggagggcacctctgagtccgccacccccgagagcggccctggcacctccaccgagcccagcgagggcagcgcacccggcagccctgccggcagccccacctccacagaggagggaaccagcaccgagcccagcgaaggcagcgccccaggcaccagcaccgagcctagtgagcaggagattaaacggatcaacaagatcagaagaagacttgtgaaagacagcaacaccaagaaggccggcaagacaggccccatgaaaaccctgctggttagagtgatgacacccgatctgagagagcggctggaaaacctgagaaagaagcctgaaaatatcccccagcccatcagcaatacatctagagccaacctgaataagctgctgaccgattacaccgaaatgaagaaggcgatcctgcatgtgtactgggaagagttccagaaggaccctgtgggcctgatgagccgggtggcccagcctgccagcaagaagatcgatcagaacaagctgaaacctgagatggacgagaagggcaacctgaccaccgccggctttgcctgctctcagtgtggccagcccctgttcgtgtacaagctggagcaggtgtctgagaagggcaaggcttacaccaactacttcggacggtgcaatgtggccgagcacgaaaagctgatcctgctggcccagctgaagcccgagaaggatagcgacgaagccgtgacatatagcctgggaaagtttgggcagagggccctggatttctacagcattcatgtgaccaaggagtccacccaccccgtgaagcccctggcccagatcgccggaaacagatacgcctccggacctgtgggaaaggccctgagcgacgcatgtatgggcacaatcgcctccttcctgtctaagtaccaggacatcatcatcgaacaccagaaggtggtgaagggcaaccagaagagactggagagcctgcgggagctggccggcaaggaaaacctggaataccctagcgtgaccctgccacctcagcctcacaccaaggagggcgttgatgcctacaacgaagtgatcgcccgggtgcgaatgtgggtgaacctgaacctgtggcagaagctgaagctaagcagagatgatgccaagcctctgctgagactgaagggattcccttcctttcctctggtcgagagacaggccaacgaagtggactggtgggacatggtgtgtaacgtgaagaagctgatcaacgagaaaaaggaggatggcaaggtgttttggcagaatctggctggctacaagagacaggaagccctgagaccatacctgagcagcgaggaagatcggaagaagggaaagaaattcgctcggtaccagctgggcgacctgctgctgcacctggaaaagaagcacggcgaggactggggaaaggtgtacgacgaggcctgggagcggattgacaagaaagtggaaggcctgagcaagcacatcaagctggaagaggaacggagaagcgaggacgcccagagcaaggccgccctgaccgactggctgcgggctaaggccagcttcgtgatcgagggcctgaaggaggccgacaaggacgagttctgcagatgcgagctgaagctgcagaagtggtacggggacctgcggggaaagcccttcgccatcgaagccgagaacagcatcctggacatcagcggcttcagcaagcagtacaactgtgccttcatctggcagaaggacggcgtgaagaagctgaacctgtacctgatcatcaactacttcaagggcggcaagctgcggttcaagaagatcaaacctgaagccttcgaagccaacagattctacaccgtgatcaacaaaaagagcggcgagatcgtgcccatggaggtgaacttcaacttcgacgaccccaacctgatcatcctgcctctggcctttggcaagagacagggcagagaattcatctggaacgacctgctgtccctggaaaccggcagcctgaagctggccaacggaagagtgatcgagaagacactgtacaacagaagaacccggcaggatgagcctgccctgttcgtggccctgaccttcgagcggcgggaggtcctggactcctccaatatcaaaccaatgaacctgatcggcgtggcaagaggcgaaaacatccccgccgtgatcgccctgaccgaccccgagggctgcccactgagccggtttaaggatagcctgggaaacccaacccacatcctgagaatcggcgagagctataaggagaagcagcggaccatccaggccaagaaggaggtggagcagcggagagccggcggctacagccggaagtacgccagcaaagccaagaatctggcagacgatatggtgagaaacaccgctagagatctgctgtactacgccgtgacccaggatgccatgctgatcttcgccaacctgagccggggcttcggccggcagggcaagcggaccttcatggccgagagacagtacacacggatggaggactggctgaccgccaagctggcctacgagggcctgagcaagacctacctgtccaagacactggcccagtacacctccaagacatgcagcaactgtgggtttaccatcaccagcgccgactacgacagggtgctggagaagctgaagaagacagcaacaggctggatgaccacaattaacggcaaggagctgaaggtggagggccagattacctactacaacagatacaagagacagaacgtagtcaaggacctgtccgtcgagctggatagactgagcgaagaatctgtgaacaacgacatctcctcctggacaaagggcagaagcggagaagctctgagcctcctgaagaaaagattctcccatagacccgtgcaggagaagttcgtgtgcctgaactgcggcttcgagacacacgcagccgagcaagccgccctgaacatcgccagatcctggctgttcctgcggagccaggagtacaagaaataccagacaaacaagacaaccggcaacaccgataagagagccttcgtcgagacctggcagtccttttaccggaagaagcttaaggaggtgtggaaacctgccgtgcggtctggcggatctggcggaggctcctttccaggaggccgtgaccttcaacgacgtggccgtggtgttcagcgaggaggagctgggcctgctggacagcacccagaggaagctgtacagggacgtgatgctggagaacttcaggaacctggtgagcctgggccacagcagcagcaagcccgacatgatcagccagctggagagggaggaggagaagctgtgcatgaaggagatcaggaccgagaggggcggcaggaaccccaacgaggccggatctggctccggcagcggccccaagaaaaagagaaaagtctaagctgccttctgcggggcttgccttctggccatgcccttcttctctcccttgcacctgtacctcttggtctttgaataaagcctgagtaggaaggctagcaaaaaaaaaaaaaaaaaaaaaaaaaaaaaaaaaaaaaaaaaaaaaaaaaaaaaaaaaaaaaaaaaaaaaaaaaaaaaaaa

SEQ ID NO: 15683 - RNA, 9485 nt, synthetic construct
  source 1..9485: mol_type = other RNA
aggaaataagagagaaaagaagagtaagaagaaatataagagccaccatggcccctaagaagaagcgtaaagtgagccggatggaacgcctcgtctacgaggtgcggcagaagtgcagaaacatcgaggacatctgcatctcctgcggatctctgaacgtgaccctggagcacccactgttcatcggcggcatgtgccagaactgtaaaaactgttttctggagtgtgcctatcaatacgacgatgacggctaccagagctactgcaccatctgttgcggcggaagagaggtgctgatgtgtggaaataacaactgctgccggtgcttctgcgtggaatgcgtggacctgctggtgggccccggcgccgcccaggccgctattaaggaagatccttggaactgctacatgtgcggccacaagggcacatacggcctgctgagacggagagaggactggcctagcagactgcagatgttcttcgccaataaccacgaccaggagttcgacccccctaaggtgtaccctcccgtccccgccgagaagagaaagcccatccgggtcctgagcctgttcgatggcatcgccaccggtctgctggtgctgaaggacctgggcatccaggtggataggtacattgcctccgaggtgtgcgaggactccatcaccgtgggaatggtgcgtcatcagggcaagatcatgtacgtgggcgacgtgcggagcgtgacacagaagcatatccaggagtggggccctttcgacctggtgatcggcggcagcccttgcaatgacctgagcatcgtgaacccagcccggaagggcctgtacgagggaaccggcagactgttcttcgagttttacagactgctgcacgacgcccggcctaaggaaggcgacgaccggcccttcttttggctgttcgagaatgtggtggccatgggagtcagcgacaagcgggatattagccggttcctggagagcaaccccgtgatgatcgatgccaaggaagtgagcgccgcccaccgggccagatacttctggggcaatctgcctggcatgaacagacccctggccagcaccgtgaacgacaagctggagctgcaggagtgcctggagcacggccggatcgccaagttcagcaaggtgagaaccatcaccacccgaagcaacagcatcaaacaaggcaaggaccagcactttcctgtgttcatgaacgagaaggaggacatcctgtggtgtaccgagatggagagagtgttcgggttcccagtccactacacagatgtcagcaacatgtctagactggccagacagagactgctgggaagaagctggtccgtccctgtgatcagacacctgttcgcccctctgaaggagtacttcgcctgcgtgagcagcggcaacagcaacgccaacagccggggccccagcttctctagcggcctggtgccactgtccctgagagggagccacatgggccccatggagatctacaaaaccgtgagcgcctggaagcggcagcctgtgcgcgtgctgagcctgtttcggaatatcgataaagtcctgaaaagcctgggattcctggagagcggctctggctccggcggtggcaccctgaagtacgtggaggatgtgacaaacgtggtcagacgggatgtggagaagtggggccccttcgatctggtgtacggcagcacccaacccctgggcagctcttgtgaccggtgccctggctggtacatgtttcagttccaccggatcctgcagtacgccctgccgagacaggagtcccagcggccattcttttggattttcatggacaacttgctgctgaccgaggatgaccaggaaactaccactcggttcctgcagaccgaagccgtgaccctgcaggacgtgagaggccgggactaccagaacgccatgcgggtgtggtccaacatccctggactgaaaagcaagcacgcacctctgacccctaaagaagaggagtacctgcaggcccaggtgcggagcagaagcaagctggacgcccctaaggtggatctgctggtgaagaattgcctcctgcccctgagagagtacttcaagtatttcagccagaatagtctgcccctgggaggcagcggcggcggcgccctggtgacatttgaggacgtcgccgtgcggttcacccaggaggaatgggctctgctggatccttctcagaaaatcctgtaccgggacgtgatgagagagacataccggaatctgacctccgtgggcatcaactgggaatgttgggaccttgaagcctgcttcagaagcctgggaagaaacctgagagtgcaggtggtgaagagaaagtgcgagctgaccaacagcggcccctgcgccgagggcggcccaagcagcggcgcccctcctcccagcggcggcagcccagccggctccccaacctctaccgaggagggcacctctgagtccgccacccccgagagcggccctggcacctccaccgagcccagcgagggcagcgcacccggcagccctgccggcagccccacctccacagaggagggaaccagcaccgagcccagcgaaggcagcgccccaggcaccagcaccgagcctagtgagcaggagattaaacggatcaacaagatcagaagaagacttgtgaaagacagcaacaccaagaaggccggcaagacaggccccatgaaaaccctgctggttagagtgatgacacccgatctgagagagcggctggaaaacctgagaaagaagcctgaaaatatcccccagcccatcagcaatacatctagagccaacctgaataagctgctgaccgattacaccgaaatgaagaaggcgatcctgcatgtgtactgggaagagttccagaaggaccctgtgggcctgatgagccgggtggcccagcctgccagcaagaagatcgatcagaacaagctgaaacctgagatggacgagaagggcaacctgaccaccgccggctttgcctgctctcagtgtggccagcccctgttcgtgtacaagctggagcaggtgtctgagaagggcaaggcttacaccaactacttcggacggtgcaatgtggccgagcacgaaaagctgatcctgctggcccagctgaagcccgagaaggatagcgacgaagccgtgacatatagcctgggaaagtttgggcagagggccctggatttctacagcattcatgtgaccaaggagtccacccaccccgtgaagcccctggcccagatcgccggaaacagatacgcctccggacctgtgggaaaggccctgagcgacgcatgtatgggcacaatcgcctccttcctgtctaagtaccaggacatcatcatcgaacaccagaaggtggtgaagggcaaccagaagagactggagagcctgcgggagctggccggcaaggaaaacctggaataccctagcgtgaccctgccacctcagcctcacaccaaggagggcgttgatgcctacaacgaagtgatcgcccgggtgcgaatgtgggtgaacctgaacctgtggcagaagctgaagctaagcagagatgatgccaagcctctgctgagactgaagggattcccttcctttcctctggtcgagagacaggccaacgaagtggactggtgggacatggtgtgtaacgtgaagaagctgatcaacgagaaaaaggaggatggcaaggtgttttggcagaatctggctggctacaagagacaggaagccctgagaccatacctgagcagcgaggaagatcggaagaagggaaagaaattcgctcggtaccagctgggcgacctgctgctgcacctggaaaagaagcacggcgaggactggggaaaggtgtacgacgaggcctgggagcggattgacaagaaagtggaaggcctgagcaagcacatcaagctggaagaggaacggagaagcgaggacgcccagagcaaggccgccctgaccgactggctgcgggctaaggccagcttcgtgatcgagggcctgaaggaggccgacaaggacgagttctgcagatgcgagctgaagctgcagaagtggtacggggacctgcggggaaagcccttcgccatcgaagccgagaacagcatcctggacatcagcggcttcagcaagcagtacaactgtgccttcatctggcagaaggacggcgtgaagaagctgaacctgtacctgatcatcaactacttcaagggcggcaagctgcggttcaagaagatcaaacctgaagccttcgaagccaacagattctacaccgtgatcaacaaaaagagcggcgagatcgtgcccatggaggtgaacttcaacttcgacgaccccaacctgatcatcctgcctctggcctttggcaagagacagggcagagaattcatctggaacgacctgctgtccctggaaaccggcagcctgaagctggccaacggaagagtgatcgagaagacactgtacaacagaagaacccggcaggatgagcctgccctgttcgtggccctgaccttcgagcggcgggaggtcctggactcctccaatatcaaaccaatgaacctgatcggcgtggcaagaggcgaaaacatccccgccgtgatcgccctgaccgaccccgagggctgcccactgagccggtttaaggatagcctgggaaacccaacccacatcctgagaatcggcgagagctataaggagaagcagcggaccatccaggccaagaaggaggtggagcagcggagagccggcggctacagccggaagtacgccagcaaagccaagaatctggcagacgatatggtgagaaacaccgctagagatctgctgtactacgccgtgacccaggatgccatgctgatcttcgccaacctgagccggggcttcggccggcagggcaagcggaccttcatggccgagagacagtacacacggatggaggactggctgaccgccaagctggcctacgagggcctgagcaagacctacctgtccaagacactggcccagtacacctccaagacatgcagcaactgtgggtttaccatcaccagcgccgactacgacagggtgctggagaagctgaagaagacagcaacaggctggatgaccacaattaacggcaaggagctgaaggtggagggccagattacctactacaacagatacaagagacagaacgtagtcaaggacctgtccgtcgagctggatagactgagcgaagaatctgtgaacaacgacatctcctcctggacaaagggcagaagcggagaagctctgagcctcctgaagaaaagattctcccatagacccgtgcaggagaagttcgtgtgcctgaactgcggcttcgagacacacgcagccgagcaagccgccctgaacatcgccagatcctggctgttcctgcggagccaggagtacaagaaataccagacaaacaagacaaccggcaacaccgataagagagccttcgtcgagacctggcagtccttttaccggaagaagcttaaggaggtgtggaaacctgccgtgcggtctggcggatctggcggaggctccgcccacggcagcgtgatgttcagcgacgtgagcgtggtgttcagccaggaggagtgggactacctggacgtggagcagagggacctgtacagggacgtgatgctggagaactacaacaacctggtgagcctgggctgcttcatcagcaagcccgacgtgatcagcctgctggagcagggcaaggagccctggaaggtggtgaggaaggagaggaggaggtaccccgacctggagaccaggcacggcggcccaagcagcggcgcccctcctcccagcggcggcagcccagccggctccccaacctctaccgaggagggcacctctgagtccgccacccccgagagcggccctggcacctccaccgagcccagcgagggcagcgcacccggcagccctgccggcagccccacctccacagaggagggaaccagcaccgagcccagcgaaggcagcgccccaggcaccagcaccgagcctagtgagcaggagattaaacggatcaacaagatcagaagaagacttgtgaaagacagcaacaccaagaaggccggcaagacaggccccatgaaaaccctgctggttagagtgatgacacccgatctgagagagcggctggaaaacctgagaaagaagcctgaaaatatcccccagcccatcagcaatacatctagagccaacctgaataagctgctgaccgattacaccgaaatgaagaaggcgatcctgcatgtgtactgggaagagttccagaaggaccctgtgggcctgatgagccgggtggcccagcctgccagcaagaagatcgatcagaacaagctgaaacctgagatggacgagaagggcaacctgaccaccgccggctttgcctgctctcagtgtggccagcccctgttcgtgtacaagctggagcaggtgtctgagaagggcaaggcttacaccaactacttcggacggtgcaatgtggccgagcacgaaaagctgatcctgctggcccagctgaagcccgagaaggatagcgacgaagccgtgacatatagcctgggaaagtttgggcagagggccctggatttctacagcattcatgtgaccaaggagtccacccaccccgtgaagcccctggcccagatcgccggaaacagatacgcctccggacctgtgggaaaggccctgagcgacgcatgtatgggcacaatcgcctccttcctgtctaagtaccaggacatcatcatcgaacaccagaaggtggtgaagggcaaccagaagagactggagagcctgcgggagctggccggcaaggaaaacctggaataccctagcgtgaccctgccacctcagcctcacaccaaggagggcgttgatgcctacaacgaagtgatcgcccgggtgcgaatgtgggtgaacctgaacctgtggcagaagctgaagctaagcagagatgatgccaagcctctgctgagactgaagggattcccttcctttcctctggtcgagagacaggccaacgaagtggactggtgggacatggtgtgtaacgtgaagaagctgatcaacgagaaaaaggaggatggcaaggtgttttggcagaatctggctggctacaagagacaggaagccctgagaccatacctgagcagcgaggaagatcggaagaagggaaagaaattcgctcggtaccagctgggcgacctgctgctgcacctggaaaagaagcacggcgaggactggggaaaggtgtacgacgaggcctgggagcggattgacaagaaagtggaaggcctgagcaagcacatcaagctggaagaggaacggagaagcgaggacgcccagagcaaggccgccctgaccgactggctgcgggctaaggccagcttcgtgatcgagggcctgaaggaggccgacaaggacgagttctgcagatgcgagctgaagctgcagaagtggtacggggacctgcggggaaagcccttcgccatcgaagccgagaacagcatcctggacatcagcggcttcagcaagcagtacaactgtgccttcatctggcagaaggacggcgtgaagaagctgaacctgtacctgatcatcaactacttcaagggcggcaagctgcggttcaagaagatcaaacctgaagccttcgaagccaacagattctacaccgtgatcaacaaaaagagcggcgagatcgtgcccatggaggtgaacttcaacttcgacgaccccaacctgatcatcctgcctctggcctttggcaagagacagggcagagaattcatctggaacgacctgctgtccctggaaaccggcagcctgaagctggccaacggaagagtgatcgagaagacactgtacaacagaagaacccggcaggatgagcctgccctgttcgtggccctgaccttcgagcggcgggaggtcctggactcctccaatatcaaaccaatgaacctgatcggcgtggcaagaggcgaaaacatccccgccgtgatcgccctgaccgaccccgagggctgcccactgagccggtttaaggatagcctgggaaacccaacccacatcctgagaatcggcgagagctataaggagaagcagcggaccatccaggccaagaaggaggtggagcagcggagagccggcggctacagccggaagtacgccagcaaagccaagaatctggcagacgatatggtgagaaacaccgctagagatctgctgtactacgccgtgacccaggatgccatgctgatcttcgccaacctgagccggggcttcggccggcagggcaagcggaccttcatggccgagagacagtacacacggatggaggactggctgaccgccaagctggcctacgagggcctgagcaagacctacctgtccaagacactggcccagtacacctccaagacatgcagcaactgtgggtttaccatcaccagcgccgactacgacagggtgctggagaagctgaagaagacagcaacaggctggatgaccacaattaacggcaaggagctgaaggtggagggccagattacctactacaacagatacaagagacagaacgtagtcaaggacctgtccgtcgagctggatagactgagcgaagaatctgtgaacaacgacatctcctcctggacaaagggcagaagcggagaagctctgagcctcctgaagaaaagattctcccatagacccgtgcaggagaagttcgtgtgcctgaactgcggcttcgagacacacgcagccgagcaagccgccctgaacatcgccagatcctggctgttcctgcggagccaggagtacaagaaataccagacaaacaagacaaccggcaacaccgataagagagccttcgtcgagacctggcagtccttttaccggaagaagcttaaggaggtgtggaaacctgccgtgcggtctggcggatctggcggaggctcctgcccacggcagcgtgatgttcagcgacgtgagcgtggtgttcagccaggaggagtgggactacctggacgtggagcagagggacctgtacagggacgtgatgctggagaactacaacaacctggtgagcctgggctgcttcatcagcaagcccgacgtgatcagcctgctggagcagggcaaggagccctggaaggtggtgaggaaggagaggaggaggtaccccgacctggagaccaggcacggatctggctccggcagcggccccaagaaaaagagaaaagtctaagctgccttctgcggggcttgccttctggccatgcccttcttctctcccttgcacctgtacctcttggtctttgaataaagcctgagtaggaaggctagcaaaaaaaaaaaaaaaaaaaaaaaaaaaaaaaaaaaaaaaaaaaaaaaaaaaaaaaaaaaaaaaaaaaaaaaaaaaaaaaa

SEQ ID NO: 15684 - RNA, 9485 nt, synthetic construct
  source 1..9485: mol_type = other RNA
aggaaataagagagaaaagaagagtaagaagaaatataagagccaccatggcccctaagaagaagcgtaaagtgagccggatggaacgcctcgtctacgaggtgcggcagaagtgcagaaacatcgaggacatctgcatctcctgcggatctctgaacgtgaccctggagcacccactgttcatcggcggcatgtgccagaactgtaaaaactgttttctggagtgtgcctatcaatacgacgatgacggctaccagagctactgcaccatctgttgcggcggaagagaggtgctgatgtgtggaaataacaactgctgccggtgcttctgcgtggaatgcgtggacctgctggtgggccccggcgccgcccaggccgctattaaggaagatccttggaactgctacatgtgcggccacaagggcacatacggcctgctgagacggagagaggactggcctagcagactgcagatgttcttcgccaataaccacgaccaggagttcgacccccctaaggtgtaccctcccgtccccgccgagaagagaaagcccatccgggtcctgagcctgttcgatggcatcgccaccggtctgctggtgctgaaggacctgggcatccaggtggataggtacattgcctccgaggtgtgcgaggactccatcaccgtgggaatggtgcgtcatcagggcaagatcatgtacgtgggcgacgtgcggagcgtgacacagaagcatatccaggagtggggccctttcgacctggtgatcggcggcagcccttgcaatgacctgagcatcgtgaacccagcccggaagggcctgtacgagggaaccggcagactgttcttcgagttttacagactgctgcacgacgcccggcctaaggaaggcgacgaccggcccttcttttggctgttcgagaatgtggtggccatgggagtcagcgacaagcgggatattagccggttcctggagagcaaccccgtgatgatcgatgccaaggaagtgagcgccgcccaccgggccagatacttctggggcaatctgcctggcatgaacagacccctggccagcaccgtgaacgacaagctggagctgcaggagtgcctggagcacggccggatcgccaagttcagcaaggtgagaaccatcaccacccgaagcaacagcatcaaacaaggcaaggaccagcactttcctgtgttcatgaacgagaaggaggacatcctgtggtgtaccgagatggagagagtgttcgggttcccagtccactacacagatgtcagcaacatgtctagactggccagacagagactgctgggaagaagctggtccgtccctgtgatcagacacctgttcgcccctctgaaggagtacttcgcctgcgtgagcagcggcaacagcaacgccaacagccggggccccagcttctctagcggcctggtgccactgtccctgagagggagccacatgggccccatggagatctacaaaaccgtgagcgcctggaagcggcagcctgtgcgcgtgctgagcctgtttcggaatatcgataaagtcctgaaaagcctgggattcctggagagcggctctggctccggcggtggcaccctgaagtacgtggaggatgtgacaaacgtggtcagacgggatgtggagaagtggggccccttcgatctggtgtacggcagcacccaacccctgggcagctcttgtgaccggtgccctggctggtacatgtttcagttccaccggatcctgcagtacgccctgccgagacaggagtcccagcggccattcttttggattttcatggacaacttgctgctgaccgaggatgaccaggaaactaccactcggttcctgcagaccgaagccgtgaccctgcaggacgtgagaggccgggactaccagaacgccatgcgggtgtggtccaacatccctggactgaaaagcaagcacgcacctctgacccctaaagaagaggagtacctgcaggcccaggtgcggagcagaagcaagctggacgcccctaaggtggatctgctggtgaagaattgcctcctgcccctgagagagtacttcaagtatttcagccagaatagtctgcccctgggaggcagcggcggcggcgccctggtgacatttgaggacgtcgccgtgcggttcacccaggaggaatgggctctgctggatccttctcagaaaatcctgtaccgggacgtgatgagagagacataccggaatctgacctccgtgggcatcaactgggaatgttgggaccttgaagcctgcttcagaagcctgggaagaaacctgagagtgcaggtggtgaagagaaagtgcgagctgaccaacagcggcccctgcgccgagggcggcccaagcagcggcgcccctcctcccagcggcggcagcccagccggctccccaacctctaccgaggagggcacctctgagtccgccacccccgagagcggccctggcacctccaccgagcccagcgagggcagcgcacccggcagccctgccggcagccccacctccacagaggagggaaccagcaccgagcccagcgaaggcagcgccccaggcaccagcaccgagcctagtgagcaggagattaaacggatcaacaagatcagaagaagacttgtgaaagacagcaacaccaagaaggccggcaagacaggccccatgaaaaccctgctggttagagtgatgacacccgatctgagagagcggctggaaaacctgagaaagaagcctgaaaatatcccccagcccatcagcaatacatctagagccaacctgaataagctgctgaccgattacaccgaaatgaagaaggcgatcctgcatgtgtactgggaagagttccagaaggaccctgtgggcctgatgagccgggtggcccagcctgccagcaagaagatcgatcagaacaagctgaaacctgagatggacgagaagggcaacctgaccaccgccggctttgcctgctctcagtgtggccagcccctgttcgtgtacaagctggagcaggtgtctgagaagggcaaggcttacaccaactacttcggacggtgcaatgtggccgagcacgaaaagctgatcctgctggcccagctgaagcccgagaaggatagcgacgaagccgtgacatatagcctgggaaagtttgggcagagggccctggatttctacagcattcatgtgaccaaggagtccacccaccccgtgaagcccctggcccagatcgccggaaacagatacgcctccggacctgtgggaaaggccctgagcgacgcatgtatgggcacaatcgcctccttcctgtctaagtaccaggacatcatcatcgaacaccagaaggtggtgaagggcaaccagaagagactggagagcctgcgggagctggccggcaaggaaaacctggaataccctagcgtgaccctgccacctcagcctcacaccaaggagggcgttgatgcctacaacgaagtgatcgcccgggtgcgaatgtgggtgaacctgaacctgtggcagaagctgaagctaagcagagatgatgccaagcctctgctgagactgaagggattcccttcctttcctctggtcgagagacaggccaacgaagtggactggtgggacatggtgtgtaacgtgaagaagctgatcaacgagaaaaaggaggatggcaaggtgttttggcagaatctggctggctacaagagacaggaagccctgagaccatacctgagcagcgaggaagatcggaagaagggaaagaaattcgctcggtaccagctgggcgacctgctgctgcacctggaaaagaagcacggcgaggactggggaaaggtgtacgacgaggcctgggagcggattgacaagaaagtggaaggcctgagcaagcacatcaagctggaagaggaacggagaagcgaggacgcccagagcaaggccgccctgaccgactggctgcgggctaaggccagcttcgtgatcgagggcctgaaggaggccgacaaggacgagttctgcagatgcgagctgaagctgcagaagtggtacggggacctgcggggaaagcccttcgccatcgaagccgagaacagcatcctggacatcagcggcttcagcaagcagtacaactgtgccttcatctggcagaaggacggcgtgaagaagctgaacctgtacctgatcatcaactacttcaagggcggcaagctgcggttcaagaagatcaaacctgaagccttcgaagccaacagattctacaccgtgatcaacaaaaagagcggcgagatcgtgcccatggaggtgaacttcaacttcgacgaccccaacctgatcatcctgcctctggcctttggcaagagacagggcagagaattcatctggaacgacctgctgtccctggaaaccggcagcctgaagctggccaacggaagagtgatcgagaagacactgtacaacagaagaacccggcaggatgagcctgccctgttcgtggccctgaccttcgagcggcgggaggtcctggactcctccaatatcaaaccaatgaacctgatcggcgtggcaagaggcgaaaacatccccgccgtgatcgccctgaccgaccccgagggctgcccactgagccggtttaaggatagcctgggaaacccaacccacatcctgagaatcggcgagagctataaggagaagcagcggaccatccaggccaagaaggaggtggagcagcggagagccggcggctacagccggaagtacgccagcaaagccaagaatctggcagacgatatggtgagaaacaccgctagagatctgctgtactacgccgtgacccaggatgccatgctgatcttcgccaacctgagccggggcttcggccggcagggcaagcggaccttcatggccgagagacagtacacacggatggaggactggctgaccgccaagctggcctacgagggcctgagcaagacctacctgtccaagacactggcccagtacacctccaagacatgcagcaactgtgggtttaccatcaccagcgccgactacgacagggtgctggagaagctgaagaagacagcaacaggctggatgaccacaattaacggcaaggagctgaaggtggagggccagattacctactacaacagatacaagagacagaacgtagtcaaggacctgtccgtcgagctggatagactgagcgaagaatctgtgaacaacgacatctcctcctggacaaagggcagaagcggagaagctctgagcctcctgaagaaaagattctcccatagacccgtgcaggagaagttcgtgtgcctgaactgcggcttcgagacacacgcagccgagcaagccgccctgaacatcgccagatcctggctgttcctgcggagccaggagtacaagaaataccagacaaacaagacaaccggcaacaccgataagagagccttcgtcgagacctggcagtccttttaccggaagaagcttaaggaggtgtggaaacctgccgtgcggtctggcggatctggcggaggctccgtgcagggcagcgtgagcttcgaggacgtggccgtgggcttcagccaggaggagtggcagatcctgggccccagccagaaggccctgtactgggacgtgatgctggagaactactgcaacctggtgagcgtgggctaccaggcccccacccccaacagcctgttccagctggagcagggcggccccccctggaccgtggagggcgccgccctgagccccacctgcagcggcaagaagctgtacggcggcccaagcagcggcgcccctcctcccagcggcggcagcccagccggctccccaacctctaccgaggagggcacctctgagtccgccacccccgagagcggccctggcacctccaccgagcccagcgagggcagcgcacccggcagccctgccggcagccccacctccacagaggagggaaccagcaccgagcccagcgaaggcagcgccccaggcaccagcaccgagcctagtgagcaggagattaaacggatcaacaagatcagaagaagacttgtgaaagacagcaacaccaagaaggccggcaagacaggccccatgaaaaccctgctggttagagtgatgacacccgatctgagagagcggctggaaaacctgagaaagaagcctgaaaatatcccccagcccatcagcaatacatctagagccaacctgaataagctgctgaccgattacaccgaaatgaagaaggcgatcctgcatgtgtactgggaagagttccagaaggaccctgtgggcctgatgagccgggtggcccagcctgccagcaagaagatcgatcagaacaagctgaaacctgagatggacgagaagggcaacctgaccaccgccggctttgcctgctctcagtgtggccagcccctgttcgtgtacaagctggagcaggtgtctgagaagggcaaggcttacaccaactacttcggacggtgcaatgtggccgagcacgaaaagctgatcctgctggcccagctgaagcccgagaaggatagcgacgaagccgtgacatatagcctgggaaagtttgggcagagggccctggatttctacagcattcatgtgaccaaggagtccacccaccccgtgaagcccctggcccagatcgccggaaacagatacgcctccggacctgtgggaaaggccctgagcgacgcatgtatgggcacaatcgcctccttcctgtctaagtaccaggacatcatcatcgaacaccagaaggtggtgaagggcaaccagaagagactggagagcctgcgggagctggccggcaaggaaaacctggaataccctagcgtgaccctgccacctcagcctcacaccaaggagggcgttgatgcctacaacgaagtgatcgcccgggtgcgaatgtgggtgaacctgaacctgtggcagaagctgaagctaagcagagatgatgccaagcctctgctgagactgaagggattcccttcctttcctctggtcgagagacaggccaacgaagtggactggtgggacatggtgtgtaacgtgaagaagctgatcaacgagaaaaaggaggatggcaaggtgttttggcagaatctggctggctacaagagacaggaagccctgagaccatacctgagcagcgaggaagatcggaagaagggaaagaaattcgctcggtaccagctgggcgacctgctgctgcacctggaaaagaagcacggcgaggactggggaaaggtgtacgacgaggcctgggagcggattgacaagaaagtggaaggcctgagcaagcacatcaagctggaagaggaacggagaagcgaggacgcccagagcaaggccgccctgaccgactggctgcgggctaaggccagcttcgtgatcgagggcctgaaggaggccgacaaggacgagttctgcagatgcgagctgaagctgcagaagtggtacggggacctgcggggaaagcccttcgccatcgaagccgagaacagcatcctggacatcagcggcttcagcaagcagtacaactgtgccttcatctggcagaaggacggcgtgaagaagctgaacctgtacctgatcatcaactacttcaagggcggcaagctgcggttcaagaagatcaaacctgaagccttcgaagccaacagattctacaccgtgatcaacaaaaagagcggcgagatcgtgcccatggaggtgaacttcaacttcgacgaccccaacctgatcatcctgcctctggcctttggcaagagacagggcagagaattcatctggaacgacctgctgtccctggaaaccggcagcctgaagctggccaacggaagagtgatcgagaagacactgtacaacagaagaacccggcaggatgagcctgccctgttcgtggccctgaccttcgagcggcgggaggtcctggactcctccaatatcaaaccaatgaacctgatcggcgtggcaagaggcgaaaacatccccgccgtgatcgccctgaccgaccccgagggctgcccactgagccggtttaaggatagcctgggaaacccaacccacatcctgagaatcggcgagagctataaggagaagcagcggaccatccaggccaagaaggaggtggagcagcggagagccggcggctacagccggaagtacgccagcaaagccaagaatctggcagacgatatggtgagaaacaccgctagagatctgctgtactacgccgtgacccaggatgccatgctgatcttcgccaacctgagccggggcttcggccggcagggcaagcggaccttcatggccgagagacagtacacacggatggaggactggctgaccgccaagctggcctacgagggcctgagcaagacctacctgtccaagacactggcccagtacacctccaagacatgcagcaactgtgggtttaccatcaccagcgccgactacgacagggtgctggagaagctgaagaagacagcaacaggctggatgaccacaattaacggcaaggagctgaaggtggagggccagattacctactacaacagatacaagagacagaacgtagtcaaggacctgtccgtcgagctggatagactgagcgaagaatctgtgaacaacgacatctcctcctggacaaagggcagaagcggagaagctctgagcctcctgaagaaaagattctcccatagacccgtgcaggagaagttcgtgtgcctgaactgcggcttcgagacacacgcagccgagcaagccgccctgaacatcgccagatcctggctgttcctgcggagccaggagtacaagaaataccagacaaacaagacaaccggcaacaccgataagagagccttcgtcgagacctggcagtccttttaccggaagaagcttaaggaggtgtggaaacctgccgtgcggtctggcggatctggcggaggctcctgtgcagggcagcgtgagcttcgaggacgtggccgtgggcttcagccaggaggagtggcagatcctgggccccagccagaaggccctgtactgggacgtgatgctggagaactactgcaacctggtgagcgtgggctaccaggcccccacccccaacagcctgttccagctggagcagggcggccccccctggaccgtggagggcgccgccctgagccccacctgcagcggcaagaagctgtacggatctggctccggcagcggccccaagaaaaagagaaaagtctaagctgccttctgcggggcttgccttctggccatgcccttcttctctcccttgcacctgtacctcttggtctttgaataaagcctgagtaggaaggctagcaaaaaaaaaaaaaaaaaaaaaaaaaaaaaaaaaaaaaaaaaaaaaaaaaaaaaaaaaaaaaaaaaaaaaaaaaaaaaaaa

SEQ ID NO: 15685 - RNA, 9485 nt, synthetic construct
  source 1..9485: mol_type = other RNA
aggaaataagagagaaaagaagagtaagaagaaatataagagccaccatggcccctaagaagaagcgtaaagtgagccggatggaacgcctcgtctacgaggtgcggcagaagtgcagaaacatcgaggacatctgcatctcctgcggatctctgaacgtgaccctggagcacccactgttcatcggcggcatgtgccagaactgtaaaaactgttttctggagtgtgcctatcaatacgacgatgacggctaccagagctactgcaccatctgttgcggcggaagagaggtgctgatgtgtggaaataacaactgctgccggtgcttctgcgtggaatgcgtggacctgctggtgggccccggcgccgcccaggccgctattaaggaagatccttggaactgctacatgtgcggccacaagggcacatacggcctgctgagacggagagaggactggcctagcagactgcagatgttcttcgccaataaccacgaccaggagttcgacccccctaaggtgtaccctcccgtccccgccgagaagagaaagcccatccgggtcctgagcctgttcgatggcatcgccaccggtctgctggtgctgaaggacctgggcatccaggtggataggtacattgcctccgaggtgtgcgaggactccatcaccgtgggaatggtgcgtcatcagggcaagatcatgtacgtgggcgacgtgcggagcgtgacacagaagcatatccaggagtggggccctttcgacctggtgatcggcggcagcccttgcaatgacctgagcatcgtgaacccagcccggaagggcctgtacgagggaaccggcagactgttcttcgagttttacagactgctgcacgacgcccggcctaaggaaggcgacgaccggcccttcttttggctgttcgagaatgtggtggccatgggagtcagcgacaagcgggatattagccggttcctggagagcaaccccgtgatgatcgatgccaaggaagtgagcgccgcccaccgggccagatacttctggggcaatctgcctggcatgaacagacccctggccagcaccgtgaacgacaagctggagctgcaggagtgcctggagcacggccggatcgccaagttcagcaaggtgagaaccatcaccacccgaagcaacagcatcaaacaaggcaaggaccagcactttcctgtgttcatgaacgagaaggaggacatcctgtggtgtaccgagatggagagagtgttcgggttcccagtccactacacagatgtcagcaacatgtctagactggccagacagagactgctgggaagaagctggtccgtccctgtgatcagacacctgttcgcccctctgaaggagtacttcgcctgcgtgagcagcggcaacagcaacgccaacagccggggccccagcttctctagcggcctggtgccactgtccctgagagggagccacatgggccccatggagatctacaaaaccgtgagcgcctggaagcggcagcctgtgcgcgtgctgagcctgtttcggaatatcgataaagtcctgaaaagcctgggattcctggagagcggctctggctccggcggtggcaccctgaagtacgtggaggatgtgacaaacgtggtcagacgggatgtggagaagtggggccccttcgatctggtgtacggcagcacccaacccctgggcagctcttgtgaccggtgccctggctggtacatgtttcagttccaccggatcctgcagtacgccctgccgagacaggagtcccagcggccattcttttggattttcatggacaacttgctgctgaccgaggatgaccaggaaactaccactcggttcctgcagaccgaagccgtgaccctgcaggacgtgagaggccgggactaccagaacgccatgcgggtgtggtccaacatccctggactgaaaagcaagcacgcacctctgacccctaaagaagaggagtacctgcaggcccaggtgcggagcagaagcaagctggacgcccctaaggtggatctgctggtgaagaattgcctcctgcccctgagagagtacttcaagtatttcagccagaatagtctgcccctgggaggcagcggcggcggcgccctggtgacatttgaggacgtcgccgtgcggttcacccaggaggaatgggctctgctggatccttctcagaaaatcctgtaccgggacgtgatgagagagacataccggaatctgacctccgtgggcatcaactgggaatgttgggaccttgaagcctgcttcagaagcctgggaagaaacctgagagtgcaggtggtgaagagaaagtgcgagctgaccaacagcggcccctgcgccgagggcggcccaagcagcggcgcccctcctcccagcggcggcagcccagccggctccccaacctctaccgaggagggcacctctgagtccgccacccccgagagcggccctggcacctccaccgagcccagcgagggcagcgcacccggcagccctgccggcagccccacctccacagaggagggaaccagcaccgagcccagcgaaggcagcgccccaggcaccagcaccgagcctagtgagcaggagattaaacggatcaacaagatcagaagaagacttgtgaaagacagcaacaccaagaaggccggcaagacaggccccatgaaaaccctgctggttagagtgatgacacccgatctgagagagcggctggaaaacctgagaaagaagcctgaaaatatcccccagcccatcagcaatacatctagagccaacctgaataagctgctgaccgattacaccgaaatgaagaaggcgatcctgcatgtgtactgggaagagttccagaaggaccctgtgggcctgatgagccgggtggcccagcctgccagcaagaagatcgatcagaacaagctgaaacctgagatggacgagaagggcaacctgaccaccgccggctttgcctgctctcagtgtggccagcccctgttcgtgtacaagctggagcaggtgtctgagaagggcaaggcttacaccaactacttcggacggtgcaatgtggccgagcacgaaaagctgatcctgctggcccagctgaagcccgagaaggatagcgacgaagccgtgacatatagcctgggaaagtttgggcagagggccctggatttctacagcattcatgtgaccaaggagtccacccaccccgtgaagcccctggcccagatcgccggaaacagatacgcctccggacctgtgggaaaggccctgagcgacgcatgtatgggcacaatcgcctccttcctgtctaagtaccaggacatcatcatcgaacaccagaaggtggtgaagggcaaccagaagagactggagagcctgcgggagctggccggcaaggaaaacctggaataccctagcgtgaccctgccacctcagcctcacaccaaggagggcgttgatgcctacaacgaagtgatcgcccgggtgcgaatgtgggtgaacctgaacctgtggcagaagctgaagctaagcagagatgatgccaagcctctgctgagactgaagggattcccttcctttcctctggtcgagagacaggccaacgaagtggactggtgggacatggtgtgtaacgtgaagaagctgatcaacgagaaaaaggaggatggcaaggtgttttggcagaatctggctggctacaagagacaggaagccctgagaccatacctgagcagcgaggaagatcggaagaagggaaagaaattcgctcggtaccagctgggcgacctgctgctgcacctggaaaagaagcacggcgaggactggggaaaggtgtacgacgaggcctgggagcggattgacaagaaagtggaaggcctgagcaagcacatcaagctggaagaggaacggagaagcgaggacgcccagagcaaggccgccctgaccgactggctgcgggctaaggccagcttcgtgatcgagggcctgaaggaggccgacaaggacgagttctgcagatgcgagctgaagctgcagaagtggtacggggacctgcggggaaagcccttcgccatcgaagccgagaacagcatcctggacatcagcggcttcagcaagcagtacaactgtgccttcatctggcagaaggacggcgtgaagaagctgaacctgtacctgatcatcaactacttcaagggcggcaagctgcggttcaagaagatcaaacctgaagccttcgaagccaacagattctacaccgtgatcaacaaaaagagcggcgagatcgtgcccatggaggtgaacttcaacttcgacgaccccaacctgatcatcctgcctctggcctttggcaagagacagggcagagaattcatctggaacgacctgctgtccctggaaaccggcagcctgaagctggccaacggaagagtgatcgagaagacactgtacaacagaagaacccggcaggatgagcctgccctgttcgtggccctgaccttcgagcggcgggaggtcctggactcctccaatatcaaaccaatgaacctgatcggcgtggcaagaggcgaaaacatccccgccgtgatcgccctgaccgaccccgagggctgcccactgagccggtttaaggatagcctgggaaacccaacccacatcctgagaatcggcgagagctataaggagaagcagcggaccatccaggccaagaaggaggtggagcagcggagagccggcggctacagccggaagtacgccagcaaagccaagaatctggcagacgatatggtgagaaacaccgctagagatctgctgtactacgccgtgacccaggatgccatgctgatcttcgccaacctgagccggggcttcggccggcagggcaagcggaccttcatggccgagagacagtacacacggatggaggactggctgaccgccaagctggcctacgagggcctgagcaagacctacctgtccaagacactggcccagtacacctccaagacatgcagcaactgtgggtttaccatcaccagcgccgactacgacagggtgctggagaagctgaagaagacagcaacaggctggatgaccacaattaacggcaaggagctgaaggtggagggccagattacctactacaacagatacaagagacagaacgtagtcaaggacctgtccgtcgagctggatagactgagcgaagaatctgtgaacaacgacatctcctcctggacaaagggcagaagcggagaagctctgagcctcctgaagaaaagattctcccatagacccgtgcaggagaagttcgtgtgcctgaactgcggcttcgagacacacgcagccgagcaagccgccctgaacatcgccagatcctggctgttcctgcggagccaggagtacaagaaataccagacaaacaagacaaccggcaacaccgataagagagccttcgtcgagacctggcagtccttttaccggaagaagcttaaggaggtgtggaaacctgccgtgcggtctggcggatctggcggaggctccctggtgcccgtgaccttcgaggacgtggccgtgtacttcagcagggaggagtggggcctgctggacgacatgcagaggaccttctacagggacgtgatgaaggagaactaccagaccgtggtgagcctgcccggcagcagcatccccaagcccgacgtgatcagccagatggagaggggcgaggagccctgggtgcccgacctgcagaagctgggcccccaccagacccccgagaaccccctgggcggcccaagcagcggcgcccctcctcccagcggcggcagcccagccggctccccaacctctaccgaggagggcacctctgagtccgccacccccgagagcggccctggcacctccaccgagcccagcgagggcagcgcacccggcagccctgccggcagccccacctccacagaggagggaaccagcaccgagcccagcgaaggcagcgccccaggcaccagcaccgagcctagtgagcaggagattaaacggatcaacaagatcagaagaagacttgtgaaagacagcaacaccaagaaggccggcaagacaggccccatgaaaaccctgctggttagagtgatgacacccgatctgagagagcggctggaaaacctgagaaagaagcctgaaaatatcccccagcccatcagcaatacatctagagccaacctgaataagctgctgaccgattacaccgaaatgaagaaggcgatcctgcatgtgtactgggaagagttccagaaggaccctgtgggcctgatgagccgggtggcccagcctgccagcaagaagatcgatcagaacaagctgaaacctgagatggacgagaagggcaacctgaccaccgccggctttgcctgctctcagtgtggccagcccctgttcgtgtacaagctggagcaggtgtctgagaagggcaaggcttacaccaactacttcggacggtgcaatgtggccgagcacgaaaagctgatcctgctggcccagctgaagcccgagaaggatagcgacgaagccgtgacatatagcctgggaaagtttgggcagagggccctggatttctacagcattcatgtgaccaaggagtccacccaccccgtgaagcccctggcccagatcgccggaaacagatacgcctccggacctgtgggaaaggccctgagcgacgcatgtatgggcacaatcgcctccttcctgtctaagtaccaggacatcatcatcgaacaccagaaggtggtgaagggcaaccagaagagactggagagcctgcgggagctggccggcaaggaaaacctggaataccctagcgtgaccctgccacctcagcctcacaccaaggagggcgttgatgcctacaacgaagtgatcgcccgggtgcgaatgtgggtgaacctgaacctgtggcagaagctgaagctaagcagagatgatgccaagcctctgctgagactgaagggattcccttcctttcctctggtcgagagacaggccaacgaagtggactggtgggacatggtgtgtaacgtgaagaagctgatcaacgagaaaaaggaggatggcaaggtgttttggcagaatctggctggctacaagagacaggaagccctgagaccatacctgagcagcgaggaagatcggaagaagggaaagaaattcgctcggtaccagctgggcgacctgctgctgcacctggaaaagaagcacggcgaggactggggaaaggtgtacgacgaggcctgggagcggattgacaagaaagtggaaggcctgagcaagcacatcaagctggaagaggaacggagaagcgaggacgcccagagcaaggccgccctgaccgactggctgcgggctaaggccagcttcgtgatcgagggcctgaaggaggccgacaaggacgagttctgcagatgcgagctgaagctgcagaagtggtacggggacctgcggggaaagcccttcgccatcgaagccgagaacagcatcctggacatcagcggcttcagcaagcagtacaactgtgccttcatctggcagaaggacggcgtgaagaagctgaacctgtacctgatcatcaactacttcaagggcggcaagctgcggttcaagaagatcaaacctgaagccttcgaagccaacagattctacaccgtgatcaacaaaaagagcggcgagatcgtgcccatggaggtgaacttcaacttcgacgaccccaacctgatcatcctgcctctggcctttggcaagagacagggcagagaattcatctggaacgacctgctgtccctggaaaccggcagcctgaagctggccaacggaagagtgatcgagaagacactgtacaacagaagaacccggcaggatgagcctgccctgttcgtggccctgaccttcgagcggcgggaggtcctggactcctccaatatcaaaccaatgaacctgatcggcgtggcaagaggcgaaaacatccccgccgtgatcgccctgaccgaccccgagggctgcccactgagccggtttaaggatagcctgggaaacccaacccacatcctgagaatcggcgagagctataaggagaagcagcggaccatccaggccaagaaggaggtggagcagcggagagccggcggctacagccggaagtacgccagcaaagccaagaatctggcagacgatatggtgagaaacaccgctagagatctgctgtactacgccgtgacccaggatgccatgctgatcttcgccaacctgagccggggcttcggccggcagggcaagcggaccttcatggccgagagacagtacacacggatggaggactggctgaccgccaagctggcctacgagggcctgagcaagacctacctgtccaagacactggcccagtacacctccaagacatgcagcaactgtgggtttaccatcaccagcgccgactacgacagggtgctggagaagctgaagaagacagcaacaggctggatgaccacaattaacggcaaggagctgaaggtggagggccagattacctactacaacagatacaagagacagaacgtagtcaaggacctgtccgtcgagctggatagactgagcgaagaatctgtgaacaacgacatctcctcctggacaaagggcagaagcggagaagctctgagcctcctgaagaaaagattctcccatagacccgtgcaggagaagttcgtgtgcctgaactgcggcttcgagacacacgcagccgagcaagccgccctgaacatcgccagatcctggctgttcctgcggagccaggagtacaagaaataccagacaaacaagacaaccggcaacaccgataagagagccttcgtcgagacctggcagtccttttaccggaagaagcttaaggaggtgtggaaacctgccgtgcggtctggcggatctggcggaggctcctctggtgcccgtgaccttcgaggacgtggccgtgtacttcagcagggaggagtggggcctgctggacgacatgcagaggaccttctacagggacgtgatgaaggagaactaccagaccgtggtgagcctgcccggcagcagcatccccaagcccgacgtgatcagccagatggagaggggcgaggagccctgggtgcccgacctgcagaagctgggcccccaccagacccccgagaaccccctgggatctggctccggcagcggccccaagaaaaagagaaaagtctaagctgccttctgcggggcttgccttctggccatgcccttcttctctcccttgcacctgtacctcttggtctttgaataaagcctgagtaggaaggctagcaaaaaaaaaaaaaaaaaaaaaaaaaaaaaaaaaaaaaaaaaaaaaaaaaaaaaaaaaaaaaaaaaaaaaaaaaaaaaaaa

SEQ ID NO: 15686 - RNA, 9485 nt, synthetic construct
  source 1..9485: mol_type = other RNA
aggaaataagagagaaaagaagagtaagaagaaatataagagccaccatggcccctaagaagaagcgtaaagtgagccggatggaacgcctcgtctacgaggtgcggcagaagtgcagaaacatcgaggacatctgcatctcctgcggatctctgaacgtgaccctggagcacccactgttcatcggcggcatgtgccagaactgtaaaaactgttttctggagtgtgcctatcaatacgacgatgacggctaccagagctactgcaccatctgttgcggcggaagagaggtgctgatgtgtggaaataacaactgctgccggtgcttctgcgtggaatgcgtggacctgctggtgggccccggcgccgcccaggccgctattaaggaagatccttggaactgctacatgtgcggccacaagggcacatacggcctgctgagacggagagaggactggcctagcagactgcagatgttcttcgccaataaccacgaccaggagttcgacccccctaaggtgtaccctcccgtccccgccgagaagagaaagcccatccgggtcctgagcctgttcgatggcatcgccaccggtctgctggtgctgaaggacctgggcatccaggtggataggtacattgcctccgaggtgtgcgaggactccatcaccgtgggaatggtgcgtcatcagggcaagatcatgtacgtgggcgacgtgcggagcgtgacacagaagcatatccaggagtggggccctttcgacctggtgatcggcggcagcccttgcaatgacctgagcatcgtgaacccagcccggaagggcctgtacgagggaaccggcagactgttcttcgagttttacagactgctgcacgacgcccggcctaaggaaggcgacgaccggcccttcttttggctgttcgagaatgtggtggccatgggagtcagcgacaagcgggatattagccggttcctggagagcaaccccgtgatgatcgatgccaaggaagtgagcgccgcccaccgggccagatacttctggggcaatctgcctggcatgaacagacccctggccagcaccgtgaacgacaagctggagctgcaggagtgcctggagcacggccggatcgccaagttcagcaaggtgagaaccatcaccacccgaagcaacagcatcaaacaaggcaaggaccagcactttcctgtgttcatgaacgagaaggaggacatcctgtggtgtaccgagatggagagagtgttcgggttcccagtccactacacagatgtcagcaacatgtctagactggccagacagagactgctgggaagaagctggtccgtccctgtgatcagacacctgttcgcccctctgaaggagtacttcgcctgcgtgagcagcggcaacagcaacgccaacagccggggccccagcttctctagcggcctggtgccactgtccctgagagggagccacatgggccccatggagatctacaaaaccgtgagcgcctggaagcggcagcctgtgcgcgtgctgagcctgtttcggaatatcgataaagtcctgaaaagcctgggattcctggagagcggctctggctccggcggtggcaccctgaagtacgtggaggatgtgacaaacgtggtcagacgggatgtggagaagtggggccccttcgatctggtgtacggcagcacccaacccctgggcagctcttgtgaccggtgccctggctggtacatgtttcagttccaccggatcctgcagtacgccctgccgagacaggagtcccagcggccattcttttggattttcatggacaacttgctgctgaccgaggatgaccaggaaactaccactcggttcctgcagaccgaagccgtgaccctgcaggacgtgagaggccgggactaccagaacgccatgcgggtgtggtccaacatccctggactgaaaagcaagcacgcacctctgacccctaaagaagaggagtacctgcaggcccaggtgcggagcagaagcaagctggacgcccctaaggtggatctgctggtgaagaattgcctcctgcccctgagagagtacttcaagtatttcagccagaatagtctgcccctgggaggcagcggcggcggcgccctggtgacatttgaggacgtcgccgtgcggttcacccaggaggaatgggctctgctggatccttctcagaaaatcctgtaccgggacgtgatgagagagacataccggaatctgacctccgtgggcatcaactgggaatgttgggaccttgaagcctgcttcagaagcctgggaagaaacctgagagtgcaggtggtgaagagaaagtgcgagctgaccaacagcggcccctgcgccgagggcggcccaagcagcggcgcccctcctcccagcggcggcagcccagccggctccccaacctctaccgaggagggcacctctgagtccgccacccccgagagcggccctggcacctccaccgagcccagcgagggcagcgcacccggcagccctgccggcagccccacctccacagaggagggaaccagcaccgagcccagcgaaggcagcgccccaggcaccagcaccgagcctagtgagcaggagattaaacggatcaacaagatcagaagaagacttgtgaaagacagcaacaccaagaaggccggcaagacaggccccatgaaaaccctgctggttagagtgatgacacccgatctgagagagcggctggaaaacctgagaaagaagcctgaaaatatcccccagcccatcagcaatacatctagagccaacctgaataagctgctgaccgattacaccgaaatgaagaaggcgatcctgcatgtgtactgggaagagttccagaaggaccctgtgggcctgatgagccgggtggcccagcctgccagcaagaagatcgatcagaacaagctgaaacctgagatggacgagaagggcaacctgaccaccgccggctttgcctgctctcagtgtggccagcccctgttcgtgtacaagctggagcaggtgtctgagaagggcaaggcttacaccaactacttcggacggtgcaatgtggccgagcacgaaaagctgatcctgctggcccagctgaagcccgagaaggatagcgacgaagccgtgacatatagcctgggaaagtttgggcagagggccctggatttctacagcattcatgtgaccaaggagtccacccaccccgtgaagcccctggcccagatcgccggaaacagatacgcctccggacctgtgggaaaggccctgagcgacgcatgtatgggcacaatcgcctccttcctgtctaagtaccaggacatcatcatcgaacaccagaaggtggtgaagggcaaccagaagagactggagagcctgcgggagctggccggcaaggaaaacctggaataccctagcgtgaccctgccacctcagcctcacaccaaggagggcgttgatgcctacaacgaagtgatcgcccgggtgcgaatgtgggtgaacctgaacctgtggcagaagctgaagctaagcagagatgatgccaagcctctgctgagactgaagggattcccttcctttcctctggtcgagagacaggccaacgaagtggactggtgggacatggtgtgtaacgtgaagaagctgatcaacgagaaaaaggaggatggcaaggtgttttggcagaatctggctggctacaagagacaggaagccctgagaccatacctgagcagcgaggaagatcggaagaagggaaagaaattcgctcggtaccagctgggcgacctgctgctgcacctggaaaagaagcacggcgaggactggggaaaggtgtacgacgaggcctgggagcggattgacaagaaagtggaaggcctgagcaagcacatcaagctggaagaggaacggagaagcgaggacgcccagagcaaggccgccctgaccgactggctgcgggctaaggccagcttcgtgatcgagggcctgaaggaggccgacaaggacgagttctgcagatgcgagctgaagctgcagaagtggtacggggacctgcggggaaagcccttcgccatcgaagccgagaacagcatcctggacatcagcggcttcagcaagcagtacaactgtgccttcatctggcagaaggacggcgtgaagaagctgaacctgtacctgatcatcaactacttcaagggcggcaagctgcggttcaagaagatcaaacctgaagccttcgaagccaacagattctacaccgtgatcaacaaaaagagcggcgagatcgtgcccatggaggtgaacttcaacttcgacgaccccaacctgatcatcctgcctctggcctttggcaagagacagggcagagaattcatctggaacgacctgctgtccctggaaaccggcagcctgaagctggccaacggaagagtgatcgagaagacactgtacaacagaagaacccggcaggatgagcctgccctgttcgtggccctgaccttcgagcggcgggaggtcctggactcctccaatatcaaaccaatgaacctgatcggcgtggcaagaggcgaaaacatccccgccgtgatcgccctgaccgaccccgagggctgcccactgagccggtttaaggatagcctgggaaacccaacccacatcctgagaatcggcgagagctataaggagaagcagcggaccatccaggccaagaaggaggtggagcagcggagagccggcggctacagccggaagtacgccagcaaagccaagaatctggcagacgatatggtgagaaacaccgctagagatctgctgtactacgccgtgacccaggatgccatgctgatcttcgccaacctgagccggggcttcggccggcagggcaagcggaccttcatggccgagagacagtacacacggatggaggactggctgaccgccaagctggcctacgagggcctgagcaagacctacctgtccaagacactggcccagtacacctccaagacatgcagcaactgtgggtttaccatcaccagcgccgactacgacagggtgctggagaagctgaagaagacagcaacaggctggatgaccacaattaacggcaaggagctgaaggtggagggccagattacctactacaacagatacaagagacagaacgtagtcaaggacctgtccgtcgagctggatagactgagcgaagaatctgtgaacaacgacatctcctcctggacaaagggcagaagcggagaagctctgagcctcctgaagaaaagattctcccatagacccgtgcaggagaagttcgtgtgcctgaactgcggcttcgagacacacgcagccgagcaagccgccctgaacatcgccagatcctggctgttcctgcggagccaggagtacaagaaataccagacaaacaagacaaccggcaacaccgataagagagccttcgtcgagacctggcagtccttttaccggaagaagcttaaggaggtgtggaaacctgccgtgcggtctggcggatctggcggaggctccatggtgaccttcgaggacgtggccgtgcacttcaccaagaccgagtggaccggcctgagccccgcccagagggccctgtacaggagcgtgatgctggagaacttcggcaacctgaccgccctgggctaccccgtgcccaagcccgccctgatcagcctgctggagggcggcgacatggcctggggcctggaggcccaggacgaccccctggccgagaccaccaagaacgtgtgcaaggacgtgggcggcccaagcagcggcgcccctcctcccagcggcggcagcccagccggctccccaacctctaccgaggagggcacctctgagtccgccacccccgagagcggccctggcacctccaccgagcccagcgagggcagcgcacccggcagccctgccggcagccccacctccacagaggagggaaccagcaccgagcccagcgaaggcagcgccccaggcaccagcaccgagcctagtgagcaggagattaaacggatcaacaagatcagaagaagacttgtgaaagacagcaacaccaagaaggccggcaagacaggccccatgaaaaccctgctggttagagtgatgacacccgatctgagagagcggctggaaaacctgagaaagaagcctgaaaatatcccccagcccatcagcaatacatctagagccaacctgaataagctgctgaccgattacaccgaaatgaagaaggcgatcctgcatgtgtactgggaagagttccagaaggaccctgtgggcctgatgagccgggtggcccagcctgccagcaagaagatcgatcagaacaagctgaaacctgagatggacgagaagggcaacctgaccaccgccggctttgcctgctctcagtgtggccagcccctgttcgtgtacaagctggagcaggtgtctgagaagggcaaggcttacaccaactacttcggacggtgcaatgtggccgagcacgaaaagctgatcctgctggcccagctgaagcccgagaaggatagcgacgaagccgtgacatatagcctgggaaagtttgggcagagggccctggatttctacagcattcatgtgaccaaggagtccacccaccccgtgaagcccctggcccagatcgccggaaacagatacgcctccggacctgtgggaaaggccctgagcgacgcatgtatgggcacaatcgcctccttcctgtctaagtaccaggacatcatcatcgaacaccagaaggtggtgaagggcaaccagaagagactggagagcctgcgggagctggccggcaaggaaaacctggaataccctagcgtgaccctgccacctcagcctcacaccaaggagggcgttgatgcctacaacgaagtgatcgcccgggtgcgaatgtgggtgaacctgaacctgtggcagaagctgaagctaagcagagatgatgccaagcctctgctgagactgaagggattcccttcctttcctctggtcgagagacaggccaacgaagtggactggtgggacatggtgtgtaacgtgaagaagctgatcaacgagaaaaaggaggatggcaaggtgttttggcagaatctggctggctacaagagacaggaagccctgagaccatacctgagcagcgaggaagatcggaagaagggaaagaaattcgctcggtaccagctgggcgacctgctgctgcacctggaaaagaagcacggcgaggactggggaaaggtgtacgacgaggcctgggagcggattgacaagaaagtggaaggcctgagcaagcacatcaagctggaagaggaacggagaagcgaggacgcccagagcaaggccgccctgaccgactggctgcgggctaaggccagcttcgtgatcgagggcctgaaggaggccgacaaggacgagttctgcagatgcgagctgaagctgcagaagtggtacggggacctgcggggaaagcccttcgccatcgaagccgagaacagcatcctggacatcagcggcttcagcaagcagtacaactgtgccttcatctggcagaaggacggcgtgaagaagctgaacctgtacctgatcatcaactacttcaagggcggcaagctgcggttcaagaagatcaaacctgaagccttcgaagccaacagattctacaccgtgatcaacaaaaagagcggcgagatcgtgcccatggaggtgaacttcaacttcgacgaccccaacctgatcatcctgcctctggcctttggcaagagacagggcagagaattcatctggaacgacctgctgtccctggaaaccggcagcctgaagctggccaacggaagagtgatcgagaagacactgtacaacagaagaacccggcaggatgagcctgccctgttcgtggccctgaccttcgagcggcgggaggtcctggactcctccaatatcaaaccaatgaacctgatcggcgtggcaagaggcgaaaacatccccgccgtgatcgccctgaccgaccccgagggctgcccactgagccggtttaaggatagcctgggaaacccaacccacatcctgagaatcggcgagagctataaggagaagcagcggaccatccaggccaagaaggaggtggagcagcggagagccggcggctacagccggaagtacgccagcaaagccaagaatctggcagacgatatggtgagaaacaccgctagagatctgctgtactacgccgtgacccaggatgccatgctgatcttcgccaacctgagccggggcttcggccggcagggcaagcggaccttcatggccgagagacagtacacacggatggaggactggctgaccgccaagctggcctacgagggcctgagcaagacctacctgtccaagacactggcccagtacacctccaagacatgcagcaactgtgggtttaccatcaccagcgccgactacgacagggtgctggagaagctgaagaagacagcaacaggctggatgaccacaattaacggcaaggagctgaaggtggagggccagattacctactacaacagatacaagagacagaacgtagtcaaggacctgtccgtcgagctggatagactgagcgaagaatctgtgaacaacgacatctcctcctggacaaagggcagaagcggagaagctctgagcctcctgaagaaaagattctcccatagacccgtgcaggagaagttcgtgtgcctgaactgcggcttcgagacacacgcagccgagcaagccgccctgaacatcgccagatcctggctgttcctgcggagccaggagtacaagaaataccagacaaacaagacaaccggcaacaccgataagagagccttcgtcgagacctggcagtccttttaccggaagaagcttaaggaggtgtggaaacctgccgtgcggtctggcggatctggcggaggctcctatggtgaccttcgaggacgtggccgtgcacttcaccaagaccgagtggaccggcctgagccccgcccagagggccctgtacaggagcgtgatgctggagaacttcggcaacctgaccgccctgggctaccccgtgcccaagcccgccctgatcagcctgctggagggcggcgacatggcctggggcctggaggcccaggacgaccccctggccgagaccaccaagaacgtgtgcaaggacgtgggatctggctccggcagcggccccaagaaaaagagaaaagtctaagctgccttctgcggggcttgccttctggccatgcccttcttctctcccttgcacctgtacctcttggtctttgaataaagcctgagtaggaaggctagcaaaaaaaaaaaaaaaaaaaaaaaaaaaaaaaaaaaaaaaaaaaaaaaaaaaaaaaaaaaaaaaaaaaaaaaaaaaaaaaa

SEQ ID NO: 15687 - RNA, 9485 nt, synthetic construct
  source 1..9485: mol_type = other RNA
aggaaataagagagaaaagaagagtaagaagaaatataagagccaccatggcccctaagaagaagcgtaaagtgagccggatggaacgcctcgtctacgaggtgcggcagaagtgcagaaacatcgaggacatctgcatctcctgcggatctctgaacgtgaccctggagcacccactgttcatcggcggcatgtgccagaactgtaaaaactgttttctggagtgtgcctatcaatacgacgatgacggctaccagagctactgcaccatctgttgcggcggaagagaggtgctgatgtgtggaaataacaactgctgccggtgcttctgcgtggaatgcgtggacctgctggtgggccccggcgccgcccaggccgctattaaggaagatccttggaactgctacatgtgcggccacaagggcacatacggcctgctgagacggagagaggactggcctagcagactgcagatgttcttcgccaataaccacgaccaggagttcgacccccctaaggtgtaccctcccgtccccgccgagaagagaaagcccatccgggtcctgagcctgttcgatggcatcgccaccggtctgctggtgctgaaggacctgggcatccaggtggataggtacattgcctccgaggtgtgcgaggactccatcaccgtgggaatggtgcgtcatcagggcaagatcatgtacgtgggcgacgtgcggagcgtgacacagaagcatatccaggagtggggccctttcgacctggtgatcggcggcagcccttgcaatgacctgagcatcgtgaacccagcccggaagggcctgtacgagggaaccggcagactgttcttcgagttttacagactgctgcacgacgcccggcctaaggaaggcgacgaccggcccttcttttggctgttcgagaatgtggtggccatgggagtcagcgacaagcgggatattagccggttcctggagagcaaccccgtgatgatcgatgccaaggaagtgagcgccgcccaccgggccagatacttctggggcaatctgcctggcatgaacagacccctggccagcaccgtgaacgacaagctggagctgcaggagtgcctggagcacggccggatcgccaagttcagcaaggtgagaaccatcaccacccgaagcaacagcatcaaacaaggcaaggaccagcactttcctgtgttcatgaacgagaaggaggacatcctgtggtgtaccgagatggagagagtgttcgggttcccagtccactacacagatgtcagcaacatgtctagactggccagacagagactgctgggaagaagctggtccgtccctgtgatcagacacctgttcgcccctctgaaggagtacttcgcctgcgtgagcagcggcaacagcaacgccaacagccggggccccagcttctctagcggcctggtgccactgtccctgagagggagccacatgggccccatggagatctacaaaaccgtgagcgcctggaagcggcagcctgtgcgcgtgctgagcctgtttcggaatatcgataaagtcctgaaaagcctgggattcctggagagcggctctggctccggcggtggcaccctgaagtacgtggaggatgtgacaaacgtggtcagacgggatgtggagaagtggggccccttcgatctggtgtacggcagcacccaacccctgggcagctcttgtgaccggtgccctggctggtacatgtttcagttccaccggatcctgcagtacgccctgccgagacaggagtcccagcggccattcttttggattttcatggacaacttgctgctgaccgaggatgaccaggaaactaccactcggttcctgcagaccgaagccgtgaccctgcaggacgtgagaggccgggactaccagaacgccatgcgggtgtggtccaacatccctggactgaaaagcaagcacgcacctctgacccctaaagaagaggagtacctgcaggcccaggtgcggagcagaagcaagctggacgcccctaaggtggatctgctggtgaagaattgcctcctgcccctgagagagtacttcaagtatttcagccagaatagtctgcccctgggaggcagcggcggcggcgccctggtgacatttgaggacgtcgccgtgcggttcacccaggaggaatgggctctgctggatccttctcagaaaatcctgtaccgggacgtgatgagagagacataccggaatctgacctccgtgggcatcaactgggaatgttgggaccttgaagcctgcttcagaagcctgggaagaaacctgagagtgcaggtggtgaagagaaagtgcgagctgaccaacagcggcccctgcgccgagggcggcccaagcagcggcgcccctcctcccagcggcggcagcccagccggctccccaacctctaccgaggagggcacctctgagtccgccacccccgagagcggccctggcacctccaccgagcccagcgagggcagcgcacccggcagccctgccggcagccccacctccacagaggagggaaccagcaccgagcccagcgaaggcagcgccccaggcaccagcaccgagcctagtgagcaggagattaaacggatcaacaagatcagaagaagacttgtgaaagacagcaacaccaagaaggccggcaagacaggccccatgaaaaccctgctggttagagtgatgacacccgatctgagagagcggctggaaaacctgagaaagaagcctgaaaatatcccccagcccatcagcaatacatctagagccaacctgaataagctgctgaccgattacaccgaaatgaagaaggcgatcctgcatgtgtactgggaagagttccagaaggaccctgtgggcctgatgagccgggtggcccagcctgccagcaagaagatcgatcagaacaagctgaaacctgagatggacgagaagggcaacctgaccaccgccggctttgcctgctctcagtgtggccagcccctgttcgtgtacaagctggagcaggtgtctgagaagggcaaggcttacaccaactacttcggacggtgcaatgtggccgagcacgaaaagctgatcctgctggcccagctgaagcccgagaaggatagcgacgaagccgtgacatatagcctgggaaagtttgggcagagggccctggatttctacagcattcatgtgaccaaggagtccacccaccccgtgaagcccctggcccagatcgccggaaacagatacgcctccggacctgtgggaaaggccctgagcgacgcatgtatgggcacaatcgcctccttcctgtctaagtaccaggacatcatcatcgaacaccagaaggtggtgaagggcaaccagaagagactggagagcctgcgggagctggccggcaaggaaaacctggaataccctagcgtgaccctgccacctcagcctcacaccaaggagggcgttgatgcctacaacgaagtgatcgcccgggtgcgaatgtgggtgaacctgaacctgtggcagaagctgaagctaagcagagatgatgccaagcctctgctgagactgaagggattcccttcctttcctctggtcgagagacaggccaacgaagtggactggtgggacatggtgtgtaacgtgaagaagctgatcaacgagaaaaaggaggatggcaaggtgttttggcagaatctggctggctacaagagacaggaagccctgagaccatacctgagcagcgaggaagatcggaagaagggaaagaaattcgctcggtaccagctgggcgacctgctgctgcacctggaaaagaagcacggcgaggactggggaaaggtgtacgacgaggcctgggagcggattgacaagaaagtggaaggcctgagcaagcacatcaagctggaagaggaacggagaagcgaggacgcccagagcaaggccgccctgaccgactggctgcgggctaaggccagcttcgtgatcgagggcctgaaggaggccgacaaggacgagttctgcagatgcgagctgaagctgcagaagtggtacggggacctgcggggaaagcccttcgccatcgaagccgagaacagcatcctggacatcagcggcttcagcaagcagtacaactgtgccttcatctggcagaaggacggcgtgaagaagctgaacctgtacctgatcatcaactacttcaagggcggcaagctgcggttcaagaagatcaaacctgaagccttcgaagccaacagattctacaccgtgatcaacaaaaagagcggcgagatcgtgcccatggaggtgaacttcaacttcgacgaccccaacctgatcatcctgcctctggcctttggcaagagacagggcagagaattcatctggaacgacctgctgtccctggaaaccggcagcctgaagctggccaacggaagagtgatcgagaagacactgtacaacagaagaacccggcaggatgagcctgccctgttcgtggccctgaccttcgagcggcgggaggtcctggactcctccaatatcaaaccaatgaacctgatcggcgtggcaagaggcgaaaacatccccgccgtgatcgccctgaccgaccccgagggctgcccactgagccggtttaaggatagcctgggaaacccaacccacatcctgagaatcggcgagagctataaggagaagcagcggaccatccaggccaagaaggaggtggagcagcggagagccggcggctacagccggaagtacgccagcaaagccaagaatctggcagacgatatggtgagaaacaccgctagagatctgctgtactacgccgtgacccaggatgccatgctgatcttcgccaacctgagccggggcttcggccggcagggcaagcggaccttcatggccgagagacagtacacacggatggaggactggctgaccgccaagctggcctacgagggcctgagcaagacctacctgtccaagacactggcccagtacacctccaagacatgcagcaactgtgggtttaccatcaccagcgccgactacgacagggtgctggagaagctgaagaagacagcaacaggctggatgaccacaattaacggcaaggagctgaaggtggagggccagattacctactacaacagatacaagagacagaacgtagtcaaggacctgtccgtcgagctggatagactgagcgaagaatctgtgaacaacgacatctcctcctggacaaagggcagaagcggagaagctctgagcctcctgaagaaaagattctcccatagacccgtgcaggagaagttcgtgtgcctgaactgcggcttcgagacacacgcagccgagcaagccgccctgaacatcgccagatcctggctgttcctgcggagccaggagtacaagaaataccagacaaacaagacaaccggcaacaccgataagagagccttcgtcgagacctggcagtccttttaccggaagaagcttaaggaggtgtggaaacctgccgtgcggtctggcggatctggcggaggctccaacagccagggcctgctgaccttcagggacgtggccatcgagttcagccaggaggagctgaggtgcctgaaccacagccagtgggagctgtacagggacgtgatgttcgagaactacggccacctgctgttcctgggcctggtggtgagcaagcccgacctggtgatcttcctggagcagaagaaggacgtgtgggccgtgaagaggaaggagaccgtggccacccaccccggcaggtgggagggcggcccaagcagcggcgcccctcctcccagcggcggcagcccagccggctccccaacctctaccgaggagggcacctctgagtccgccacccccgagagcggccctggcacctccaccgagcccagcgagggcagcgcacccggcagccctgccggcagccccacctccacagaggagggaaccagcaccgagcccagcgaaggcagcgccccaggcaccagcaccgagcctagtgagcaggagattaaacggatcaacaagatcagaagaagacttgtgaaagacagcaacaccaagaaggccggcaagacaggccccatgaaaaccctgctggttagagtgatgacacccgatctgagagagcggctggaaaacctgagaaagaagcctgaaaatatcccccagcccatcagcaatacatctagagccaacctgaataagctgctgaccgattacaccgaaatgaagaaggcgatcctgcatgtgtactgggaagagttccagaaggaccctgtgggcctgatgagccgggtggcccagcctgccagcaagaagatcgatcagaacaagctgaaacctgagatggacgagaagggcaacctgaccaccgccggctttgcctgctctcagtgtggccagcccctgttcgtgtacaagctggagcaggtgtctgagaagggcaaggcttacaccaactacttcggacggtgcaatgtggccgagcacgaaaagctgatcctgctggcccagctgaagcccgagaaggatagcgacgaagccgtgacatatagcctgggaaagtttgggcagagggccctggatttctacagcattcatgtgaccaaggagtccacccaccccgtgaagcccctggcccagatcgccggaaacagatacgcctccggacctgtgggaaaggccctgagcgacgcatgtatgggcacaatcgcctccttcctgtctaagtaccaggacatcatcatcgaacaccagaaggtggtgaagggcaaccagaagagactggagagcctgcgggagctggccggcaaggaaaacctggaataccctagcgtgaccctgccacctcagcctcacaccaaggagggcgttgatgcctacaacgaagtgatcgcccgggtgcgaatgtgggtgaacctgaacctgtggcagaagctgaagctaagcagagatgatgccaagcctctgctgagactgaagggattcccttcctttcctctggtcgagagacaggccaacgaagtggactggtgggacatggtgtgtaacgtgaagaagctgatcaacgagaaaaaggaggatggcaaggtgttttggcagaatctggctggctacaagagacaggaagccctgagaccatacctgagcagcgaggaagatcggaagaagggaaagaaattcgctcggtaccagctgggcgacctgctgctgcacctggaaaagaagcacggcgaggactggggaaaggtgtacgacgaggcctgggagcggattgacaagaaagtggaaggcctgagcaagcacatcaagctggaagaggaacggagaagcgaggacgcccagagcaaggccgccctgaccgactggctgcgggctaaggccagcttcgtgatcgagggcctgaaggaggccgacaaggacgagttctgcagatgcgagctgaagctgcagaagtggtacggggacctgcggggaaagcccttcgccatcgaagccgagaacagcatcctggacatcagcggcttcagcaagcagtacaactgtgccttcatctggcagaaggacggcgtgaagaagctgaacctgtacctgatcatcaactacttcaagggcggcaagctgcggttcaagaagatcaaacctgaagccttcgaagccaacagattctacaccgtgatcaacaaaaagagcggcgagatcgtgcccatggaggtgaacttcaacttcgacgaccccaacctgatcatcctgcctctggcctttggcaagagacagggcagagaattcatctggaacgacctgctgtccctggaaaccggcagcctgaagctggccaacggaagagtgatcgagaagacactgtacaacagaagaacccggcaggatgagcctgccctgttcgtggccctgaccttcgagcggcgggaggtcctggactcctccaatatcaaaccaatgaacctgatcggcgtggcaagaggcgaaaacatccccgccgtgatcgccctgaccgaccccgagggctgcccactgagccggtttaaggatagcctgggaaacccaacccacatcctgagaatcggcgagagctataaggagaagcagcggaccatccaggccaagaaggaggtggagcagcggagagccggcggctacagccggaagtacgccagcaaagccaagaatctggcagacgatatggtgagaaacaccgctagagatctgctgtactacgccgtgacccaggatgccatgctgatcttcgccaacctgagccggggcttcggccggcagggcaagcggaccttcatggccgagagacagtacacacggatggaggactggctgaccgccaagctggcctacgagggcctgagcaagacctacctgtccaagacactggcccagtacacctccaagacatgcagcaactgtgggtttaccatcaccagcgccgactacgacagggtgctggagaagctgaagaagacagcaacaggctggatgaccacaattaacggcaaggagctgaaggtggagggccagattacctactacaacagatacaagagacagaacgtagtcaaggacctgtccgtcgagctggatagactgagcgaagaatctgtgaacaacgacatctcctcctggacaaagggcagaagcggagaagctctgagcctcctgaagaaaagattctcccatagacccgtgcaggagaagttcgtgtgcctgaactgcggcttcgagacacacgcagccgagcaagccgccctgaacatcgccagatcctggctgttcctgcggagccaggagtacaagaaataccagacaaacaagacaaccggcaacaccgataagagagccttcgtcgagacctggcagtccttttaccggaagaagcttaaggaggtgtggaaacctgccgtgcggtctggcggatctggcggaggctcctaacagccagggcctgctgaccttcagggacgtggccatcgagttcagccaggaggagctgaggtgcctgaaccacagccagtgggagctgtacagggacgtgatgttcgagaactacggccacctgctgttcctgggcctggtggtgagcaagcccgacctggtgatcttcctggagcagaagaaggacgtgtgggccgtgaagaggaaggagaccgtggccacccaccccggcaggtgggagggatctggctccggcagcggccccaagaaaaagagaaaagtctaagctgccttctgcggggcttgccttctggccatgcccttcttctctcccttgcacctgtacctcttggtctttgaataaagcctgagtaggaaggctagcaaaaaaaaaaaaaaaaaaaaaaaaaaaaaaaaaaaaaaaaaaaaaaaaaaaaaaaaaaaaaaaaaaaaaaaaaaaaaaaa

SEQ ID NO: 15688 - RNA, 9485 nt, synthetic construct
  source 1..9485: mol_type = other RNA
aggaaataagagagaaaagaagagtaagaagaaatataagagccaccatggcccctaagaagaagcgtaaagtgagccggatggaacgcctcgtctacgaggtgcggcagaagtgcagaaacatcgaggacatctgcatctcctgcggatctctgaacgtgaccctggagcacccactgttcatcggcggcatgtgccagaactgtaaaaactgttttctggagtgtgcctatcaatacgacgatgacggctaccagagctactgcaccatctgttgcggcggaagagaggtgctgatgtgtggaaataacaactgctgccggtgcttctgcgtggaatgcgtggacctgctggtgggccccggcgccgcccaggccgctattaaggaagatccttggaactgctacatgtgcggccacaagggcacatacggcctgctgagacggagagaggactggcctagcagactgcagatgttcttcgccaataaccacgaccaggagttcgacccccctaaggtgtaccctcccgtccccgccgagaagagaaagcccatccgggtcctgagcctgttcgatggcatcgccaccggtctgctggtgctgaaggacctgggcatccaggtggataggtacattgcctccgaggtgtgcgaggactccatcaccgtgggaatggtgcgtcatcagggcaagatcatgtacgtgggcgacgtgcggagcgtgacacagaagcatatccaggagtggggccctttcgacctggtgatcggcggcagcccttgcaatgacctgagcatcgtgaacccagcccggaagggcctgtacgagggaaccggcagactgttcttcgagttttacagactgctgcacgacgcccggcctaaggaaggcgacgaccggcccttcttttggctgttcgagaatgtggtggccatgggagtcagcgacaagcgggatattagccggttcctggagagcaaccccgtgatgatcgatgccaaggaagtgagcgccgcccaccgggccagatacttctggggcaatctgcctggcatgaacagacccctggccagcaccgtgaacgacaagctggagctgcaggagtgcctggagcacggccggatcgccaagttcagcaaggtgagaaccatcaccacccgaagcaacagcatcaaacaaggcaaggaccagcactttcctgtgttcatgaacgagaaggaggacatcctgtggtgtaccgagatggagagagtgttcgggttcccagtccactacacagatgtcagcaacatgtctagactggccagacagagactgctgggaagaagctggtccgtccctgtgatcagacacctgttcgcccctctgaaggagtacttcgcctgcgtgagcagcggcaacagcaacgccaacagccggggccccagcttctctagcggcctggtgccactgtccctgagagggagccacatgggccccatggagatctacaaaaccgtgagcgcctggaagcggcagcctgtgcgcgtgctgagcctgtttcggaatatcgataaagtcctgaaaagcctgggattcctggagagcggctctggctccggcggtggcaccctgaagtacgtggaggatgtgacaaacgtggtcagacgggatgtggagaagtggggccccttcgatctggtgtacggcagcacccaacccctgggcagctcttgtgaccggtgccctggctggtacatgtttcagttccaccggatcctgcagtacgccctgccgagacaggagtcccagcggccattcttttggattttcatggacaacttgctgctgaccgaggatgaccaggaaactaccactcggttcctgcagaccgaagccgtgaccctgcaggacgtgagaggccgggactaccagaacgccatgcgggtgtggtccaacatccctggactgaaaagcaagcacgcacctctgacccctaaagaagaggagtacctgcaggcccaggtgcggagcagaagcaagctggacgcccctaaggtggatctgctggtgaagaattgcctcctgcccctgagagagtacttcaagtatttcagccagaatagtctgcccctgggaggcagcggcggcggcgccctggtgacatttgaggacgtcgccgtgcggttcacccaggaggaatgggctctgctggatccttctcagaaaatcctgtaccgggacgtgatgagagagacataccggaatctgacctccgtgggcatcaactgggaatgttgggaccttgaagcctgcttcagaagcctgggaagaaacctgagagtgcaggtggtgaagagaaagtgcgagctgaccaacagcggcccctgcgccgagggcggcccaagcagcggcgcccctcctcccagcggcggcagcccagccggctccccaacctctaccgaggagggcacctctgagtccgccacccccgagagcggccctggcacctccaccgagcccagcgagggcagcgcacccggcagccctgccggcagccccacctccacagaggagggaaccagcaccgagcccagcgaaggcagcgccccaggcaccagcaccgagcctagtgagcaggagattaaacggatcaacaagatcagaagaagacttgtgaaagacagcaacaccaagaaggccggcaagacaggccccatgaaaaccctgctggttagagtgatgacacccgatctgagagagcggctggaaaacctgagaaagaagcctgaaaatatcccccagcccatcagcaatacatctagagccaacctgaataagctgctgaccgattacaccgaaatgaagaaggcgatcctgcatgtgtactgggaagagttccagaaggaccctgtgggcctgatgagccgggtggcccagcctgccagcaagaagatcgatcagaacaagctgaaacctgagatggacgagaagggcaacctgaccaccgccggctttgcctgctctcagtgtggccagcccctgttcgtgtacaagctggagcaggtgtctgagaagggcaaggcttacaccaactacttcggacggtgcaatgtggccgagcacgaaaagctgatcctgctggcccagctgaagcccgagaaggatagcgacgaagccgtgacatatagcctgggaaagtttgggcagagggccctggatttctacagcattcatgtgaccaaggagtccacccaccccgtgaagcccctggcccagatcgccggaaacagatacgcctccggacctgtgggaaaggccctgagcgacgcatgtatgggcacaatcgcctccttcctgtctaagtaccaggacatcatcatcgaacaccagaaggtggtgaagggcaaccagaagagactggagagcctgcgggagctggccggcaaggaaaacctggaataccctagcgtgaccctgccacctcagcctcacaccaaggagggcgttgatgcctacaacgaagtgatcgcccgggtgcgaatgtgggtgaacctgaacctgtggcagaagctgaagctaagcagagatgatgccaagcctctgctgagactgaagggattcccttcctttcctctggtcgagagacaggccaacgaagtggactggtgggacatggtgtgtaacgtgaagaagctgatcaacgagaaaaaggaggatggcaaggtgttttggcagaatctggctggctacaagagacaggaagccctgagaccatacctgagcagcgaggaagatcggaagaagggaaagaaattcgctcggtaccagctgggcgacctgctgctgcacctggaaaagaagcacggcgaggactggggaaaggtgtacgacgaggcctgggagcggattgacaagaaagtggaaggcctgagcaagcacatcaagctggaagaggaacggagaagcgaggacgcccagagcaaggccgccctgaccgactggctgcgggctaaggccagcttcgtgatcgagggcctgaaggaggccgacaaggacgagttctgcagatgcgagctgaagctgcagaagtggtacggggacctgcggggaaagcccttcgccatcgaagccgagaacagcatcctggacatcagcggcttcagcaagcagtacaactgtgccttcatctggcagaaggacggcgtgaagaagctgaacctgtacctgatcatcaactacttcaagggcggcaagctgcggttcaagaagatcaaacctgaagccttcgaagccaacagattctacaccgtgatcaacaaaaagagcggcgagatcgtgcccatggaggtgaacttcaacttcgacgaccccaacctgatcatcctgcctctggcctttggcaagagacagggcagagaattcatctggaacgacctgctgtccctggaaaccggcagcctgaagctggccaacggaagagtgatcgagaagacactgtacaacagaagaacccggcaggatgagcctgccctgttcgtggccctgaccttcgagcggcgggaggtcctggactcctccaatatcaaaccaatgaacctgatcggcgtggcaagaggcgaaaacatccccgccgtgatcgccctgaccgaccccgagggctgcccactgagccggtttaaggatagcctgggaaacccaacccacatcctgagaatcggcgagagctataaggagaagcagcggaccatccaggccaagaaggaggtggagcagcggagagccggcggctacagccggaagtacgccagcaaagccaagaatctggcagacgatatggtgagaaacaccgctagagatctgctgtactacgccgtgacccaggatgccatgctgatcttcgccaacctgagccggggcttcggccggcagggcaagcggaccttcatggccgagagacagtacacacggatggaggactggctgaccgccaagctggcctacgagggcctgagcaagacctacctgtccaagacactggcccagtacacctccaagacatgcagcaactgtgggtttaccatcaccagcgccgactacgacagggtgctggagaagctgaagaagacagcaacaggctggatgaccacaattaacggcaaggagctgaaggtggagggccagattacctactacaacagatacaagagacagaacgtagtcaaggacctgtccgtcgagctggatagactgagcgaagaatctgtgaacaacgacatctcctcctggacaaagggcagaagcggagaagctctgagcctcctgaagaaaagattctcccatagacccgtgcaggagaagttcgtgtgcctgaactgcggcttcgagacacacgcagccgagcaagccgccctgaacatcgccagatcctggctgttcctgcggagccaggagtacaagaaataccagacaaacaagacaaccggcaacaccgataagagagccttcgtcgagacctggcagtccttttaccggaagaagcttaaggaggtgtggaaacctgccgtgcggtctggcggatctggcggaggctccatgatccaggcccaggagagcatcaccctggaggacgtggccgtggacttcacctgggaggagtggcagctgctgggcgccgcccagaaggacctgtacagggacgtgatgctggagaactacagcaacctggtggccgtgggctaccaggccagcaagcccgacgccctgttcaagctggagcagggcgagcagccctggaccaccgaggacggcatccacagcggcgcctgcagcgacatgggcggcccaagcagcggcgcccctcctcccagcggcggcagcccagccggctccccaacctctaccgaggagggcacctctgagtccgccacccccgagagcggccctggcacctccaccgagcccagcgagggcagcgcacccggcagccctgccggcagccccacctccacagaggagggaaccagcaccgagcccagcgaaggcagcgccccaggcaccagcaccgagcctagtgagcaggagattaaacggatcaacaagatcagaagaagacttgtgaaagacagcaacaccaagaaggccggcaagacaggccccatgaaaaccctgctggttagagtgatgacacccgatctgagagagcggctggaaaacctgagaaagaagcctgaaaatatcccccagcccatcagcaatacatctagagccaacctgaataagctgctgaccgattacaccgaaatgaagaaggcgatcctgcatgtgtactgggaagagttccagaaggaccctgtgggcctgatgagccgggtggcccagcctgccagcaagaagatcgatcagaacaagctgaaacctgagatggacgagaagggcaacctgaccaccgccggctttgcctgctctcagtgtggccagcccctgttcgtgtacaagctggagcaggtgtctgagaagggcaaggcttacaccaactacttcggacggtgcaatgtggccgagcacgaaaagctgatcctgctggcccagctgaagcccgagaaggatagcgacgaagccgtgacatatagcctgggaaagtttgggcagagggccctggatttctacagcattcatgtgaccaaggagtccacccaccccgtgaagcccctggcccagatcgccggaaacagatacgcctccggacctgtgggaaaggccctgagcgacgcatgtatgggcacaatcgcctccttcctgtctaagtaccaggacatcatcatcgaacaccagaaggtggtgaagggcaaccagaagagactggagagcctgcgggagctggccggcaaggaaaacctggaataccctagcgtgaccctgccacctcagcctcacaccaaggagggcgttgatgcctacaacgaagtgatcgcccgggtgcgaatgtgggtgaacctgaacctgtggcagaagctgaagctaagcagagatgatgccaagcctctgctgagactgaagggattcccttcctttcctctggtcgagagacaggccaacgaagtggactggtgggacatggtgtgtaacgtgaagaagctgatcaacgagaaaaaggaggatggcaaggtgttttggcagaatctggctggctacaagagacaggaagccctgagaccatacctgagcagcgaggaagatcggaagaagggaaagaaattcgctcggtaccagctgggcgacctgctgctgcacctggaaaagaagcacggcgaggactggggaaaggtgtacgacgaggcctgggagcggattgacaagaaagtggaaggcctgagcaagcacatcaagctggaagaggaacggagaagcgaggacgcccagagcaaggccgccctgaccgactggctgcgggctaaggccagcttcgtgatcgagggcctgaaggaggccgacaaggacgagttctgcagatgcgagctgaagctgcagaagtggtacggggacctgcggggaaagcccttcgccatcgaagccgagaacagcatcctggacatcagcggcttcagcaagcagtacaactgtgccttcatctggcagaaggacggcgtgaagaagctgaacctgtacctgatcatcaactacttcaagggcggcaagctgcggttcaagaagatcaaacctgaagccttcgaagccaacagattctacaccgtgatcaacaaaaagagcggcgagatcgtgcccatggaggtgaacttcaacttcgacgaccccaacctgatcatcctgcctctggcctttggcaagagacagggcagagaattcatctggaacgacctgctgtccctggaaaccggcagcctgaagctggccaacggaagagtgatcgagaagacactgtacaacagaagaacccggcaggatgagcctgccctgttcgtggccctgaccttcgagcggcgggaggtcctggactcctccaatatcaaaccaatgaacctgatcggcgtggcaagaggcgaaaacatccccgccgtgatcgccctgaccgaccccgagggctgcccactgagccggtttaaggatagcctgggaaacccaacccacatcctgagaatcggcgagagctataaggagaagcagcggaccatccaggccaagaaggaggtggagcagcggagagccggcggctacagccggaagtacgccagcaaagccaagaatctggcagacgatatggtgagaaacaccgctagagatctgctgtactacgccgtgacccaggatgccatgctgatcttcgccaacctgagccggggcttcggccggcagggcaagcggaccttcatggccgagagacagtacacacggatggaggactggctgaccgccaagctggcctacgagggcctgagcaagacctacctgtccaagacactggcccagtacacctccaagacatgcagcaactgtgggtttaccatcaccagcgccgactacgacagggtgctggagaagctgaagaagacagcaacaggctggatgaccacaattaacggcaaggagctgaaggtggagggccagattacctactacaacagatacaagagacagaacgtagtcaaggacctgtccgtcgagctggatagactgagcgaagaatctgtgaacaacgacatctcctcctggacaaagggcagaagcggagaagctctgagcctcctgaagaaaagattctcccatagacccgtgcaggagaagttcgtgtgcctgaactgcggcttcgagacacacgcagccgagcaagccgccctgaacatcgccagatcctggctgttcctgcggagccaggagtacaagaaataccagacaaacaagacaaccggcaacaccgataagagagccttcgtcgagacctggcagtccttttaccggaagaagcttaaggaggtgtggaaacctgccgtgcggtctggcggatctggcggaggctcctatgatccaggcccaggagagcatcaccctggaggacgtggccgtggacttcacctgggaggagtggcagctgctgggcgccgcccagaaggacctgtacagggacgtgatgctggagaactacagcaacctggtggccgtgggctaccaggccagcaagcccgacgccctgttcaagctggagcagggcgagcagccctggaccaccgaggacggcatccacagcggcgcctgcagcgacatgggatctggctccggcagcggccccaagaaaaagagaaaagtctaagctgccttctgcggggcttgccttctggccatgcccttcttctctcccttgcacctgtacctcttggtctttgaataaagcctgagtaggaaggctagcaaaaaaaaaaaaaaaaaaaaaaaaaaaaaaaaaaaaaaaaaaaaaaaaaaaaaaaaaaaaaaaaaaaaaaaaaaaaaaaa

SEQ ID NO: 15689 - RNA, 9485 nt, synthetic construct
  source 1..9485: mol_type = other RNA
aggaaataagagagaaaagaagagtaagaagaaatataagagccaccatggcccctaagaagaagcgtaaagtgagccggatggaacgcctcgtctacgaggtgcggcagaagtgcagaaacatcgaggacatctgcatctcctgcggatctctgaacgtgaccctggagcacccactgttcatcggcggcatgtgccagaactgtaaaaactgttttctggagtgtgcctatcaatacgacgatgacggctaccagagctactgcaccatctgttgcggcggaagagaggtgctgatgtgtggaaataacaactgctgccggtgcttctgcgtggaatgcgtggacctgctggtgggccccggcgccgcccaggccgctattaaggaagatccttggaactgctacatgtgcggccacaagggcacatacggcctgctgagacggagagaggactggcctagcagactgcagatgttcttcgccaataaccacgaccaggagttcgacccccctaaggtgtaccctcccgtccccgccgagaagagaaagcccatccgggtcctgagcctgttcgatggcatcgccaccggtctgctggtgctgaaggacctgggcatccaggtggataggtacattgcctccgaggtgtgcgaggactccatcaccgtgggaatggtgcgtcatcagggcaagatcatgtacgtgggcgacgtgcggagcgtgacacagaagcatatccaggagtggggccctttcgacctggtgatcggcggcagcccttgcaatgacctgagcatcgtgaacccagcccggaagggcctgtacgagggaaccggcagactgttcttcgagttttacagactgctgcacgacgcccggcctaaggaaggcgacgaccggcccttcttttggctgttcgagaatgtggtggccatgggagtcagcgacaagcgggatattagccggttcctggagagcaaccccgtgatgatcgatgccaaggaagtgagcgccgcccaccgggccagatacttctggggcaatctgcctggcatgaacagacccctggccagcaccgtgaacgacaagctggagctgcaggagtgcctggagcacggccggatcgccaagttcagcaaggtgagaaccatcaccacccgaagcaacagcatcaaacaaggcaaggaccagcactttcctgtgttcatgaacgagaaggaggacatcctgtggtgtaccgagatggagagagtgttcgggttcccagtccactacacagatgtcagcaacatgtctagactggccagacagagactgctgggaagaagctggtccgtccctgtgatcagacacctgttcgcccctctgaaggagtacttcgcctgcgtgagcagcggcaacagcaacgccaacagccggggccccagcttctctagcggcctggtgccactgtccctgagagggagccacatgggccccatggagatctacaaaaccgtgagcgcctggaagcggcagcctgtgcgcgtgctgagcctgtttcggaatatcgataaagtcctgaaaagcctgggattcctggagagcggctctggctccggcggtggcaccctgaagtacgtggaggatgtgacaaacgtggtcagacgggatgtggagaagtggggccccttcgatctggtgtacggcagcacccaacccctgggcagctcttgtgaccggtgccctggctggtacatgtttcagttccaccggatcctgcagtacgccctgccgagacaggagtcccagcggccattcttttggattttcatggacaacttgctgctgaccgaggatgaccaggaaactaccactcggttcctgcagaccgaagccgtgaccctgcaggacgtgagaggccgggactaccagaacgccatgcgggtgtggtccaacatccctggactgaaaagcaagcacgcacctctgacccctaaagaagaggagtacctgcaggcccaggtgcggagcagaagcaagctggacgcccctaaggtggatctgctggtgaagaattgcctcctgcccctgagagagtacttcaagtatttcagccagaatagtctgcccctgggaggcagcggcggcggcgccctggtgacatttgaggacgtcgccgtgcggttcacccaggaggaatgggctctgctggatccttctcagaaaatcctgtaccgggacgtgatgagagagacataccggaatctgacctccgtgggcatcaactgggaatgttgggaccttgaagcctgcttcagaagcctgggaagaaacctgagagtgcaggtggtgaagagaaagtgcgagctgaccaacagcggcccctgcgccgagggcggcccaagcagcggcgcccctcctcccagcggcggcagcccagccggctccccaacctctaccgaggagggcacctctgagtccgccacccccgagagcggccctggcacctccaccgagcccagcgagggcagcgcacccggcagccctgccggcagccccacctccacagaggagggaaccagcaccgagcccagcgaaggcagcgccccaggcaccagcaccgagcctagtgagcaggagattaaacggatcaacaagatcagaagaagacttgtgaaagacagcaacaccaagaaggccggcaagacaggccccatgaaaaccctgctggttagagtgatgacacccgatctgagagagcggctggaaaacctgagaaagaagcctgaaaatatcccccagcccatcagcaatacatctagagccaacctgaataagctgctgaccgattacaccgaaatgaagaaggcgatcctgcatgtgtactgggaagagttccagaaggaccctgtgggcctgatgagccgggtggcccagcctgccagcaagaagatcgatcagaacaagctgaaacctgagatggacgagaagggcaacctgaccaccgccggctttgcctgctctcagtgtggccagcccctgttcgtgtacaagctggagcaggtgtctgagaagggcaaggcttacaccaactacttcggacggtgcaatgtggccgagcacgaaaagctgatcctgctggcccagctgaagcccgagaaggatagcgacgaagccgtgacatatagcctgggaaagtttgggcagagggccctggatttctacagcattcatgtgaccaaggagtccacccaccccgtgaagcccctggcccagatcgccggaaacagatacgcctccggacctgtgggaaaggccctgagcgacgcatgtatgggcacaatcgcctccttcctgtctaagtaccaggacatcatcatcgaacaccagaaggtggtgaagggcaaccagaagagactggagagcctgcgggagctggccggcaaggaaaacctggaataccctagcgtgaccctgccacctcagcctcacaccaaggagggcgttgatgcctacaacgaagtgatcgcccgggtgcgaatgtgggtgaacctgaacctgtggcagaagctgaagctaagcagagatgatgccaagcctctgctgagactgaagggattcccttcctttcctctggtcgagagacaggccaacgaagtggactggtgggacatggtgtgtaacgtgaagaagctgatcaacgagaaaaaggaggatggcaaggtgttttggcagaatctggctggctacaagagacaggaagccctgagaccatacctgagcagcgaggaagatcggaagaagggaaagaaattcgctcggtaccagctgggcgacctgctgctgcacctggaaaagaagcacggcgaggactggggaaaggtgtacgacgaggcctgggagcggattgacaagaaagtggaaggcctgagcaagcacatcaagctggaagaggaacggagaagcgaggacgcccagagcaaggccgccctgaccgactggctgcgggctaaggccagcttcgtgatcgagggcctgaaggaggccgacaaggacgagttctgcagatgcgagctgaagctgcagaagtggtacggggacctgcggggaaagcccttcgccatcgaagccgagaacagcatcctggacatcagcggcttcagcaagcagtacaactgtgccttcatctggcagaaggacggcgtgaagaagctgaacctgtacctgatcatcaactacttcaagggcggcaagctgcggttcaagaagatcaaacctgaagccttcgaagccaacagattctacaccgtgatcaacaaaaagagcggcgagatcgtgcccatggaggtgaacttcaacttcgacgaccccaacctgatcatcctgcctctggcctttggcaagagacagggcagagaattcatctggaacgacctgctgtccctggaaaccggcagcctgaagctggccaacggaagagtgatcgagaagacactgtacaacagaagaacccggcaggatgagcctgccctgttcgtggccctgaccttcgagcggcgggaggtcctggactcctccaatatcaaaccaatgaacctgatcggcgtggcaagaggcgaaaacatccccgccgtgatcgccctgaccgaccccgagggctgcccactgagccggtttaaggatagcctgggaaacccaacccacatcctgagaatcggcgagagctataaggagaagcagcggaccatccaggccaagaaggaggtggagcagcggagagccggcggctacagccggaagtacgccagcaaagccaagaatctggcagacgatatggtgagaaacaccgctagagatctgctgtactacgccgtgacccaggatgccatgctgatcttcgccaacctgagccggggcttcggccggcagggcaagcggaccttcatggccgagagacagtacacacggatggaggactggctgaccgccaagctggcctacgagggcctgagcaagacctacctgtccaagacactggcccagtacacctccaagacatgcagcaactgtgggtttaccatcaccagcgccgactacgacagggtgctggagaagctgaagaagacagcaacaggctggatgaccacaattaacggcaaggagctgaaggtggagggccagattacctactacaacagatacaagagacagaacgtagtcaaggacctgtccgtcgagctggatagactgagcgaagaatctgtgaacaacgacatctcctcctggacaaagggcagaagcggagaagctctgagcctcctgaagaaaagattctcccatagacccgtgcaggagaagttcgtgtgcctgaactgcggcttcgagacacacgcagccgagcaagccgccctgaacatcgccagatcctggctgttcctgcggagccaggagtacaagaaataccagacaaacaagacaaccggcaacaccgataagagagccttcgtcgagacctggcagtccttttaccggaagaagcttaaggaggtgtggaaacctgccgtgcggtctggcggatctggcggaggctccgagccctgggccatcaccttcgccgacgtggccgtgtacttcagccccgaggagtggggctgcctgcagcccacccagagggccctgtacagggacgtgatgagggacacctacgtgctgctgagcgccctgggcggcggcggcgccaagcccgccctgatcagctgggtggagagggaggccgagctgtgggaccccgacgcccaggaccccgaggtgcccaagtggcccaccgaggccgacggcggcccaagcagcggcgcccctcctcccagcggcggcagcccagccggctccccaacctctaccgaggagggcacctctgagtccgccacccccgagagcggccctggcacctccaccgagcccagcgagggcagcgcacccggcagccctgccggcagccccacctccacagaggagggaaccagcaccgagcccagcgaaggcagcgccccaggcaccagcaccgagcctagtgagcaggagattaaacggatcaacaagatcagaagaagacttgtgaaagacagcaacaccaagaaggccggcaagacaggccccatgaaaaccctgctggttagagtgatgacacccgatctgagagagcggctggaaaacctgagaaagaagcctgaaaatatcccccagcccatcagcaatacatctagagccaacctgaataagctgctgaccgattacaccgaaatgaagaaggcgatcctgcatgtgtactgggaagagttccagaaggaccctgtgggcctgatgagccgggtggcccagcctgccagcaagaagatcgatcagaacaagctgaaacctgagatggacgagaagggcaacctgaccaccgccggctttgcctgctctcagtgtggccagcccctgttcgtgtacaagctggagcaggtgtctgagaagggcaaggcttacaccaactacttcggacggtgcaatgtggccgagcacgaaaagctgatcctgctggcccagctgaagcccgagaaggatagcgacgaagccgtgacatatagcctgggaaagtttgggcagagggccctggatttctacagcattcatgtgaccaaggagtccacccaccccgtgaagcccctggcccagatcgccggaaacagatacgcctccggacctgtgggaaaggccctgagcgacgcatgtatgggcacaatcgcctccttcctgtctaagtaccaggacatcatcatcgaacaccagaaggtggtgaagggcaaccagaagagactggagagcctgcgggagctggccggcaaggaaaacctggaataccctagcgtgaccctgccacctcagcctcacaccaaggagggcgttgatgcctacaacgaagtgatcgcccgggtgcgaatgtgggtgaacctgaacctgtggcagaagctgaagctaagcagagatgatgccaagcctctgctgagactgaagggattcccttcctttcctctggtcgagagacaggccaacgaagtggactggtgggacatggtgtgtaacgtgaagaagctgatcaacgagaaaaaggaggatggcaaggtgttttggcagaatctggctggctacaagagacaggaagccctgagaccatacctgagcagcgaggaagatcggaagaagggaaagaaattcgctcggtaccagctgggcgacctgctgctgcacctggaaaagaagcacggcgaggactggggaaaggtgtacgacgaggcctgggagcggattgacaagaaagtggaaggcctgagcaagcacatcaagctggaagaggaacggagaagcgaggacgcccagagcaaggccgccctgaccgactggctgcgggctaaggccagcttcgtgatcgagggcctgaaggaggccgacaaggacgagttctgcagatgcgagctgaagctgcagaagtggtacggggacctgcggggaaagcccttcgccatcgaagccgagaacagcatcctggacatcagcggcttcagcaagcagtacaactgtgccttcatctggcagaaggacggcgtgaagaagctgaacctgtacctgatcatcaactacttcaagggcggcaagctgcggttcaagaagatcaaacctgaagccttcgaagccaacagattctacaccgtgatcaacaaaaagagcggcgagatcgtgcccatggaggtgaacttcaacttcgacgaccccaacctgatcatcctgcctctggcctttggcaagagacagggcagagaattcatctggaacgacctgctgtccctggaaaccggcagcctgaagctggccaacggaagagtgatcgagaagacactgtacaacagaagaacccggcaggatgagcctgccctgttcgtggccctgaccttcgagcggcgggaggtcctggactcctccaatatcaaaccaatgaacctgatcggcgtggcaagaggcgaaaacatccccgccgtgatcgccctgaccgaccccgagggctgcccactgagccggtttaaggatagcctgggaaacccaacccacatcctgagaatcggcgagagctataaggagaagcagcggaccatccaggccaagaaggaggtggagcagcggagagccggcggctacagccggaagtacgccagcaaagccaagaatctggcagacgatatggtgagaaacaccgctagagatctgctgtactacgccgtgacccaggatgccatgctgatcttcgccaacctgagccggggcttcggccggcagggcaagcggaccttcatggccgagagacagtacacacggatggaggactggctgaccgccaagctggcctacgagggcctgagcaagacctacctgtccaagacactggcccagtacacctccaagacatgcagcaactgtgggtttaccatcaccagcgccgactacgacagggtgctggagaagctgaagaagacagcaacaggctggatgaccacaattaacggcaaggagctgaaggtggagggccagattacctactacaacagatacaagagacagaacgtagtcaaggacctgtccgtcgagctggatagactgagcgaagaatctgtgaacaacgacatctcctcctggacaaagggcagaagcggagaagctctgagcctcctgaagaaaagattctcccatagacccgtgcaggagaagttcgtgtgcctgaactgcggcttcgagacacacgcagccgagcaagccgccctgaacatcgccagatcctggctgttcctgcggagccaggagtacaagaaataccagacaaacaagacaaccggcaacaccgataagagagccttcgtcgagacctggcagtccttttaccggaagaagcttaaggaggtgtggaaacctgccgtgcggtctggcggatctggcggaggctcctgagccctgggccatcaccttcgccgacgtggccgtgtacttcagccccgaggagtggggctgcctgcagcccacccagagggccctgtacagggacgtgatgagggacacctacgtgctgctgagcgccctgggcggcggcggcgccaagcccgccctgatcagctgggtggagagggaggccgagctgtgggaccccgacgcccaggaccccgaggtgcccaagtggcccaccgaggccgacggatctggctccggcagcggccccaagaaaaagagaaaagtctaagctgccttctgcggggcttgccttctggccatgcccttcttctctcccttgcacctgtacctcttggtctttgaataaagcctgagtaggaaggctagcaaaaaaaaaaaaaaaaaaaaaaaaaaaaaaaaaaaaaaaaaaaaaaaaaaaaaaaaaaaaaaaaaaaaaaaaaaaaaaaa

SEQ ID NO: 15690 - RNA, 9485 nt, synthetic construct
  source 1..9485: mol_type = other RNA
aggaaataagagagaaaagaagagtaagaagaaatataagagccaccatggcccctaagaagaagcgtaaagtgagccggatggaacgcctcgtctacgaggtgcggcagaagtgcagaaacatcgaggacatctgcatctcctgcggatctctgaacgtgaccctggagcacccactgttcatcggcggcatgtgccagaactgtaaaaactgttttctggagtgtgcctatcaatacgacgatgacggctaccagagctactgcaccatctgttgcggcggaagagaggtgctgatgtgtggaaataacaactgctgccggtgcttctgcgtggaatgcgtggacctgctggtgggccccggcgccgcccaggccgctattaaggaagatccttggaactgctacatgtgcggccacaagggcacatacggcctgctgagacggagagaggactggcctagcagactgcagatgttcttcgccaataaccacgaccaggagttcgacccccctaaggtgtaccctcccgtccccgccgagaagagaaagcccatccgggtcctgagcctgttcgatggcatcgccaccggtctgctggtgctgaaggacctgggcatccaggtggataggtacattgcctccgaggtgtgcgaggactccatcaccgtgggaatggtgcgtcatcagggcaagatcatgtacgtgggcgacgtgcggagcgtgacacagaagcatatccaggagtggggccctttcgacctggtgatcggcggcagcccttgcaatgacctgagcatcgtgaacccagcccggaagggcctgtacgagggaaccggcagactgttcttcgagttttacagactgctgcacgacgcccggcctaaggaaggcgacgaccggcccttcttttggctgttcgagaatgtggtggccatgggagtcagcgacaagcgggatattagccggttcctggagagcaaccccgtgatgatcgatgccaaggaagtgagcgccgcccaccgggccagatacttctggggcaatctgcctggcatgaacagacccctggccagcaccgtgaacgacaagctggagctgcaggagtgcctggagcacggccggatcgccaagttcagcaaggtgagaaccatcaccacccgaagcaacagcatcaaacaaggcaaggaccagcactttcctgtgttcatgaacgagaaggaggacatcctgtggtgtaccgagatggagagagtgttcgggttcccagtccactacacagatgtcagcaacatgtctagactggccagacagagactgctgggaagaagctggtccgtccctgtgatcagacacctgttcgcccctctgaaggagtacttcgcctgcgtgagcagcggcaacagcaacgccaacagccggggccccagcttctctagcggcctggtgccactgtccctgagagggagccacatgggccccatggagatctacaaaaccgtgagcgcctggaagcggcagcctgtgcgcgtgctgagcctgtttcggaatatcgataaagtcctgaaaagcctgggattcctggagagcggctctggctccggcggtggcaccctgaagtacgtggaggatgtgacaaacgtggtcagacgggatgtggagaagtggggccccttcgatctggtgtacggcagcacccaacccctgggcagctcttgtgaccggtgccctggctggtacatgtttcagttccaccggatcctgcagtacgccctgccgagacaggagtcccagcggccattcttttggattttcatggacaacttgctgctgaccgaggatgaccaggaaactaccactcggttcctgcagaccgaagccgtgaccctgcaggacgtgagaggccgggactaccagaacgccatgcgggtgtggtccaacatccctggactgaaaagcaagcacgcacctctgacccctaaagaagaggagtacctgcaggcccaggtgcggagcagaagcaagctggacgcccctaaggtggatctgctggtgaagaattgcctcctgcccctgagagagtacttcaagtatttcagccagaatagtctgcccctgggaggcagcggcggcggcgccctggtgacatttgaggacgtcgccgtgcggttcacccaggaggaatgggctctgctggatccttctcagaaaatcctgtaccgggacgtgatgagagagacataccggaatctgacctccgtgggcatcaactgggaatgttgggaccttgaagcctgcttcagaagcctgggaagaaacctgagagtgcaggtggtgaagagaaagtgcgagctgaccaacagcggcccctgcgccgagggcggcccaagcagcggcgcccctcctcccagcggcggcagcccagccggctccccaacctctaccgaggagggcacctctgagtccgccacccccgagagcggccctggcacctccaccgagcccagcgagggcagcgcacccggcagccctgccggcagccccacctccacagaggagggaaccagcaccgagcccagcgaaggcagcgccccaggcaccagcaccgagcctagtgagcaggagattaaacggatcaacaagatcagaagaagacttgtgaaagacagcaacaccaagaaggccggcaagacaggccccatgaaaaccctgctggttagagtgatgacacccgatctgagagagcggctggaaaacctgagaaagaagcctgaaaatatcccccagcccatcagcaatacatctagagccaacctgaataagctgctgaccgattacaccgaaatgaagaaggcgatcctgcatgtgtactgggaagagttccagaaggaccctgtgggcctgatgagccgggtggcccagcctgccagcaagaagatcgatcagaacaagctgaaacctgagatggacgagaagggcaacctgaccaccgccggctttgcctgctctcagtgtggccagcccctgttcgtgtacaagctggagcaggtgtctgagaagggcaaggcttacaccaactacttcggacggtgcaatgtggccgagcacgaaaagctgatcctgctggcccagctgaagcccgagaaggatagcgacgaagccgtgacatatagcctgggaaagtttgggcagagggccctggatttctacagcattcatgtgaccaaggagtccacccaccccgtgaagcccctggcccagatcgccggaaacagatacgcctccggacctgtgggaaaggccctgagcgacgcatgtatgggcacaatcgcctccttcctgtctaagtaccaggacatcatcatcgaacaccagaaggtggtgaagggcaaccagaagagactggagagcctgcgggagctggccggcaaggaaaacctggaataccctagcgtgaccctgccacctcagcctcacaccaaggagggcgttgatgcctacaacgaagtgatcgcccgggtgcgaatgtgggtgaacctgaacctgtggcagaagctgaagctaagcagagatgatgccaagcctctgctgagactgaagggattcccttcctttcctctggtcgagagacaggccaacgaagtggactggtgggacatggtgtgtaacgtgaagaagctgatcaacgagaaaaaggaggatggcaaggtgttttggcagaatctggctggctacaagagacaggaagccctgagaccatacctgagcagcgaggaagatcggaagaagggaaagaaattcgctcggtaccagctgggcgacctgctgctgcacctggaaaagaagcacggcgaggactggggaaaggtgtacgacgaggcctgggagcggattgacaagaaagtggaaggcctgagcaagcacatcaagctggaagaggaacggagaagcgaggacgcccagagcaaggccgccctgaccgactggctgcgggctaaggccagcttcgtgatcgagggcctgaaggaggccgacaaggacgagttctgcagatgcgagctgaagctgcagaagtggtacggggacctgcggggaaagcccttcgccatcgaagccgagaacagcatcctggacatcagcggcttcagcaagcagtacaactgtgccttcatctggcagaaggacggcgtgaagaagctgaacctgtacctgatcatcaactacttcaagggcggcaagctgcggttcaagaagatcaaacctgaagccttcgaagccaacagattctacaccgtgatcaacaaaaagagcggcgagatcgtgcccatggaggtgaacttcaacttcgacgaccccaacctgatcatcctgcctctggcctttggcaagagacagggcagagaattcatctggaacgacctgctgtccctggaaaccggcagcctgaagctggccaacggaagagtgatcgagaagacactgtacaacagaagaacccggcaggatgagcctgccctgttcgtggccctgaccttcgagcggcgggaggtcctggactcctccaatatcaaaccaatgaacctgatcggcgtggcaagaggcgaaaacatccccgccgtgatcgccctgaccgaccccgagggctgcccactgagccggtttaaggatagcctgggaaacccaacccacatcctgagaatcggcgagagctataaggagaagcagcggaccatccaggccaagaaggaggtggagcagcggagagccggcggctacagccggaagtacgccagcaaagccaagaatctggcagacgatatggtgagaaacaccgctagagatctgctgtactacgccgtgacccaggatgccatgctgatcttcgccaacctgagccggggcttcggccggcagggcaagcggaccttcatggccgagagacagtacacacggatggaggactggctgaccgccaagctggcctacgagggcctgagcaagacctacctgtccaagacactggcccagtacacctccaagacatgcagcaactgtgggtttaccatcaccagcgccgactacgacagggtgctggagaagctgaagaagacagcaacaggctggatgaccacaattaacggcaaggagctgaaggtggagggccagattacctactacaacagatacaagagacagaacgtagtcaaggacctgtccgtcgagctggatagactgagcgaagaatctgtgaacaacgacatctcctcctggacaaagggcagaagcggagaagctctgagcctcctgaagaaaagattctcccatagacccgtgcaggagaagttcgtgtgcctgaactgcggcttcgagacacacgcagccgagcaagccgccctgaacatcgccagatcctggctgttcctgcggagccaggagtacaagaaataccagacaaacaagacaaccggcaacaccgataagagagccttcgtcgagacctggcagtccttttaccggaagaagcttaaggaggtgtggaaacctgccgtgcggtctggcggatctggcggaggctccagccaggagcccgtgagcttcgaggaggtggccgtgtacttcagcagggaggagtgggccctgctggaccccgcccagagggccctgtacagggacgtgatgctggagacctacgagtgcgtggccagcctggcccccctgcccgcccccaagcccatggtgatcagcctgctggaggagggcgaggagccctggatccccgacgtgggcagccccgaggccgtggccggcgacgtgagccccggcggcccaagcagcggcgcccctcctcccagcggcggcagcccagccggctccccaacctctaccgaggagggcacctctgagtccgccacccccgagagcggccctggcacctccaccgagcccagcgagggcagcgcacccggcagccctgccggcagccccacctccacagaggagggaaccagcaccgagcccagcgaaggcagcgccccaggcaccagcaccgagcctagtgagcaggagattaaacggatcaacaagatcagaagaagacttgtgaaagacagcaacaccaagaaggccggcaagacaggccccatgaaaaccctgctggttagagtgatgacacccgatctgagagagcggctggaaaacctgagaaagaagcctgaaaatatcccccagcccatcagcaatacatctagagccaacctgaataagctgctgaccgattacaccgaaatgaagaaggcgatcctgcatgtgtactgggaagagttccagaaggaccctgtgggcctgatgagccgggtggcccagcctgccagcaagaagatcgatcagaacaagctgaaacctgagatggacgagaagggcaacctgaccaccgccggctttgcctgctctcagtgtggccagcccctgttcgtgtacaagctggagcaggtgtctgagaagggcaaggcttacaccaactacttcggacggtgcaatgtggccgagcacgaaaagctgatcctgctggcccagctgaagcccgagaaggatagcgacgaagccgtgacatatagcctgggaaagtttgggcagagggccctggatttctacagcattcatgtgaccaaggagtccacccaccccgtgaagcccctggcccagatcgccggaaacagatacgcctccggacctgtgggaaaggccctgagcgacgcatgtatgggcacaatcgcctccttcctgtctaagtaccaggacatcatcatcgaacaccagaaggtggtgaagggcaaccagaagagactggagagcctgcgggagctggccggcaaggaaaacctggaataccctagcgtgaccctgccacctcagcctcacaccaaggagggcgttgatgcctacaacgaagtgatcgcccgggtgcgaatgtgggtgaacctgaacctgtggcagaagctgaagctaagcagagatgatgccaagcctctgctgagactgaagggattcccttcctttcctctggtcgagagacaggccaacgaagtggactggtgggacatggtgtgtaacgtgaagaagctgatcaacgagaaaaaggaggatggcaaggtgttttggcagaatctggctggctacaagagacaggaagccctgagaccatacctgagcagcgaggaagatcggaagaagggaaagaaattcgctcggtaccagctgggcgacctgctgctgcacctggaaaagaagcacggcgaggactggggaaaggtgtacgacgaggcctgggagcggattgacaagaaagtggaaggcctgagcaagcacatcaagctggaagaggaacggagaagcgaggacgcccagagcaaggccgccctgaccgactggctgcgggctaaggccagcttcgtgatcgagggcctgaaggaggccgacaaggacgagttctgcagatgcgagctgaagctgcagaagtggtacggggacctgcggggaaagcccttcgccatcgaagccgagaacagcatcctggacatcagcggcttcagcaagcagtacaactgtgccttcatctggcagaaggacggcgtgaagaagctgaacctgtacctgatcatcaactacttcaagggcggcaagctgcggttcaagaagatcaaacctgaagccttcgaagccaacagattctacaccgtgatcaacaaaaagagcggcgagatcgtgcccatggaggtgaacttcaacttcgacgaccccaacctgatcatcctgcctctggcctttggcaagagacagggcagagaattcatctggaacgacctgctgtccctggaaaccggcagcctgaagctggccaacggaagagtgatcgagaagacactgtacaacagaagaacccggcaggatgagcctgccctgttcgtggccctgaccttcgagcggcgggaggtcctggactcctccaatatcaaaccaatgaacctgatcggcgtggcaagaggcgaaaacatccccgccgtgatcgccctgaccgaccccgagggctgcccactgagccggtttaaggatagcctgggaaacccaacccacatcctgagaatcggcgagagctataaggagaagcagcggaccatccaggccaagaaggaggtggagcagcggagagccggcggctacagccggaagtacgccagcaaagccaagaatctggcagacgatatggtgagaaacaccgctagagatctgctgtactacgccgtgacccaggatgccatgctgatcttcgccaacctgagccggggcttcggccggcagggcaagcggaccttcatggccgagagacagtacacacggatggaggactggctgaccgccaagctggcctacgagggcctgagcaagacctacctgtccaagacactggcccagtacacctccaagacatgcagcaactgtgggtttaccatcaccagcgccgactacgacagggtgctggagaagctgaagaagacagcaacaggctggatgaccacaattaacggcaaggagctgaaggtggagggccagattacctactacaacagatacaagagacagaacgtagtcaaggacctgtccgtcgagctggatagactgagcgaagaatctgtgaacaacgacatctcctcctggacaaagggcagaagcggagaagctctgagcctcctgaagaaaagattctcccatagacccgtgcaggagaagttcgtgtgcctgaactgcggcttcgagacacacgcagccgagcaagccgccctgaacatcgccagatcctggctgttcctgcggagccaggagtacaagaaataccagacaaacaagacaaccggcaacaccgataagagagccttcgtcgagacctggcagtccttttaccggaagaagcttaaggaggtgtggaaacctgccgtgcggtctggcggatctggcggaggctcctagccaggagcccgtgagcttcgaggaggtggccgtgtacttcagcagggaggagtgggccctgctggaccccgcccagagggccctgtacagggacgtgatgctggagacctacgagtgcgtggccagcctggcccccctgcccgcccccaagcccatggtgatcagcctgctggaggagggcgaggagccctggatccccgacgtgggcagccccgaggccgtggccggcgacgtgagccccggatctggctccggcagcggccccaagaaaaagagaaaagtctaagctgccttctgcggggcttgccttctggccatgcccttcttctctcccttgcacctgtacctcttggtctttgaataaagcctgagtaggaaggctagcaaaaaaaaaaaaaaaaaaaaaaaaaaaaaaaaaaaaaaaaaaaaaaaaaaaaaaaaaaaaaaaaaaaaaaaaaaaaaaaa

SEQ ID NO: 15691 - RNA, 9485 nt, synthetic construct
  source 1..9485: mol_type = other RNA
aggaaataagagagaaaagaagagtaagaagaaatataagagccaccatggcccctaagaagaagcgtaaagtgagccggatggaacgcctcgtctacgaggtgcggcagaagtgcagaaacatcgaggacatctgcatctcctgcggatctctgaacgtgaccctggagcacccactgttcatcggcggcatgtgccagaactgtaaaaactgttttctggagtgtgcctatcaatacgacgatgacggctaccagagctactgcaccatctgttgcggcggaagagaggtgctgatgtgtggaaataacaactgctgccggtgcttctgcgtggaatgcgtggacctgctggtgggccccggcgccgcccaggccgctattaaggaagatccttggaactgctacatgtgcggccacaagggcacatacggcctgctgagacggagagaggactggcctagcagactgcagatgttcttcgccaataaccacgaccaggagttcgacccccctaaggtgtaccctcccgtccccgccgagaagagaaagcccatccgggtcctgagcctgttcgatggcatcgccaccggtctgctggtgctgaaggacctgggcatccaggtggataggtacattgcctccgaggtgtgcgaggactccatcaccgtgggaatggtgcgtcatcagggcaagatcatgtacgtgggcgacgtgcggagcgtgacacagaagcatatccaggagtggggccctttcgacctggtgatcggcggcagcccttgcaatgacctgagcatcgtgaacccagcccggaagggcctgtacgagggaaccggcagactgttcttcgagttttacagactgctgcacgacgcccggcctaaggaaggcgacgaccggcccttcttttggctgttcgagaatgtggtggccatgggagtcagcgacaagcgggatattagccggttcctggagagcaaccccgtgatgatcgatgccaaggaagtgagcgccgcccaccgggccagatacttctggggcaatctgcctggcatgaacagacccctggccagcaccgtgaacgacaagctggagctgcaggagtgcctggagcacggccggatcgccaagttcagcaaggtgagaaccatcaccacccgaagcaacagcatcaaacaaggcaaggaccagcactttcctgtgttcatgaacgagaaggaggacatcctgtggtgtaccgagatggagagagtgttcgggttcccagtccactacacagatgtcagcaacatgtctagactggccagacagagactgctgggaagaagctggtccgtccctgtgatcagacacctgttcgcccctctgaaggagtacttcgcctgcgtgagcagcggcaacagcaacgccaacagccggggccccagcttctctagcggcctggtgccactgtccctgagagggagccacatgggccccatggagatctacaaaaccgtgagcgcctggaagcggcagcctgtgcgcgtgctgagcctgtttcggaatatcgataaagtcctgaaaagcctgggattcctggagagcggctctggctccggcggtggcaccctgaagtacgtggaggatgtgacaaacgtggtcagacgggatgtggagaagtggggccccttcgatctggtgtacggcagcacccaacccctgggcagctcttgtgaccggtgccctggctggtacatgtttcagttccaccggatcctgcagtacgccctgccgagacaggagtcccagcggccattcttttggattttcatggacaacttgctgctgaccgaggatgaccaggaaactaccactcggttcctgcagaccgaagccgtgaccctgcaggacgtgagaggccgggactaccagaacgccatgcgggtgtggtccaacatccctggactgaaaagcaagcacgcacctctgacccctaaagaagaggagtacctgcaggcccaggtgcggagcagaagcaagctggacgcccctaaggtggatctgctggtgaagaattgcctcctgcccctgagagagtacttcaagtatttcagccagaatagtctgcccctgggaggcagcggcggcggcgccctggtgacatttgaggacgtcgccgtgcggttcacccaggaggaatgggctctgctggatccttctcagaaaatcctgtaccgggacgtgatgagagagacataccggaatctgacctccgtgggcatcaactgggaatgttgggaccttgaagcctgcttcagaagcctgggaagaaacctgagagtgcaggtggtgaagagaaagtgcgagctgaccaacagcggcccctgcgccgagggcggcccaagcagcggcgcccctcctcccagcggcggcagcccagccggctccccaacctctaccgaggagggcacctctgagtccgccacccccgagagcggccctggcacctccaccgagcccagcgagggcagcgcacccggcagccctgccggcagccccacctccacagaggagggaaccagcaccgagcccagcgaaggcagcgccccaggcaccagcaccgagcctagtgagcaggagattaaacggatcaacaagatcagaagaagacttgtgaaagacagcaacaccaagaaggccggcaagacaggccccatgaaaaccctgctggttagagtgatgacacccgatctgagagagcggctggaaaacctgagaaagaagcctgaaaatatcccccagcccatcagcaatacatctagagccaacctgaataagctgctgaccgattacaccgaaatgaagaaggcgatcctgcatgtgtactgggaagagttccagaaggaccctgtgggcctgatgagccgggtggcccagcctgccagcaagaagatcgatcagaacaagctgaaacctgagatggacgagaagggcaacctgaccaccgccggctttgcctgctctcagtgtggccagcccctgttcgtgtacaagctggagcaggtgtctgagaagggcaaggcttacaccaactacttcggacggtgcaatgtggccgagcacgaaaagctgatcctgctggcccagctgaagcccgagaaggatagcgacgaagccgtgacatatagcctgggaaagtttgggcagagggccctggatttctacagcattcatgtgaccaaggagtccacccaccccgtgaagcccctggcccagatcgccggaaacagatacgcctccggacctgtgggaaaggccctgagcgacgcatgtatgggcacaatcgcctccttcctgtctaagtaccaggacatcatcatcgaacaccagaaggtggtgaagggcaaccagaagagactggagagcctgcgggagctggccggcaaggaaaacctggaataccctagcgtgaccctgccacctcagcctcacaccaaggagggcgttgatgcctacaacgaagtgatcgcccgggtgcgaatgtgggtgaacctgaacctgtggcagaagctgaagctaagcagagatgatgccaagcctctgctgagactgaagggattcccttcctttcctctggtcgagagacaggccaacgaagtggactggtgggacatggtgtgtaacgtgaagaagctgatcaacgagaaaaaggaggatggcaaggtgttttggcagaatctggctggctacaagagacaggaagccctgagaccatacctgagcagcgaggaagatcggaagaagggaaagaaattcgctcggtaccagctgggcgacctgctgctgcacctggaaaagaagcacggcgaggactggggaaaggtgtacgacgaggcctgggagcggattgacaagaaagtggaaggcctgagcaagcacatcaagctggaagaggaacggagaagcgaggacgcccagagcaaggccgccctgaccgactggctgcgggctaaggccagcttcgtgatcgagggcctgaaggaggccgacaaggacgagttctgcagatgcgagctgaagctgcagaagtggtacggggacctgcggggaaagcccttcgccatcgaagccgagaacagcatcctggacatcagcggcttcagcaagcagtacaactgtgccttcatctggcagaaggacggcgtgaagaagctgaacctgtacctgatcatcaactacttcaagggcggcaagctgcggttcaagaagatcaaacctgaagccttcgaagccaacagattctacaccgtgatcaacaaaaagagcggcgagatcgtgcccatggaggtgaacttcaacttcgacgaccccaacctgatcatcctgcctctggcctttggcaagagacagggcagagaattcatctggaacgacctgctgtccctggaaaccggcagcctgaagctggccaacggaagagtgatcgagaagacactgtacaacagaagaacccggcaggatgagcctgccctgttcgtggccctgaccttcgagcggcgggaggtcctggactcctccaatatcaaaccaatgaacctgatcggcgtggcaagaggcgaaaacatccccgccgtgatcgccctgaccgaccccgagggctgcccactgagccggtttaaggatagcctgggaaacccaacccacatcctgagaatcggcgagagctataaggagaagcagcggaccatccaggccaagaaggaggtggagcagcggagagccggcggctacagccggaagtacgccagcaaagccaagaatctggcagacgatatggtgagaaacaccgctagagatctgctgtactacgccgtgacccaggatgccatgctgatcttcgccaacctgagccggggcttcggccggcagggcaagcggaccttcatggccgagagacagtacacacggatggaggactggctgaccgccaagctggcctacgagggcctgagcaagacctacctgtccaagacactggcccagtacacctccaagacatgcagcaactgtgggtttaccatcaccagcgccgactacgacagggtgctggagaagctgaagaagacagcaacaggctggatgaccacaattaacggcaaggagctgaaggtggagggccagattacctactacaacagatacaagagacagaacgtagtcaaggacctgtccgtcgagctggatagactgagcgaagaatctgtgaacaacgacatctcctcctggacaaagggcagaagcggagaagctctgagcctcctgaagaaaagattctcccatagacccgtgcaggagaagttcgtgtgcctgaactgcggcttcgagacacacgcagccgagcaagccgccctgaacatcgccagatcctggctgttcctgcggagccaggagtacaagaaataccagacaaacaagacaaccggcaacaccgataagagagccttcgtcgagacctggcagtccttttaccggaagaagcttaaggaggtgtggaaacctgccgtgcggtctggcggatctggcggaggctccgcccaggcccccctgagcttcgaggacgtggccgtgagcttcagcagggaggagtggaggctgctggtgcccgcccagaaggacctgtacagggacgtgatgctggagaactacaggaacctggtgagcgtgggctaccaggccagcgagcccggcagcctgttccagctggagcacgccggccccctgagggccgtggagggcgccgcccccaggcccccctgccccgaggagatctgggagggcggcccaagcagcggcgcccctcctcccagcggcggcagcccagccggctccccaacctctaccgaggagggcacctctgagtccgccacccccgagagcggccctggcacctccaccgagcccagcgagggcagcgcacccggcagccctgccggcagccccacctccacagaggagggaaccagcaccgagcccagcgaaggcagcgccccaggcaccagcaccgagcctagtgagcaggagattaaacggatcaacaagatcagaagaagacttgtgaaagacagcaacaccaagaaggccggcaagacaggccccatgaaaaccctgctggttagagtgatgacacccgatctgagagagcggctggaaaacctgagaaagaagcctgaaaatatcccccagcccatcagcaatacatctagagccaacctgaataagctgctgaccgattacaccgaaatgaagaaggcgatcctgcatgtgtactgggaagagttccagaaggaccctgtgggcctgatgagccgggtggcccagcctgccagcaagaagatcgatcagaacaagctgaaacctgagatggacgagaagggcaacctgaccaccgccggctttgcctgctctcagtgtggccagcccctgttcgtgtacaagctggagcaggtgtctgagaagggcaaggcttacaccaactacttcggacggtgcaatgtggccgagcacgaaaagctgatcctgctggcccagctgaagcccgagaaggatagcgacgaagccgtgacatatagcctgggaaagtttgggcagagggccctggatttctacagcattcatgtgaccaaggagtccacccaccccgtgaagcccctggcccagatcgccggaaacagatacgcctccggacctgtgggaaaggccctgagcgacgcatgtatgggcacaatcgcctccttcctgtctaagtaccaggacatcatcatcgaacaccagaaggtggtgaagggcaaccagaagagactggagagcctgcgggagctggccggcaaggaaaacctggaataccctagcgtgaccctgccacctcagcctcacaccaaggagggcgttgatgcctacaacgaagtgatcgcccgggtgcgaatgtgggtgaacctgaacctgtggcagaagctgaagctaagcagagatgatgccaagcctctgctgagactgaagggattcccttcctttcctctggtcgagagacaggccaacgaagtggactggtgggacatggtgtgtaacgtgaagaagctgatcaacgagaaaaaggaggatggcaaggtgttttggcagaatctggctggctacaagagacaggaagccctgagaccatacctgagcagcgaggaagatcggaagaagggaaagaaattcgctcggtaccagctgggcgacctgctgctgcacctggaaaagaagcacggcgaggactggggaaaggtgtacgacgaggcctgggagcggattgacaagaaagtggaaggcctgagcaagcacatcaagctggaagaggaacggagaagcgaggacgcccagagcaaggccgccctgaccgactggctgcgggctaaggccagcttcgtgatcgagggcctgaaggaggccgacaaggacgagttctgcagatgcgagctgaagctgcagaagtggtacggggacctgcggggaaagcccttcgccatcgaagccgagaacagcatcctggacatcagcggcttcagcaagcagtacaactgtgccttcatctggcagaaggacggcgtgaagaagctgaacctgtacctgatcatcaactacttcaagggcggcaagctgcggttcaagaagatcaaacctgaagccttcgaagccaacagattctacaccgtgatcaacaaaaagagcggcgagatcgtgcccatggaggtgaacttcaacttcgacgaccccaacctgatcatcctgcctctggcctttggcaagagacagggcagagaattcatctggaacgacctgctgtccctggaaaccggcagcctgaagctggccaacggaagagtgatcgagaagacactgtacaacagaagaacccggcaggatgagcctgccctgttcgtggccctgaccttcgagcggcgggaggtcctggactcctccaatatcaaaccaatgaacctgatcggcgtggcaagaggcgaaaacatccccgccgtgatcgccctgaccgaccccgagggctgcccactgagccggtttaaggatagcctgggaaacccaacccacatcctgagaatcggcgagagctataaggagaagcagcggaccatccaggccaagaaggaggtggagcagcggagagccggcggctacagccggaagtacgccagcaaagccaagaatctggcagacgatatggtgagaaacaccgctagagatctgctgtactacgccgtgacccaggatgccatgctgatcttcgccaacctgagccggggcttcggccggcagggcaagcggaccttcatggccgagagacagtacacacggatggaggactggctgaccgccaagctggcctacgagggcctgagcaagacctacctgtccaagacactggcccagtacacctccaagacatgcagcaactgtgggtttaccatcaccagcgccgactacgacagggtgctggagaagctgaagaagacagcaacaggctggatgaccacaattaacggcaaggagctgaaggtggagggccagattacctactacaacagatacaagagacagaacgtagtcaaggacctgtccgtcgagctggatagactgagcgaagaatctgtgaacaacgacatctcctcctggacaaagggcagaagcggagaagctctgagcctcctgaagaaaagattctcccatagacccgtgcaggagaagttcgtgtgcctgaactgcggcttcgagacacacgcagccgagcaagccgccctgaacatcgccagatcctggctgttcctgcggagccaggagtacaagaaataccagacaaacaagacaaccggcaacaccgataagagagccttcgtcgagacctggcagtccttttaccggaagaagcttaaggaggtgtggaaacctgccgtgcggtctggcggatctggcggaggctcctgcccaggcccccctgagcttcgaggacgtggccgtgagcttcagcagggaggagtggaggctgctggtgcccgcccagaaggacctgtacagggacgtgatgctggagaactacaggaacctggtgagcgtgggctaccaggccagcgagcccggcagcctgttccagctggagcacgccggccccctgagggccgtggagggcgccgcccccaggcccccctgccccgaggagatctgggagggatctggctccggcagcggccccaagaaaaagagaaaagtctaagctgccttctgcggggcttgccttctggccatgcccttcttctctcccttgcacctgtacctcttggtctttgaataaagcctgagtaggaaggctagcaaaaaaaaaaaaaaaaaaaaaaaaaaaaaaaaaaaaaaaaaaaaaaaaaaaaaaaaaaaaaaaaaaaaaaaaaaaaaaaa

SEQ ID NO: 15692 - RNA, 9485 nt, synthetic construct
  source 1..9485: mol_type = other RNA
aggaaataagagagaaaagaagagtaagaagaaatataagagccaccatggcccctaagaagaagcgtaaagtgagccggatggaacgcctcgtctacgaggtgcggcagaagtgcagaaacatcgaggacatctgcatctcctgcggatctctgaacgtgaccctggagcacccactgttcatcggcggcatgtgccagaactgtaaaaactgttttctggagtgtgcctatcaatacgacgatgacggctaccagagctactgcaccatctgttgcggcggaagagaggtgctgatgtgtggaaataacaactgctgccggtgcttctgcgtggaatgcgtggacctgctggtgggccccggcgccgcccaggccgctattaaggaagatccttggaactgctacatgtgcggccacaagggcacatacggcctgctgagacggagagaggactggcctagcagactgcagatgttcttcgccaataaccacgaccaggagttcgacccccctaaggtgtaccctcccgtccccgccgagaagagaaagcccatccgggtcctgagcctgttcgatggcatcgccaccggtctgctggtgctgaaggacctgggcatccaggtggataggtacattgcctccgaggtgtgcgaggactccatcaccgtgggaatggtgcgtcatcagggcaagatcatgtacgtgggcgacgtgcggagcgtgacacagaagcatatccaggagtggggccctttcgacctggtgatcggcggcagcccttgcaatgacctgagcatcgtgaacccagcccggaagggcctgtacgagggaaccggcagactgttcttcgagttttacagactgctgcacgacgcccggcctaaggaaggcgacgaccggcccttcttttggctgttcgagaatgtggtggccatgggagtcagcgacaagcgggatattagccggttcctggagagcaaccccgtgatgatcgatgccaaggaagtgagcgccgcccaccgggccagatacttctggggcaatctgcctggcatgaacagacccctggccagcaccgtgaacgacaagctggagctgcaggagtgcctggagcacggccggatcgccaagttcagcaaggtgagaaccatcaccacccgaagcaacagcatcaaacaaggcaaggaccagcactttcctgtgttcatgaacgagaaggaggacatcctgtggtgtaccgagatggagagagtgttcgggttcccagtccactacacagatgtcagcaacatgtctagactggccagacagagactgctgggaagaagctggtccgtccctgtgatcagacacctgttcgcccctctgaaggagtacttcgcctgcgtgagcagcggcaacagcaacgccaacagccggggccccagcttctctagcggcctggtgccactgtccctgagagggagccacatgggccccatggagatctacaaaaccgtgagcgcctggaagcggcagcctgtgcgcgtgctgagcctgtttcggaatatcgataaagtcctgaaaagcctgggattcctggagagcggctctggctccggcggtggcaccctgaagtacgtggaggatgtgacaaacgtggtcagacgggatgtggagaagtggggccccttcgatctggtgtacggcagcacccaacccctgggcagctcttgtgaccggtgccctggctggtacatgtttcagttccaccggatcctgcagtacgccctgccgagacaggagtcccagcggccattcttttggattttcatggacaacttgctgctgaccgaggatgaccaggaaactaccactcggttcctgcagaccgaagccgtgaccctgcaggacgtgagaggccgggactaccagaacgccatgcgggtgtggtccaacatccctggactgaaaagcaagcacgcacctctgacccctaaagaagaggagtacctgcaggcccaggtgcggagcagaagcaagctggacgcccctaaggtggatctgctggtgaagaattgcctcctgcccctgagagagtacttcaagtatttcagccagaatagtctgcccctgggaggcagcggcggcggcgccctggtgacatttgaggacgtcgccgtgcggttcacccaggaggaatgggctctgctggatccttctcagaaaatcctgtaccgggacgtgatgagagagacataccggaatctgacctccgtgggcatcaactgggaatgttgggaccttgaagcctgcttcagaagcctgggaagaaacctgagagtgcaggtggtgaagagaaagtgcgagctgaccaacagcggcccctgcgccgagggcggcccaagcagcggcgcccctcctcccagcggcggcagcccagccggctccccaacctctaccgaggagggcacctctgagtccgccacccccgagagcggccctggcacctccaccgagcccagcgagggcagcgcacccggcagccctgccggcagccccacctccacagaggagggaaccagcaccgagcccagcgaaggcagcgccccaggcaccagcaccgagcctagtgagcaggagattaaacggatcaacaagatcagaagaagacttgtgaaagacagcaacaccaagaaggccggcaagacaggccccatgaaaaccctgctggttagagtgatgacacccgatctgagagagcggctggaaaacctgagaaagaagcctgaaaatatcccccagcccatcagcaatacatctagagccaacctgaataagctgctgaccgattacaccgaaatgaagaaggcgatcctgcatgtgtactgggaagagttccagaaggaccctgtgggcctgatgagccgggtggcccagcctgccagcaagaagatcgatcagaacaagctgaaacctgagatggacgagaagggcaacctgaccaccgccggctttgcctgctctcagtgtggccagcccctgttcgtgtacaagctggagcaggtgtctgagaagggcaaggcttacaccaactacttcggacggtgcaatgtggccgagcacgaaaagctgatcctgctggcccagctgaagcccgagaaggatagcgacgaagccgtgacatatagcctgggaaagtttgggcagagggccctggatttctacagcattcatgtgaccaaggagtccacccaccccgtgaagcccctggcccagatcgccggaaacagatacgcctccggacctgtgggaaaggccctgagcgacgcatgtatgggcacaatcgcctccttcctgtctaagtaccaggacatcatcatcgaacaccagaaggtggtgaagggcaaccagaagagactggagagcctgcgggagctggccggcaaggaaaacctggaataccctagcgtgaccctgccacctcagcctcacaccaaggagggcgttgatgcctacaacgaagtgatcgcccgggtgcgaatgtgggtgaacctgaacctgtggcagaagctgaagctaagcagagatgatgccaagcctctgctgagactgaagggattcccttcctttcctctggtcgagagacaggccaacgaagtggactggtgggacatggtgtgtaacgtgaagaagctgatcaacgagaaaaaggaggatggcaaggtgttttggcagaatctggctggctacaagagacaggaagccctgagaccatacctgagcagcgaggaagatcggaagaagggaaagaaattcgctcggtaccagctgggcgacctgctgctgcacctggaaaagaagcacggcgaggactggggaaaggtgtacgacgaggcctgggagcggattgacaagaaagtggaaggcctgagcaagcacatcaagctggaagaggaacggagaagcgaggacgcccagagcaaggccgccctgaccgactggctgcgggctaaggccagcttcgtgatcgagggcctgaaggaggccgacaaggacgagttctgcagatgcgagctgaagctgcagaagtggtacggggacctgcggggaaagcccttcgccatcgaagccgagaacagcatcctggacatcagcggcttcagcaagcagtacaactgtgccttcatctggcagaaggacggcgtgaagaagctgaacctgtacctgatcatcaactacttcaagggcggcaagctgcggttcaagaagatcaaacctgaagccttcgaagccaacagattctacaccgtgatcaacaaaaagagcggcgagatcgtgcccatggaggtgaacttcaacttcgacgaccccaacctgatcatcctgcctctggcctttggcaagagacagggcagagaattcatctggaacgacctgctgtccctggaaaccggcagcctgaagctggccaacggaagagtgatcgagaagacactgtacaacagaagaacccggcaggatgagcctgccctgttcgtggccctgaccttcgagcggcgggaggtcctggactcctccaatatcaaaccaatgaacctgatcggcgtggcaagaggcgaaaacatccccgccgtgatcgccctgaccgaccccgagggctgcccactgagccggtttaaggatagcctgggaaacccaacccacatcctgagaatcggcgagagctataaggagaagcagcggaccatccaggccaagaaggaggtggagcagcggagagccggcggctacagccggaagtacgccagcaaagccaagaatctggcagacgatatggtgagaaacaccgctagagatctgctgtactacgccgtgacccaggatgccatgctgatcttcgccaacctgagccggggcttcggccggcagggcaagcggaccttcatggccgagagacagtacacacggatggaggactggctgaccgccaagctggcctacgagggcctgagcaagacctacctgtccaagacactggcccagtacacctccaagacatgcagcaactgtgggtttaccatcaccagcgccgactacgacagggtgctggagaagctgaagaagacagcaacaggctggatgaccacaattaacggcaaggagctgaaggtggagggccagattacctactacaacagatacaagagacagaacgtagtcaaggacctgtccgtcgagctggatagactgagcgaagaatctgtgaacaacgacatctcctcctggacaaagggcagaagcggagaagctctgagcctcctgaagaaaagattctcccatagacccgtgcaggagaagttcgtgtgcctgaactgcggcttcgagacacacgcagccgagcaagccgccctgaacatcgccagatcctggctgttcctgcggagccaggagtacaagaaataccagacaaacaagacaaccggcaacaccgataagagagccttcgtcgagacctggcagtccttttaccggaagaagcttaaggaggtgtggaaacctgccgtgcggtctggcggatctggcggaggctccccccaggagcccgtgaccttcgccgacgtggccgtgctgttcacccccgaggagtggctgttcctggacagcgcccagaagagcctgtacagggacgtgatgctggagaactacaggaacctggccagcgtgggcgaccagctgtgcaagaccaagatgagcagccacatggagcagagggaggagctgtgcgtgaccgagaggggcgtgttccccggcgcccacctgggcccccacctgcagggcggcccaagcagcggcgcccctcctcccagcggcggcagcccagccggctccccaacctctaccgaggagggcacctctgagtccgccacccccgagagcggccctggcacctccaccgagcccagcgagggcagcgcacccggcagccctgccggcagccccacctccacagaggagggaaccagcaccgagcccagcgaaggcagcgccccaggcaccagcaccgagcctagtgagcaggagattaaacggatcaacaagatcagaagaagacttgtgaaagacagcaacaccaagaaggccggcaagacaggccccatgaaaaccctgctggttagagtgatgacacccgatctgagagagcggctggaaaacctgagaaagaagcctgaaaatatcccccagcccatcagcaatacatctagagccaacctgaataagctgctgaccgattacaccgaaatgaagaaggcgatcctgcatgtgtactgggaagagttccagaaggaccctgtgggcctgatgagccgggtggcccagcctgccagcaagaagatcgatcagaacaagctgaaacctgagatggacgagaagggcaacctgaccaccgccggctttgcctgctctcagtgtggccagcccctgttcgtgtacaagctggagcaggtgtctgagaagggcaaggcttacaccaactacttcggacggtgcaatgtggccgagcacgaaaagctgatcctgctggcccagctgaagcccgagaaggatagcgacgaagccgtgacatatagcctgggaaagtttgggcagagggccctggatttctacagcattcatgtgaccaaggagtccacccaccccgtgaagcccctggcccagatcgccggaaacagatacgcctccggacctgtgggaaaggccctgagcgacgcatgtatgggcacaatcgcctccttcctgtctaagtaccaggacatcatcatcgaacaccagaaggtggtgaagggcaaccagaagagactggagagcctgcgggagctggccggcaaggaaaacctggaataccctagcgtgaccctgccacctcagcctcacaccaaggagggcgttgatgcctacaacgaagtgatcgcccgggtgcgaatgtgggtgaacctgaacctgtggcagaagctgaagctaagcagagatgatgccaagcctctgctgagactgaagggattcccttcctttcctctggtcgagagacaggccaacgaagtggactggtgggacatggtgtgtaacgtgaagaagctgatcaacgagaaaaaggaggatggcaaggtgttttggcagaatctggctggctacaagagacaggaagccctgagaccatacctgagcagcgaggaagatcggaagaagggaaagaaattcgctcggtaccagctgggcgacctgctgctgcacctggaaaagaagcacggcgaggactggggaaaggtgtacgacgaggcctgggagcggattgacaagaaagtggaaggcctgagcaagcacatcaagctggaagaggaacggagaagcgaggacgcccagagcaaggccgccctgaccgactggctgcgggctaaggccagcttcgtgatcgagggcctgaaggaggccgacaaggacgagttctgcagatgcgagctgaagctgcagaagtggtacggggacctgcggggaaagcccttcgccatcgaagccgagaacagcatcctggacatcagcggcttcagcaagcagtacaactgtgccttcatctggcagaaggacggcgtgaagaagctgaacctgtacctgatcatcaactacttcaagggcggcaagctgcggttcaagaagatcaaacctgaagccttcgaagccaacagattctacaccgtgatcaacaaaaagagcggcgagatcgtgcccatggaggtgaacttcaacttcgacgaccccaacctgatcatcctgcctctggcctttggcaagagacagggcagagaattcatctggaacgacctgctgtccctggaaaccggcagcctgaagctggccaacggaagagtgatcgagaagacactgtacaacagaagaacccggcaggatgagcctgccctgttcgtggccctgaccttcgagcggcgggaggtcctggactcctccaatatcaaaccaatgaacctgatcggcgtggcaagaggcgaaaacatccccgccgtgatcgccctgaccgaccccgagggctgcccactgagccggtttaaggatagcctgggaaacccaacccacatcctgagaatcggcgagagctataaggagaagcagcggaccatccaggccaagaaggaggtggagcagcggagagccggcggctacagccggaagtacgccagcaaagccaagaatctggcagacgatatggtgagaaacaccgctagagatctgctgtactacgccgtgacccaggatgccatgctgatcttcgccaacctgagccggggcttcggccggcagggcaagcggaccttcatggccgagagacagtacacacggatggaggactggctgaccgccaagctggcctacgagggcctgagcaagacctacctgtccaagacactggcccagtacacctccaagacatgcagcaactgtgggtttaccatcaccagcgccgactacgacagggtgctggagaagctgaagaagacagcaacaggctggatgaccacaattaacggcaaggagctgaaggtggagggccagattacctactacaacagatacaagagacagaacgtagtcaaggacctgtccgtcgagctggatagactgagcgaagaatctgtgaacaacgacatctcctcctggacaaagggcagaagcggagaagctctgagcctcctgaagaaaagattctcccatagacccgtgcaggagaagttcgtgtgcctgaactgcggcttcgagacacacgcagccgagcaagccgccctgaacatcgccagatcctggctgttcctgcggagccaggagtacaagaaataccagacaaacaagacaaccggcaacaccgataagagagccttcgtcgagacctggcagtccttttaccggaagaagcttaaggaggtgtggaaacctgccgtgcggtctggcggatctggcggaggctcctccccaggagcccgtgaccttcgccgacgtggccgtgctgttcacccccgaggagtggctgttcctggacagcgcccagaagagcctgtacagggacgtgatgctggagaactacaggaacctggccagcgtgggcgaccagctgtgcaagaccaagatgagcagccacatggagcagagggaggagctgtgcgtgaccgagaggggcgtgttccccggcgcccacctgggcccccacctgcagggatctggctccggcagcggccccaagaaaaagagaaaagtctaagctgccttctgcggggcttgccttctggccatgcccttcttctctcccttgcacctgtacctcttggtctttgaataaagcctgagtaggaaggctagcaaaaaaaaaaaaaaaaaaaaaaaaaaaaaaaaaaaaaaaaaaaaaaaaaaaaaaaaaaaaaaaaaaaaaaaaaaaaaaaa

SEQ ID NO: 15693 - RNA, 9485 nt, synthetic construct
  source 1..9485: mol_type = other RNA
aggaaataagagagaaaagaagagtaagaagaaatataagagccaccatggcccctaagaagaagcgtaaagtgagccggatggaacgcctcgtctacgaggtgcggcagaagtgcagaaacatcgaggacatctgcatctcctgcggatctctgaacgtgaccctggagcacccactgttcatcggcggcatgtgccagaactgtaaaaactgttttctggagtgtgcctatcaatacgacgatgacggctaccagagctactgcaccatctgttgcggcggaagagaggtgctgatgtgtggaaataacaactgctgccggtgcttctgcgtggaatgcgtggacctgctggtgggccccggcgccgcccaggccgctattaaggaagatccttggaactgctacatgtgcggccacaagggcacatacggcctgctgagacggagagaggactggcctagcagactgcagatgttcttcgccaataaccacgaccaggagttcgacccccctaaggtgtaccctcccgtccccgccgagaagagaaagcccatccgggtcctgagcctgttcgatggcatcgccaccggtctgctggtgctgaaggacctgggcatccaggtggataggtacattgcctccgaggtgtgcgaggactccatcaccgtgggaatggtgcgtcatcagggcaagatcatgtacgtgggcgacgtgcggagcgtgacacagaagcatatccaggagtggggccctttcgacctggtgatcggcggcagcccttgcaatgacctgagcatcgtgaacccagcccggaagggcctgtacgagggaaccggcagactgttcttcgagttttacagactgctgcacgacgcccggcctaaggaaggcgacgaccggcccttcttttggctgttcgagaatgtggtggccatgggagtcagcgacaagcgggatattagccggttcctggagagcaaccccgtgatgatcgatgccaaggaagtgagcgccgcccaccgggccagatacttctggggcaatctgcctggcatgaacagacccctggccagcaccgtgaacgacaagctggagctgcaggagtgcctggagcacggccggatcgccaagttcagcaaggtgagaaccatcaccacccgaagcaacagcatcaaacaaggcaaggaccagcactttcctgtgttcatgaacgagaaggaggacatcctgtggtgtaccgagatggagagagtgttcgggttcccagtccactacacagatgtcagcaacatgtctagactggccagacagagactgctgggaagaagctggtccgtccctgtgatcagacacctgttcgcccctctgaaggagtacttcgcctgcgtgagcagcggcaacagcaacgccaacagccggggccccagcttctctagcggcctggtgccactgtccctgagagggagccacatgggccccatggagatctacaaaaccgtgagcgcctggaagcggcagcctgtgcgcgtgctgagcctgtttcggaatatcgataaagtcctgaaaagcctgggattcctggagagcggctctggctccggcggtggcaccctgaagtacgtggaggatgtgacaaacgtggtcagacgggatgtggagaagtggggccccttcgatctggtgtacggcagcacccaacccctgggcagctcttgtgaccggtgccctggctggtacatgtttcagttccaccggatcctgcagtacgccctgccgagacaggagtcccagcggccattcttttggattttcatggacaacttgctgctgaccgaggatgaccaggaaactaccactcggttcctgcagaccgaagccgtgaccctgcaggacgtgagaggccgggactaccagaacgccatgcgggtgtggtccaacatccctggactgaaaagcaagcacgcacctctgacccctaaagaagaggagtacctgcaggcccaggtgcggagcagaagcaagctggacgcccctaaggtggatctgctggtgaagaattgcctcctgcccctgagagagtacttcaagtatttcagccagaatagtctgcccctgggaggcagcggcggcggcgccctggtgacatttgaggacgtcgccgtgcggttcacccaggaggaatgggctctgctggatccttctcagaaaatcctgtaccgggacgtgatgagagagacataccggaatctgacctccgtgggcatcaactgggaatgttgggaccttgaagcctgcttcagaagcctgggaagaaacctgagagtgcaggtggtgaagagaaagtgcgagctgaccaacagcggcccctgcgccgagggcggcccaagcagcggcgcccctcctcccagcggcggcagcccagccggctccccaacctctaccgaggagggcacctctgagtccgccacccccgagagcggccctggcacctccaccgagcccagcgagggcagcgcacccggcagccctgccggcagccccacctccacagaggagggaaccagcaccgagcccagcgaaggcagcgccccaggcaccagcaccgagcctagtgagcaggagattaaacggatcaacaagatcagaagaagacttgtgaaagacagcaacaccaagaaggccggcaagacaggccccatgaaaaccctgctggttagagtgatgacacccgatctgagagagcggctggaaaacctgagaaagaagcctgaaaatatcccccagcccatcagcaatacatctagagccaacctgaataagctgctgaccgattacaccgaaatgaagaaggcgatcctgcatgtgtactgggaagagttccagaaggaccctgtgggcctgatgagccgggtggcccagcctgccagcaagaagatcgatcagaacaagctgaaacctgagatggacgagaagggcaacctgaccaccgccggctttgcctgctctcagtgtggccagcccctgttcgtgtacaagctggagcaggtgtctgagaagggcaaggcttacaccaactacttcggacggtgcaatgtggccgagcacgaaaagctgatcctgctggcccagctgaagcccgagaaggatagcgacgaagccgtgacatatagcctgggaaagtttgggcagagggccctggatttctacagcattcatgtgaccaaggagtccacccaccccgtgaagcccctggcccagatcgccggaaacagatacgcctccggacctgtgggaaaggccctgagcgacgcatgtatgggcacaatcgcctccttcctgtctaagtaccaggacatcatcatcgaacaccagaaggtggtgaagggcaaccagaagagactggagagcctgcgggagctggccggcaaggaaaacctggaataccctagcgtgaccctgccacctcagcctcacaccaaggagggcgttgatgcctacaacgaagtgatcgcccgggtgcgaatgtgggtgaacctgaacctgtggcagaagctgaagctaagcagagatgatgccaagcctctgctgagactgaagggattcccttcctttcctctggtcgagagacaggccaacgaagtggactggtgggacatggtgtgtaacgtgaagaagctgatcaacgagaaaaaggaggatggcaaggtgttttggcagaatctggctggctacaagagacaggaagccctgagaccatacctgagcagcgaggaagatcggaagaagggaaagaaattcgctcggtaccagctgggcgacctgctgctgcacctggaaaagaagcacggcgaggactggggaaaggtgtacgacgaggcctgggagcggattgacaagaaagtggaaggcctgagcaagcacatcaagctggaagaggaacggagaagcgaggacgcccagagcaaggccgccctgaccgactggctgcgggctaaggccagcttcgtgatcgagggcctgaaggaggccgacaaggacgagttctgcagatgcgagctgaagctgcagaagtggtacggggacctgcggggaaagcccttcgccatcgaagccgagaacagcatcctggacatcagcggcttcagcaagcagtacaactgtgccttcatctggcagaaggacggcgtgaagaagctgaacctgtacctgatcatcaactacttcaagggcggcaagctgcggttcaagaagatcaaacctgaagccttcgaagccaacagattctacaccgtgatcaacaaaaagagcggcgagatcgtgcccatggaggtgaacttcaacttcgacgaccccaacctgatcatcctgcctctggcctttggcaagagacagggcagagaattcatctggaacgacctgctgtccctggaaaccggcagcctgaagctggccaacggaagagtgatcgagaagacactgtacaacagaagaacccggcaggatgagcctgccctgttcgtggccctgaccttcgagcggcgggaggtcctggactcctccaatatcaaaccaatgaacctgatcggcgtggcaagaggcgaaaacatccccgccgtgatcgccctgaccgaccccgagggctgcccactgagccggtttaaggatagcctgggaaacccaacccacatcctgagaatcggcgagagctataaggagaagcagcggaccatccaggccaagaaggaggtggagcagcggagagccggcggctacagccggaagtacgccagcaaagccaagaatctggcagacgatatggtgagaaacaccgctagagatctgctgtactacgccgtgacccaggatgccatgctgatcttcgccaacctgagccggggcttcggccggcagggcaagcggaccttcatggccgagagacagtacacacggatggaggactggctgaccgccaagctggcctacgagggcctgagcaagacctacctgtccaagacactggcccagtacacctccaagacatgcagcaactgtgggtttaccatcaccagcgccgactacgacagggtgctggagaagctgaagaagacagcaacaggctggatgaccacaattaacggcaaggagctgaaggtggagggccagattacctactacaacagatacaagagacagaacgtagtcaaggacctgtccgtcgagctggatagactgagcgaagaatctgtgaacaacgacatctcctcctggacaaagggcagaagcggagaagctctgagcctcctgaagaaaagattctcccatagacccgtgcaggagaagttcgtgtgcctgaactgcggcttcgagacacacgcagccgagcaagccgccctgaacatcgccagatcctggctgttcctgcggagccaggagtacaagaaataccagacaaacaagacaaccggcaacaccgataagagagccttcgtcgagacctggcagtccttttaccggaagaagcttaaggaggtgtggaaacctgccgtgcggtctggcggatctggcggaggctccatggccttcgaggacgtggccgtgtacttcagccaggaggagtggggcctgctggacaccgcccagagggccctgtacaggcacgtgatgctggagaacttcaccctggtgagcagcctgggcctgagcaccagcaggcccagggtggtggtgcagctggagaggggcgaggagccctgggtgcccagcaggatcgacagcacccccgccaggaacgcccagggcaggaggaaccccggcagcggcggcccaagcagcggcgcccctcctcccagcggcggcagcccagccggctccccaacctctaccgaggagggcacctctgagtccgccacccccgagagcggccctggcacctccaccgagcccagcgagggcagcgcacccggcagccctgccggcagccccacctccacagaggagggaaccagcaccgagcccagcgaaggcagcgccccaggcaccagcaccgagcctagtgagcaggagattaaacggatcaacaagatcagaagaagacttgtgaaagacagcaacaccaagaaggccggcaagacaggccccatgaaaaccctgctggttagagtgatgacacccgatctgagagagcggctggaaaacctgagaaagaagcctgaaaatatcccccagcccatcagcaatacatctagagccaacctgaataagctgctgaccgattacaccgaaatgaagaaggcgatcctgcatgtgtactgggaagagttccagaaggaccctgtgggcctgatgagccgggtggcccagcctgccagcaagaagatcgatcagaacaagctgaaacctgagatggacgagaagggcaacctgaccaccgccggctttgcctgctctcagtgtggccagcccctgttcgtgtacaagctggagcaggtgtctgagaagggcaaggcttacaccaactacttcggacggtgcaatgtggccgagcacgaaaagctgatcctgctggcccagctgaagcccgagaaggatagcgacgaagccgtgacatatagcctgggaaagtttgggcagagggccctggatttctacagcattcatgtgaccaaggagtccacccaccccgtgaagcccctggcccagatcgccggaaacagatacgcctccggacctgtgggaaaggccctgagcgacgcatgtatgggcacaatcgcctccttcctgtctaagtaccaggacatcatcatcgaacaccagaaggtggtgaagggcaaccagaagagactggagagcctgcgggagctggccggcaaggaaaacctggaataccctagcgtgaccctgccacctcagcctcacaccaaggagggcgttgatgcctacaacgaagtgatcgcccgggtgcgaatgtgggtgaacctgaacctgtggcagaagctgaagctaagcagagatgatgccaagcctctgctgagactgaagggattcccttcctttcctctggtcgagagacaggccaacgaagtggactggtgggacatggtgtgtaacgtgaagaagctgatcaacgagaaaaaggaggatggcaaggtgttttggcagaatctggctggctacaagagacaggaagccctgagaccatacctgagcagcgaggaagatcggaagaagggaaagaaattcgctcggtaccagctgggcgacctgctgctgcacctggaaaagaagcacggcgaggactggggaaaggtgtacgacgaggcctgggagcggattgacaagaaagtggaaggcctgagcaagcacatcaagctggaagaggaacggagaagcgaggacgcccagagcaaggccgccctgaccgactggctgcgggctaaggccagcttcgtgatcgagggcctgaaggaggccgacaaggacgagttctgcagatgcgagctgaagctgcagaagtggtacggggacctgcggggaaagcccttcgccatcgaagccgagaacagcatcctggacatcagcggcttcagcaagcagtacaactgtgccttcatctggcagaaggacggcgtgaagaagctgaacctgtacctgatcatcaactacttcaagggcggcaagctgcggttcaagaagatcaaacctgaagccttcgaagccaacagattctacaccgtgatcaacaaaaagagcggcgagatcgtgcccatggaggtgaacttcaacttcgacgaccccaacctgatcatcctgcctctggcctttggcaagagacagggcagagaattcatctggaacgacctgctgtccctggaaaccggcagcctgaagctggccaacggaagagtgatcgagaagacactgtacaacagaagaacccggcaggatgagcctgccctgttcgtggccctgaccttcgagcggcgggaggtcctggactcctccaatatcaaaccaatgaacctgatcggcgtggcaagaggcgaaaacatccccgccgtgatcgccctgaccgaccccgagggctgcccactgagccggtttaaggatagcctgggaaacccaacccacatcctgagaatcggcgagagctataaggagaagcagcggaccatccaggccaagaaggaggtggagcagcggagagccggcggctacagccggaagtacgccagcaaagccaagaatctggcagacgatatggtgagaaacaccgctagagatctgctgtactacgccgtgacccaggatgccatgctgatcttcgccaacctgagccggggcttcggccggcagggcaagcggaccttcatggccgagagacagtacacacggatggaggactggctgaccgccaagctggcctacgagggcctgagcaagacctacctgtccaagacactggcccagtacacctccaagacatgcagcaactgtgggtttaccatcaccagcgccgactacgacagggtgctggagaagctgaagaagacagcaacaggctggatgaccacaattaacggcaaggagctgaaggtggagggccagattacctactacaacagatacaagagacagaacgtagtcaaggacctgtccgtcgagctggatagactgagcgaagaatctgtgaacaacgacatctcctcctggacaaagggcagaagcggagaagctctgagcctcctgaagaaaagattctcccatagacccgtgcaggagaagttcgtgtgcctgaactgcggcttcgagacacacgcagccgagcaagccgccctgaacatcgccagatcctggctgttcctgcggagccaggagtacaagaaataccagacaaacaagacaaccggcaacaccgataagagagccttcgtcgagacctggcagtccttttaccggaagaagcttaaggaggtgtggaaacctgccgtgcggtctggcggatctggcggaggctcctatggccttcgaggacgtggccgtgtacttcagccaggaggagtggggcctgctggacaccgcccagagggccctgtacaggcacgtgatgctggagaacttcaccctggtgagcagcctgggcctgagcaccagcaggcccagggtggtggtgcagctggagaggggcgaggagccctgggtgcccagcaggatcgacagcacccccgccaggaacgcccagggcaggaggaaccccggcagcggatctggctccggcagcggccccaagaaaaagagaaaagtctaagctgccttctgcggggcttgccttctggccatgcccttcttctctcccttgcacctgtacctcttggtctttgaataaagcctgagtaggaaggctagcaaaaaaaaaaaaaaaaaaaaaaaaaaaaaaaaaaaaaaaaaaaaaaaaaaaaaaaaaaaaaaaaaaaaaaaaaaaaaaaa

SEQ ID NO: 15694 - RNA, 9485 nt, synthetic construct
  source 1..9485: mol_type = other RNA
aggaaataagagagaaaagaagagtaagaagaaatataagagccaccatggcccctaagaagaagcgtaaagtgagccggatggaacgcctcgtctacgaggtgcggcagaagtgcagaaacatcgaggacatctgcatctcctgcggatctctgaacgtgaccctggagcacccactgttcatcggcggcatgtgccagaactgtaaaaactgttttctggagtgtgcctatcaatacgacgatgacggctaccagagctactgcaccatctgttgcggcggaagagaggtgctgatgtgtggaaataacaactgctgccggtgcttctgcgtggaatgcgtggacctgctggtgggccccggcgccgcccaggccgctattaaggaagatccttggaactgctacatgtgcggccacaagggcacatacggcctgctgagacggagagaggactggcctagcagactgcagatgttcttcgccaataaccacgaccaggagttcgacccccctaaggtgtaccctcccgtccccgccgagaagagaaagcccatccgggtcctgagcctgttcgatggcatcgccaccggtctgctggtgctgaaggacctgggcatccaggtggataggtacattgcctccgaggtgtgcgaggactccatcaccgtgggaatggtgcgtcatcagggcaagatcatgtacgtgggcgacgtgcggagcgtgacacagaagcatatccaggagtggggccctttcgacctggtgatcggcggcagcccttgcaatgacctgagcatcgtgaacccagcccggaagggcctgtacgagggaaccggcagactgttcttcgagttttacagactgctgcacgacgcccggcctaaggaaggcgacgaccggcccttcttttggctgttcgagaatgtggtggccatgggagtcagcgacaagcgggatattagccggttcctggagagcaaccccgtgatgatcgatgccaaggaagtgagcgccgcccaccgggccagatacttctggggcaatctgcctggcatgaacagacccctggccagcaccgtgaacgacaagctggagctgcaggagtgcctggagcacggccggatcgccaagttcagcaaggtgagaaccatcaccacccgaagcaacagcatcaaacaaggcaaggaccagcactttcctgtgttcatgaacgagaaggaggacatcctgtggtgtaccgagatggagagagtgttcgggttcccagtccactacacagatgtcagcaacatgtctagactggccagacagagactgctgggaagaagctggtccgtccctgtgatcagacacctgttcgcccctctgaaggagtacttcgcctgcgtgagcagcggcaacagcaacgccaacagccggggccccagcttctctagcggcctggtgccactgtccctgagagggagccacatgggccccatggagatctacaaaaccgtgagcgcctggaagcggcagcctgtgcgcgtgctgagcctgtttcggaatatcgataaagtcctgaaaagcctgggattcctggagagcggctctggctccggcggtggcaccctgaagtacgtggaggatgtgacaaacgtggtcagacgggatgtggagaagtggggccccttcgatctggtgtacggcagcacccaacccctgggcagctcttgtgaccggtgccctggctggtacatgtttcagttccaccggatcctgcagtacgccctgccgagacaggagtcccagcggccattcttttggattttcatggacaacttgctgctgaccgaggatgaccaggaaactaccactcggttcctgcagaccgaagccgtgaccctgcaggacgtgagaggccgggactaccagaacgccatgcgggtgtggtccaacatccctggactgaaaagcaagcacgcacctctgacccctaaagaagaggagtacctgcaggcccaggtgcggagcagaagcaagctggacgcccctaaggtggatctgctggtgaagaattgcctcctgcccctgagagagtacttcaagtatttcagccagaatagtctgcccctgggaggcagcggcggcggcgccctggtgacatttgaggacgtcgccgtgcggttcacccaggaggaatgggctctgctggatccttctcagaaaatcctgtaccgggacgtgatgagagagacataccggaatctgacctccgtgggcatcaactgggaatgttgggaccttgaagcctgcttcagaagcctgggaagaaacctgagagtgcaggtggtgaagagaaagtgcgagctgaccaacagcggcccctgcgccgagggcggcccaagcagcggcgcccctcctcccagcggcggcagcccagccggctccccaacctctaccgaggagggcacctctgagtccgccacccccgagagcggccctggcacctccaccgagcccagcgagggcagcgcacccggcagccctgccggcagccccacctccacagaggagggaaccagcaccgagcccagcgaaggcagcgccccaggcaccagcaccgagcctagtgagcaggagattaaacggatcaacaagatcagaagaagacttgtgaaagacagcaacaccaagaaggccggcaagacaggccccatgaaaaccctgctggttagagtgatgacacccgatctgagagagcggctggaaaacctgagaaagaagcctgaaaatatcccccagcccatcagcaatacatctagagccaacctgaataagctgctgaccgattacaccgaaatgaagaaggcgatcctgcatgtgtactgggaagagttccagaaggaccctgtgggcctgatgagccgggtggcccagcctgccagcaagaagatcgatcagaacaagctgaaacctgagatggacgagaagggcaacctgaccaccgccggctttgcctgctctcagtgtggccagcccctgttcgtgtacaagctggagcaggtgtctgagaagggcaaggcttacaccaactacttcggacggtgcaatgtggccgagcacgaaaagctgatcctgctggcccagctgaagcccgagaaggatagcgacgaagccgtgacatatagcctgggaaagtttgggcagagggccctggatttctacagcattcatgtgaccaaggagtccacccaccccgtgaagcccctggcccagatcgccggaaacagatacgcctccggacctgtgggaaaggccctgagcgacgcatgtatgggcacaatcgcctccttcctgtctaagtaccaggacatcatcatcgaacaccagaaggtggtgaagggcaaccagaagagactggagagcctgcgggagctggccggcaaggaaaacctggaataccctagcgtgaccctgccacctcagcctcacaccaaggagggcgttgatgcctacaacgaagtgatcgcccgggtgcgaatgtgggtgaacctgaacctgtggcagaagctgaagctaagcagagatgatgccaagcctctgctgagactgaagggattcccttcctttcctctggtcgagagacaggccaacgaagtggactggtgggacatggtgtgtaacgtgaagaagctgatcaacgagaaaaaggaggatggcaaggtgttttggcagaatctggctggctacaagagacaggaagccctgagaccatacctgagcagcgaggaagatcggaagaagggaaagaaattcgctcggtaccagctgggcgacctgctgctgcacctggaaaagaagcacggcgaggactggggaaaggtgtacgacgaggcctgggagcggattgacaagaaagtggaaggcctgagcaagcacatcaagctggaagaggaacggagaagcgaggacgcccagagcaaggccgccctgaccgactggctgcgggctaaggccagcttcgtgatcgagggcctgaaggaggccgacaaggacgagttctgcagatgcgagctgaagctgcagaagtggtacggggacctgcggggaaagcccttcgccatcgaagccgagaacagcatcctggacatcagcggcttcagcaagcagtacaactgtgccttcatctggcagaaggacggcgtgaagaagctgaacctgtacctgatcatcaactacttcaagggcggcaagctgcggttcaagaagatcaaacctgaagccttcgaagccaacagattctacaccgtgatcaacaaaaagagcggcgagatcgtgcccatggaggtgaacttcaacttcgacgaccccaacctgatcatcctgcctctggcctttggcaagagacagggcagagaattcatctggaacgacctgctgtccctggaaaccggcagcctgaagctggccaacggaagagtgatcgagaagacactgtacaacagaagaacccggcaggatgagcctgccctgttcgtggccctgaccttcgagcggcgggaggtcctggactcctccaatatcaaaccaatgaacctgatcggcgtggcaagaggcgaaaacatccccgccgtgatcgccctgaccgaccccgagggctgcccactgagccggtttaaggatagcctgggaaacccaacccacatcctgagaatcggcgagagctataaggagaagcagcggaccatccaggccaagaaggaggtggagcagcggagagccggcggctacagccggaagtacgccagcaaagccaagaatctggcagacgatatggtgagaaacaccgctagagatctgctgtactacgccgtgacccaggatgccatgctgatcttcgccaacctgagccggggcttcggccggcagggcaagcggaccttcatggccgagagacagtacacacggatggaggactggctgaccgccaagctggcctacgagggcctgagcaagacctacctgtccaagacactggcccagtacacctccaagacatgcagcaactgtgggtttaccatcaccagcgccgactacgacagggtgctggagaagctgaagaagacagcaacaggctggatgaccacaattaacggcaaggagctgaaggtggagggccagattacctactacaacagatacaagagacagaacgtagtcaaggacctgtccgtcgagctggatagactgagcgaagaatctgtgaacaacgacatctcctcctggacaaagggcagaagcggagaagctctgagcctcctgaagaaaagattctcccatagacccgtgcaggagaagttcgtgtgcctgaactgcggcttcgagacacacgcagccgagcaagccgccctgaacatcgccagatcctggctgttcctgcggagccaggagtacaagaaataccagacaaacaagacaaccggcaacaccgataagagagccttcgtcgagacctggcagtccttttaccggaagaagcttaaggaggtgtggaaacctgccgtgcggtctggcggatctggcggaggctccagccaggccagcgtgagcttcaaggacgtgaacgtggagttcacccaggacgagtggcagcagatgggccccgcccagaggaacctgtacagggacgtgatgctggagaactacagcaacctggtgagcgtgggctactgcatcttcaagcccaaggtgatcttcaggctggagcagggcgaggagccctggagcagcgaggaggagttcagcagccagaggaggcccaagaactacagggacggcggcccaagcagcggcgcccctcctcccagcggcggcagcccagccggctccccaacctctaccgaggagggcacctctgagtccgccacccccgagagcggccctggcacctccaccgagcccagcgagggcagcgcacccggcagccctgccggcagccccacctccacagaggagggaaccagcaccgagcccagcgaaggcagcgccccaggcaccagcaccgagcctagtgagcaggagattaaacggatcaacaagatcagaagaagacttgtgaaagacagcaacaccaagaaggccggcaagacaggccccatgaaaaccctgctggttagagtgatgacacccgatctgagagagcggctggaaaacctgagaaagaagcctgaaaatatcccccagcccatcagcaatacatctagagccaacctgaataagctgctgaccgattacaccgaaatgaagaaggcgatcctgcatgtgtactgggaagagttccagaaggaccctgtgggcctgatgagccgggtggcccagcctgccagcaagaagatcgatcagaacaagctgaaacctgagatggacgagaagggcaacctgaccaccgccggctttgcctgctctcagtgtggccagcccctgttcgtgtacaagctggagcaggtgtctgagaagggcaaggcttacaccaactacttcggacggtgcaatgtggccgagcacgaaaagctgatcctgctggcccagctgaagcccgagaaggatagcgacgaagccgtgacatatagcctgggaaagtttgggcagagggccctggatttctacagcattcatgtgaccaaggagtccacccaccccgtgaagcccctggcccagatcgccggaaacagatacgcctccggacctgtgggaaaggccctgagcgacgcatgtatgggcacaatcgcctccttcctgtctaagtaccaggacatcatcatcgaacaccagaaggtggtgaagggcaaccagaagagactggagagcctgcgggagctggccggcaaggaaaacctggaataccctagcgtgaccctgccacctcagcctcacaccaaggagggcgttgatgcctacaacgaagtgatcgcccgggtgcgaatgtgggtgaacctgaacctgtggcagaagctgaagctaagcagagatgatgccaagcctctgctgagactgaagggattcccttcctttcctctggtcgagagacaggccaacgaagtggactggtgggacatggtgtgtaacgtgaagaagctgatcaacgagaaaaaggaggatggcaaggtgttttggcagaatctggctggctacaagagacaggaagccctgagaccatacctgagcagcgaggaagatcggaagaagggaaagaaattcgctcggtaccagctgggcgacctgctgctgcacctggaaaagaagcacggcgaggactggggaaaggtgtacgacgaggcctgggagcggattgacaagaaagtggaaggcctgagcaagcacatcaagctggaagaggaacggagaagcgaggacgcccagagcaaggccgccctgaccgactggctgcgggctaaggccagcttcgtgatcgagggcctgaaggaggccgacaaggacgagttctgcagatgcgagctgaagctgcagaagtggtacggggacctgcggggaaagcccttcgccatcgaagccgagaacagcatcctggacatcagcggcttcagcaagcagtacaactgtgccttcatctggcagaaggacggcgtgaagaagctgaacctgtacctgatcatcaactacttcaagggcggcaagctgcggttcaagaagatcaaacctgaagccttcgaagccaacagattctacaccgtgatcaacaaaaagagcggcgagatcgtgcccatggaggtgaacttcaacttcgacgaccccaacctgatcatcctgcctctggcctttggcaagagacagggcagagaattcatctggaacgacctgctgtccctggaaaccggcagcctgaagctggccaacggaagagtgatcgagaagacactgtacaacagaagaacccggcaggatgagcctgccctgttcgtggccctgaccttcgagcggcgggaggtcctggactcctccaatatcaaaccaatgaacctgatcggcgtggcaagaggcgaaaacatccccgccgtgatcgccctgaccgaccccgagggctgcccactgagccggtttaaggatagcctgggaaacccaacccacatcctgagaatcggcgagagctataaggagaagcagcggaccatccaggccaagaaggaggtggagcagcggagagccggcggctacagccggaagtacgccagcaaagccaagaatctggcagacgatatggtgagaaacaccgctagagatctgctgtactacgccgtgacccaggatgccatgctgatcttcgccaacctgagccggggcttcggccggcagggcaagcggaccttcatggccgagagacagtacacacggatggaggactggctgaccgccaagctggcctacgagggcctgagcaagacctacctgtccaagacactggcccagtacacctccaagacatgcagcaactgtgggtttaccatcaccagcgccgactacgacagggtgctggagaagctgaagaagacagcaacaggctggatgaccacaattaacggcaaggagctgaaggtggagggccagattacctactacaacagatacaagagacagaacgtagtcaaggacctgtccgtcgagctggatagactgagcgaagaatctgtgaacaacgacatctcctcctggacaaagggcagaagcggagaagctctgagcctcctgaagaaaagattctcccatagacccgtgcaggagaagttcgtgtgcctgaactgcggcttcgagacacacgcagccgagcaagccgccctgaacatcgccagatcctggctgttcctgcggagccaggagtacaagaaataccagacaaacaagacaaccggcaacaccgataagagagccttcgtcgagacctggcagtccttttaccggaagaagcttaaggaggtgtggaaacctgccgtgcggtctggcggatctggcggaggctcctagccaggccagcgtgagcttcaaggacgtgaacgtggagttcacccaggacgagtggcagcagatgggccccgcccagaggaacctgtacagggacgtgatgctggagaactacagcaacctggtgagcgtgggctactgcatcttcaagcccaaggtgatcttcaggctggagcagggcgaggagccctggagcagcgaggaggagttcagcagccagaggaggcccaagaactacagggacggatctggctccggcagcggccccaagaaaaagagaaaagtctaagctgccttctgcggggcttgccttctggccatgcccttcttctctcccttgcacctgtacctcttggtctttgaataaagcctgagtaggaaggctagcaaaaaaaaaaaaaaaaaaaaaaaaaaaaaaaaaaaaaaaaaaaaaaaaaaaaaaaaaaaaaaaaaaaaaaaaaaaaaaaa

SEQ ID NO: 15695 - RNA, 9485 nt, synthetic construct
  source 1..9485: mol_type = other RNA
aggaaataagagagaaaagaagagtaagaagaaatataagagccaccatggcccctaagaagaagcgtaaagtgagccggatggaacgcctcgtctacgaggtgcggcagaagtgcagaaacatcgaggacatctgcatctcctgcggatctctgaacgtgaccctggagcacccactgttcatcggcggcatgtgccagaactgtaaaaactgttttctggagtgtgcctatcaatacgacgatgacggctaccagagctactgcaccatctgttgcggcggaagagaggtgctgatgtgtggaaataacaactgctgccggtgcttctgcgtggaatgcgtggacctgctggtgggccccggcgccgcccaggccgctattaaggaagatccttggaactgctacatgtgcggccacaagggcacatacggcctgctgagacggagagaggactggcctagcagactgcagatgttcttcgccaataaccacgaccaggagttcgacccccctaaggtgtaccctcccgtccccgccgagaagagaaagcccatccgggtcctgagcctgttcgatggcatcgccaccggtctgctggtgctgaaggacctgggcatccaggtggataggtacattgcctccgaggtgtgcgaggactccatcaccgtgggaatggtgcgtcatcagggcaagatcatgtacgtgggcgacgtgcggagcgtgacacagaagcatatccaggagtggggccctttcgacctggtgatcggcggcagcccttgcaatgacctgagcatcgtgaacccagcccggaagggcctgtacgagggaaccggcagactgttcttcgagttttacagactgctgcacgacgcccggcctaaggaaggcgacgaccggcccttcttttggctgttcgagaatgtggtggccatgggagtcagcgacaagcgggatattagccggttcctggagagcaaccccgtgatgatcgatgccaaggaagtgagcgccgcccaccgggccagatacttctggggcaatctgcctggcatgaacagacccctggccagcaccgtgaacgacaagctggagctgcaggagtgcctggagcacggccggatcgccaagttcagcaaggtgagaaccatcaccacccgaagcaacagcatcaaacaaggcaaggaccagcactttcctgtgttcatgaacgagaaggaggacatcctgtggtgtaccgagatggagagagtgttcgggttcccagtccactacacagatgtcagcaacatgtctagactggccagacagagactgctgggaagaagctggtccgtccctgtgatcagacacctgttcgcccctctgaaggagtacttcgcctgcgtgagcagcggcaacagcaacgccaacagccggggccccagcttctctagcggcctggtgccactgtccctgagagggagccacatgggccccatggagatctacaaaaccgtgagcgcctggaagcggcagcctgtgcgcgtgctgagcctgtttcggaatatcgataaagtcctgaaaagcctgggattcctggagagcggctctggctccggcggtggcaccctgaagtacgtggaggatgtgacaaacgtggtcagacgggatgtggagaagtggggccccttcgatctggtgtacggcagcacccaacccctgggcagctcttgtgaccggtgccctggctggtacatgtttcagttccaccggatcctgcagtacgccctgccgagacaggagtcccagcggccattcttttggattttcatggacaacttgctgctgaccgaggatgaccaggaaactaccactcggttcctgcagaccgaagccgtgaccctgcaggacgtgagaggccgggactaccagaacgccatgcgggtgtggtccaacatccctggactgaaaagcaagcacgcacctctgacccctaaagaagaggagtacctgcaggcccaggtgcggagcagaagcaagctggacgcccctaaggtggatctgctggtgaagaattgcctcctgcccctgagagagtacttcaagtatttcagccagaatagtctgcccctgggaggcagcggcggcggcgccctggtgacatttgaggacgtcgccgtgcggttcacccaggaggaatgggctctgctggatccttctcagaaaatcctgtaccgggacgtgatgagagagacataccggaatctgacctccgtgggcatcaactgggaatgttgggaccttgaagcctgcttcagaagcctgggaagaaacctgagagtgcaggtggtgaagagaaagtgcgagctgaccaacagcggcccctgcgccgagggcggcccaagcagcggcgcccctcctcccagcggcggcagcccagccggctccccaacctctaccgaggagggcacctctgagtccgccacccccgagagcggccctggcacctccaccgagcccagcgagggcagcgcacccggcagccctgccggcagccccacctccacagaggagggaaccagcaccgagcccagcgaaggcagcgccccaggcaccagcaccgagcctagtgagcaggagattaaacggatcaacaagatcagaagaagacttgtgaaagacagcaacaccaagaaggccggcaagacaggccccatgaaaaccctgctggttagagtgatgacacccgatctgagagagcggctggaaaacctgagaaagaagcctgaaaatatcccccagcccatcagcaatacatctagagccaacctgaataagctgctgaccgattacaccgaaatgaagaaggcgatcctgcatgtgtactgggaagagttccagaaggaccctgtgggcctgatgagccgggtggcccagcctgccagcaagaagatcgatcagaacaagctgaaacctgagatggacgagaagggcaacctgaccaccgccggctttgcctgctctcagtgtggccagcccctgttcgtgtacaagctggagcaggtgtctgagaagggcaaggcttacaccaactacttcggacggtgcaatgtggccgagcacgaaaagctgatcctgctggcccagctgaagcccgagaaggatagcgacgaagccgtgacatatagcctgggaaagtttgggcagagggccctggatttctacagcattcatgtgaccaaggagtccacccaccccgtgaagcccctggcccagatcgccggaaacagatacgcctccggacctgtgggaaaggccctgagcgacgcatgtatgggcacaatcgcctccttcctgtctaagtaccaggacatcatcatcgaacaccagaaggtggtgaagggcaaccagaagagactggagagcctgcgggagctggccggcaaggaaaacctggaataccctagcgtgaccctgccacctcagcctcacaccaaggagggcgttgatgcctacaacgaagtgatcgcccgggtgcgaatgtgggtgaacctgaacctgtggcagaagctgaagctaagcagagatgatgccaagcctctgctgagactgaagggattcccttcctttcctctggtcgagagacaggccaacgaagtggactggtgggacatggtgtgtaacgtgaagaagctgatcaacgagaaaaaggaggatggcaaggtgttttggcagaatctggctggctacaagagacaggaagccctgagaccatacctgagcagcgaggaagatcggaagaagggaaagaaattcgctcggtaccagctgggcgacctgctgctgcacctggaaaagaagcacggcgaggactggggaaaggtgtacgacgaggcctgggagcggattgacaagaaagtggaaggcctgagcaagcacatcaagctggaagaggaacggagaagcgaggacgcccagagcaaggccgccctgaccgactggctgcgggctaaggccagcttcgtgatcgagggcctgaaggaggccgacaaggacgagttctgcagatgcgagctgaagctgcagaagtggtacggggacctgcggggaaagcccttcgccatcgaagccgagaacagcatcctggacatcagcggcttcagcaagcagtacaactgtgccttcatctggcagaaggacggcgtgaagaagctgaacctgtacctgatcatcaactacttcaagggcggcaagctgcggttcaagaagatcaaacctgaagccttcgaagccaacagattctacaccgtgatcaacaaaaagagcggcgagatcgtgcccatggaggtgaacttcaacttcgacgaccccaacctgatcatcctgcctctggcctttggcaagagacagggcagagaattcatctggaacgacctgctgtccctggaaaccggcagcctgaagctggccaacggaagagtgatcgagaagacactgtacaacagaagaacccggcaggatgagcctgccctgttcgtggccctgaccttcgagcggcgggaggtcctggactcctccaatatcaaaccaatgaacctgatcggcgtggcaagaggcgaaaacatccccgccgtgatcgccctgaccgaccccgagggctgcccactgagccggtttaaggatagcctgggaaacccaacccacatcctgagaatcggcgagagctataaggagaagcagcggaccatccaggccaagaaggaggtggagcagcggagagccggcggctacagccggaagtacgccagcaaagccaagaatctggcagacgatatggtgagaaacaccgctagagatctgctgtactacgccgtgacccaggatgccatgctgatcttcgccaacctgagccggggcttcggccggcagggcaagcggaccttcatggccgagagacagtacacacggatggaggactggctgaccgccaagctggcctacgagggcctgagcaagacctacctgtccaagacactggcccagtacacctccaagacatgcagcaactgtgggtttaccatcaccagcgccgactacgacagggtgctggagaagctgaagaagacagcaacaggctggatgaccacaattaacggcaaggagctgaaggtggagggccagattacctactacaacagatacaagagacagaacgtagtcaaggacctgtccgtcgagctggatagactgagcgaagaatctgtgaacaacgacatctcctcctggacaaagggcagaagcggagaagctctgagcctcctgaagaaaagattctcccatagacccgtgcaggagaagttcgtgtgcctgaactgcggcttcgagacacacgcagccgagcaagccgccctgaacatcgccagatcctggctgttcctgcggagccaggagtacaagaaataccagacaaacaagacaaccggcaacaccgataagagagccttcgtcgagacctggcagtccttttaccggaagaagcttaaggaggtgtggaaacctgccgtgcggtctggcggatctggcggaggctccggccaggagagcgtgaccttcaccgacgtggccgtggacttcaccctggaggagtgggcctacctggaccacttccagaaggagctgtacaaggacgtgatgctggagaactacaggaacctgctgtgcctgggcctggccgtgagcaagcccgacgtgatcagccagctggagcagggcgacgccccctggatgagcgagggcggcgtgcccaggagcatctacagcgactgggagaccaggggcggcccaagcagcggcgcccctcctcccagcggcggcagcccagccggctccccaacctctaccgaggagggcacctctgagtccgccacccccgagagcggccctggcacctccaccgagcccagcgagggcagcgcacccggcagccctgccggcagccccacctccacagaggagggaaccagcaccgagcccagcgaaggcagcgccccaggcaccagcaccgagcctagtgagcaggagattaaacggatcaacaagatcagaagaagacttgtgaaagacagcaacaccaagaaggccggcaagacaggccccatgaaaaccctgctggttagagtgatgacacccgatctgagagagcggctggaaaacctgagaaagaagcctgaaaatatcccccagcccatcagcaatacatctagagccaacctgaataagctgctgaccgattacaccgaaatgaagaaggcgatcctgcatgtgtactgggaagagttccagaaggaccctgtgggcctgatgagccgggtggcccagcctgccagcaagaagatcgatcagaacaagctgaaacctgagatggacgagaagggcaacctgaccaccgccggctttgcctgctctcagtgtggccagcccctgttcgtgtacaagctggagcaggtgtctgagaagggcaaggcttacaccaactacttcggacggtgcaatgtggccgagcacgaaaagctgatcctgctggcccagctgaagcccgagaaggatagcgacgaagccgtgacatatagcctgggaaagtttgggcagagggccctggatttctacagcattcatgtgaccaaggagtccacccaccccgtgaagcccctggcccagatcgccggaaacagatacgcctccggacctgtgggaaaggccctgagcgacgcatgtatgggcacaatcgcctccttcctgtctaagtaccaggacatcatcatcgaacaccagaaggtggtgaagggcaaccagaagagactggagagcctgcgggagctggccggcaaggaaaacctggaataccctagcgtgaccctgccacctcagcctcacaccaaggagggcgttgatgcctacaacgaagtgatcgcccgggtgcgaatgtgggtgaacctgaacctgtggcagaagctgaagctaagcagagatgatgccaagcctctgctgagactgaagggattcccttcctttcctctggtcgagagacaggccaacgaagtggactggtgggacatggtgtgtaacgtgaagaagctgatcaacgagaaaaaggaggatggcaaggtgttttggcagaatctggctggctacaagagacaggaagccctgagaccatacctgagcagcgaggaagatcggaagaagggaaagaaattcgctcggtaccagctgggcgacctgctgctgcacctggaaaagaagcacggcgaggactggggaaaggtgtacgacgaggcctgggagcggattgacaagaaagtggaaggcctgagcaagcacatcaagctggaagaggaacggagaagcgaggacgcccagagcaaggccgccctgaccgactggctgcgggctaaggccagcttcgtgatcgagggcctgaaggaggccgacaaggacgagttctgcagatgcgagctgaagctgcagaagtggtacggggacctgcggggaaagcccttcgccatcgaagccgagaacagcatcctggacatcagcggcttcagcaagcagtacaactgtgccttcatctggcagaaggacggcgtgaagaagctgaacctgtacctgatcatcaactacttcaagggcggcaagctgcggttcaagaagatcaaacctgaagccttcgaagccaacagattctacaccgtgatcaacaaaaagagcggcgagatcgtgcccatggaggtgaacttcaacttcgacgaccccaacctgatcatcctgcctctggcctttggcaagagacagggcagagaattcatctggaacgacctgctgtccctggaaaccggcagcctgaagctggccaacggaagagtgatcgagaagacactgtacaacagaagaacccggcaggatgagcctgccctgttcgtggccctgaccttcgagcggcgggaggtcctggactcctccaatatcaaaccaatgaacctgatcggcgtggcaagaggcgaaaacatccccgccgtgatcgccctgaccgaccccgagggctgcccactgagccggtttaaggatagcctgggaaacccaacccacatcctgagaatcggcgagagctataaggagaagcagcggaccatccaggccaagaaggaggtggagcagcggagagccggcggctacagccggaagtacgccagcaaagccaagaatctggcagacgatatggtgagaaacaccgctagagatctgctgtactacgccgtgacccaggatgccatgctgatcttcgccaacctgagccggggcttcggccggcagggcaagcggaccttcatggccgagagacagtacacacggatggaggactggctgaccgccaagctggcctacgagggcctgagcaagacctacctgtccaagacactggcccagtacacctccaagacatgcagcaactgtgggtttaccatcaccagcgccgactacgacagggtgctggagaagctgaagaagacagcaacaggctggatgaccacaattaacggcaaggagctgaaggtggagggccagattacctactacaacagatacaagagacagaacgtagtcaaggacctgtccgtcgagctggatagactgagcgaagaatctgtgaacaacgacatctcctcctggacaaagggcagaagcggagaagctctgagcctcctgaagaaaagattctcccatagacccgtgcaggagaagttcgtgtgcctgaactgcggcttcgagacacacgcagccgagcaagccgccctgaacatcgccagatcctggctgttcctgcggagccaggagtacaagaaataccagacaaacaagacaaccggcaacaccgataagagagccttcgtcgagacctggcagtccttttaccggaagaagcttaaggaggtgtggaaacctgccgtgcggtctggcggatctggcggaggctcctggccaggagagcgtgaccttcaccgacgtggccgtggacttcaccctggaggagtgggcctacctggaccacttccagaaggagctgtacaaggacgtgatgctggagaactacaggaacctgctgtgcctgggcctggccgtgagcaagcccgacgtgatcagccagctggagcagggcgacgccccctggatgagcgagggcggcgtgcccaggagcatctacagcgactgggagaccaggggatctggctccggcagcggccccaagaaaaagagaaaagtctaagctgccttctgcggggcttgccttctggccatgcccttcttctctcccttgcacctgtacctcttggtctttgaataaagcctgagtaggaaggctagcaaaaaaaaaaaaaaaaaaaaaaaaaaaaaaaaaaaaaaaaaaaaaaaaaaaaaaaaaaaaaaaaaaaaaaaaaaaaaaaa

SEQ ID NO: 15696 - RNA, 9503 nt, synthetic construct
  source 1..9503: mol_type = other RNA
aggaaataagagagaaaagaagagtaagaagaaatataagagccaccatggcccctaagaagaagcgtaaagtgagccggatggaacgcctcgtctacgaggtgcggcagaagtgcagaaacatcgaggacatctgcatctcctgcggatctctgaacgtgaccctggagcacccactgttcatcggcggcatgtgccagaactgtaaaaactgttttctggagtgtgcctatcaatacgacgatgacggctaccagagctactgcaccatctgttgcggcggaagagaggtgctgatgtgtggaaataacaactgctgccggtgcttctgcgtggaatgcgtggacctgctggtgggccccggcgccgcccaggccgctattaaggaagatccttggaactgctacatgtgcggccacaagggcacatacggcctgctgagacggagagaggactggcctagcagactgcagatgttcttcgccaataaccacgaccaggagttcgacccccctaaggtgtaccctcccgtccccgccgagaagagaaagcccatccgggtcctgagcctgttcgatggcatcgccaccggtctgctggtgctgaaggacctgggcatccaggtggataggtacattgcctccgaggtgtgcgaggactccatcaccgtgggaatggtgcgtcatcagggcaagatcatgtacgtgggcgacgtgcggagcgtgacacagaagcatatccaggagtggggccctttcgacctggtgatcggcggcagcccttgcaatgacctgagcatcgtgaacccagcccggaagggcctgtacgagggaaccggcagactgttcttcgagttttacagactgctgcacgacgcccggcctaaggaaggcgacgaccggcccttcttttggctgttcgagaatgtggtggccatgggagtcagcgacaagcgggatattagccggttcctggagagcaaccccgtgatgatcgatgccaaggaagtgagcgccgcccaccgggccagatacttctggggcaatctgcctggcatgaacagacccctggccagcaccgtgaacgacaagctggagctgcaggagtgcctggagcacggccggatcgccaagttcagcaaggtgagaaccatcaccacccgaagcaacagcatcaaacaaggcaaggaccagcactttcctgtgttcatgaacgagaaggaggacatcctgtggtgtaccgagatggagagagtgttcgggttcccagtccactacacagatgtcagcaacatgtctagactggccagacagagactgctgggaagaagctggtccgtccctgtgatcagacacctgttcgcccctctgaaggagtacttcgcctgcgtgagcagcggcaacagcaacgccaacagccggggccccagcttctctagcggcctggtgccactgtccctgagagggagccacatgggccccatggagatctacaaaaccgtgagcgcctggaagcggcagcctgtgcgcgtgctgagcctgtttcggaatatcgataaagtcctgaaaagcctgggattcctggagagcggctctggctccggcggtggcaccctgaagtacgtggaggatgtgacaaacgtggtcagacgggatgtggagaagtggggccccttcgatctggtgtacggcagcacccaacccctgggcagctcttgtgaccggtgccctggctggtacatgtttcagttccaccggatcctgcagtacgccctgccgagacaggagtcccagcggccattcttttggattttcatggacaacttgctgctgaccgaggatgaccaggaaactaccactcggttcctgcagaccgaagccgtgaccctgcaggacgtgagaggccgggactaccagaacgccatgcgggtgtggtccaacatccctggactgaaaagcaagcacgcacctctgacccctaaagaagaggagtacctgcaggcccaggtgcggagcagaagcaagctggacgcccctaaggtggatctgctggtgaagaattgcctcctgcccctgagagagtacttcaagtatttcagccagaatagtctgcccctgggaggcagcggcggcggcgccctggtgacatttgaggacgtcgccgtgcggttcacccaggaggaatgggctctgctggatccttctcagaaaatcctgtaccgggacgtgatgagagagacataccggaatctgacctccgtgggcatcaactgggaatgttgggaccttgaagcctgcttcagaagcctgggaagaaacctgagagtgcaggtggtgaagagaaagtgcgagctgaccaacagcggcccctgcgccgagggcggcccaagcagcggcgcccctcctcccagcggcggcagcccagccggctccccaacctctaccgaggagggcacctctgagtccgccacccccgagagcggccctggcacctccaccgagcccagcgagggcagcgcacccggcagccctgccggcagccccacctccacagaggagggaaccagcaccgagcccagcgaaggcagcgccccaggcaccagcaccgagcctagtgagcaggagattaaacggatcaacaagatcagaagaagacttgtgaaagacagcaacaccaagaaggccggcaagacaggccccatgaaaaccctgctggttagagtgatgacacccgatctgagagagcggctggaaaacctgagaaagaagcctgaaaatatcccccagcccatcagcaatacatctagagccaacctgaataagctgctgaccgattacaccgaaatgaagaaggcgatcctgcatgtgtactgggaagagttccagaaggaccctgtgggcctgatgagccgggtggcccagcctgccagcaagaagatcgatcagaacaagctgaaacctgagatggacgagaagggcaacctgaccaccgccggctttgcctgctctcagtgtggccagcccctgttcgtgtacaagctggagcaggtgtctgagaagggcaaggcttacaccaactacttcggacggtgcaatgtggccgagcacgaaaagctgatcctgctggcccagctgaagcccgagaaggatagcgacgaagccgtgacatatagcctgggaaagtttgggcagagggccctggatttctacagcattcatgtgaccaaggagtccacccaccccgtgaagcccctggcccagatcgccggaaacagatacgcctccggacctgtgggaaaggccctgagcgacgcatgtatgggcacaatcgcctccttcctgtctaagtaccaggacatcatcatcgaacaccagaaggtggtgaagggcaaccagaagagactggagagcctgcgggagctggccggcaaggaaaacctggaataccctagcgtgaccctgccacctcagcctcacaccaaggagggcgttgatgcctacaacgaagtgatcgcccgggtgcgaatgtgggtgaacctgaacctgtggcagaagctgaagctaagcagagatgatgccaagcctctgctgagactgaagggattcccttcctttcctctggtcgagagacaggccaacgaagtggactggtgggacatggtgtgtaacgtgaagaagctgatcaacgagaaaaaggaggatggcaaggtgttttggcagaatctggctggctacaagagacaggaagccctgagaccatacctgagcagcgaggaagatcggaagaagggaaagaaattcgctcggtaccagctgggcgacctgctgctgcacctggaaaagaagcacggcgaggactggggaaaggtgtacgacgaggcctgggagcggattgacaagaaagtggaaggcctgagcaagcacatcaagctggaagaggaacggagaagcgaggacgcccagagcaaggccgccctgaccgactggctgcgggctaaggccagcttcgtgatcgagggcctgaaggaggccgacaaggacgagttctgcagatgcgagctgaagctgcagaagtggtacggggacctgcggggaaagcccttcgccatcgaagccgagaacagcatcctggacatcagcggcttcagcaagcagtacaactgtgccttcatctggcagaaggacggcgtgaagaagctgaacctgtacctgatcatcaactacttcaagggcggcaagctgcggttcaagaagatcaaacctgaagccttcgaagccaacagattctacaccgtgatcaacaaaaagagcggcgagatcgtgcccatggaggtgaacttcaacttcgacgaccccaacctgatcatcctgcctctggcctttggcaagagacagggcagagaattcatctggaacgacctgctgtccctggaaaccggcagcctgaagctggccaacggaagagtgatcgagaagacactgtacaacagaagaacccggcaggatgagcctgccctgttcgtggccctgaccttcgagcggcgggaggtcctggactcctccaatatcaaaccaatgaacctgatcggcgtggcaagaggcgaaaacatccccgccgtgatcgccctgaccgaccccgagggctgcccactgagccggtttaaggatagcctgggaaacccaacccacatcctgagaatcggcgagagctataaggagaagcagcggaccatccaggccaagaaggaggtggagcagcggagagccggcggctacagccggaagtacgccagcaaagccaagaatctggcagacgatatggtgagaaacaccgctagagatctgctgtactacgccgtgacccaggatgccatgctgatcttcgccaacctgagccggggcttcggccggcagggcaagcggaccttcatggccgagagacagtacacacggatggaggactggctgaccgccaagctggcctacgagggcctgagcaagacctacctgtccaagacactggcccagtacacctccaagacatgcagcaactgtgggtttaccatcaccagcgccgactacgacagggtgctggagaagctgaagaagacagcaacaggctggatgaccacaattaacggcaaggagctgaaggtggagggccagattacctactacaacagatacaagagacagaacgtagtcaaggacctgtccgtcgagctggatagactgagcgaagaatctgtgaacaacgacatctcctcctggacaaagggcagaagcggagaagctctgagcctcctgaagaaaagattctcccatagacccgtgcaggagaagttcgtgtgcctgaactgcggcttcgagacacacgcagccgagcaagccgccctgaacatcgccagatcctggctgttcctgcggagccaggagtacaagaaataccagacaaacaagacaaccggcaacaccgataagagagccttcgtcgagacctggcagtccttttaccggaagaagcttaaggaggtgtggaaacctgccgtgcggtctggcggatctggcggaggctccgtgacctacgacgacgtgcacatcgacttcacctgggaggagtggaccctgctggaccccagccagaagaacctgtacaaggacgtgatgctggagacctacaggaacctgaccaccgtgggctacagctgggaggaccacctgatcgaggagcactgcaagagcagcaggaagcacgagaggcacgagaggatccccaccggcgagcagcccagcgagagcacccagagcttcagggccttcgcccaccacggcggcccaagcagcggcgcccctcctcccagcggcggcagcccagccggctccccaacctctaccgaggagggcacctctgagtccgccacccccgagagcggccctggcacctccaccgagcccagcgagggcagcgcacccggcagccctgccggcagccccacctccacagaggagggaaccagcaccgagcccagcgaaggcagcgccccaggcaccagcaccgagcctagtgagcaggagattaaacggatcaacaagatcagaagaagacttgtgaaagacagcaacaccaagaaggccggcaagacaggccccatgaaaaccctgctggttagagtgatgacacccgatctgagagagcggctggaaaacctgagaaagaagcctgaaaatatcccccagcccatcagcaatacatctagagccaacctgaataagctgctgaccgattacaccgaaatgaagaaggcgatcctgcatgtgtactgggaagagttccagaaggaccctgtgggcctgatgagccgggtggcccagcctgccagcaagaagatcgatcagaacaagctgaaacctgagatggacgagaagggcaacctgaccaccgccggctttgcctgctctcagtgtggccagcccctgttcgtgtacaagctggagcaggtgtctgagaagggcaaggcttacaccaactacttcggacggtgcaatgtggccgagcacgaaaagctgatcctgctggcccagctgaagcccgagaaggatagcgacgaagccgtgacatatagcctgggaaagtttgggcagagggccctggatttctacagcattcatgtgaccaaggagtccacccaccccgtgaagcccctggcccagatcgccggaaacagatacgcctccggacctgtgggaaaggccctgagcgacgcatgtatgggcacaatcgcctccttcctgtctaagtaccaggacatcatcatcgaacaccagaaggtggtgaagggcaaccagaagagactggagagcctgcgggagctggccggcaaggaaaacctggaataccctagcgtgaccctgccacctcagcctcacaccaaggagggcgttgatgcctacaacgaagtgatcgcccgggtgcgaatgtgggtgaacctgaacctgtggcagaagctgaagctaagcagagatgatgccaagcctctgctgagactgaagggattcccttcctttcctctggtcgagagacaggccaacgaagtggactggtgggacatggtgtgtaacgtgaagaagctgatcaacgagaaaaaggaggatggcaaggtgttttggcagaatctggctggctacaagagacaggaagccctgagaccatacctgagcagcgaggaagatcggaagaagggaaagaaattcgctcggtaccagctgggcgacctgctgctgcacctggaaaagaagcacggcgaggactggggaaaggtgtacgacgaggcctgggagcggattgacaagaaagtggaaggcctgagcaagcacatcaagctggaagaggaacggagaagcgaggacgcccagagcaaggccgccctgaccgactggctgcgggctaaggccagcttcgtgatcgagggcctgaaggaggccgacaaggacgagttctgcagatgcgagctgaagctgcagaagtggtacggggacctgcggggaaagcccttcgccatcgaagccgagaacagcatcctggacatcagcggcttcagcaagcagtacaactgtgccttcatctggcagaaggacggcgtgaagaagctgaacctgtacctgatcatcaactacttcaagggcggcaagctgcggttcaagaagatcaaacctgaagccttcgaagccaacagattctacaccgtgatcaacaaaaagagcggcgagatcgtgcccatggaggtgaacttcaacttcgacgaccccaacctgatcatcctgcctctggcctttggcaagagacagggcagagaattcatctggaacgacctgctgtccctggaaaccggcagcctgaagctggccaacggaagagtgatcgagaagacactgtacaacagaagaacccggcaggatgagcctgccctgttcgtggccctgaccttcgagcggcgggaggtcctggactcctccaatatcaaaccaatgaacctgatcggcgtggcaagaggcgaaaacatccccgccgtgatcgccctgaccgaccccgagggctgcccactgagccggtttaaggatagcctgggaaacccaacccacatcctgagaatcggcgagagctataaggagaagcagcggaccatccaggccaagaaggaggtggagcagcggagagccggcggctacagccggaagtacgccagcaaagccaagaatctggcagacgatatggtgagaaacaccgctagagatctgctgtactacgccgtgacccaggatgccatgctgatcttcgccaacctgagccggggcttcggccggcagggcaagcggaccttcatggccgagagacagtacacacggatggaggactggctgaccgccaagctggcctacgagggcctgagcaagacctacctgtccaagacactggcccagtacacctccaagacatgcagcaactgtgggtttaccatcaccagcgccgactacgacagggtgctggagaagctgaagaagacagcaacaggctggatgaccacaattaacggcaaggagctgaaggtggagggccagattacctactacaacagatacaagagacagaacgtagtcaaggacctgtccgtcgagctggatagactgagcgaagaatctgtgaacaacgacatctcctcctggacaaagggcagaagcggagaagctctgagcctcctgaagaaaagattctcccatagacccgtgcaggagaagttcgtgtgcctgaactgcggcttcgagacacacgcagccgagcaagccgccctgaacatcgccagatcctggctgttcctgcggagccaggagtacaagaaataccagacaaacaagacaaccggcaacaccgataagagagccttcgtcgagacctggcagtccttttaccggaagaagcttaaggaggtgtggaaacctgccgtgcggtctggcggatctggcggaggctcctgtgacctacgacgacgtgcacatcgacttcacctgggaggagtggaccctgctggaccccagccagaagaacctgtacaaggacgtgatgctggagacctacaggaacctgaccaccgtgggctacagctgggaggaccacctgatcgaggagcactgcaagagcagcaggaagcacgagaggcacgagaggatccccaccggcgagcagcccagcgagagcacccagagcttcagggccttcgcccaccacggatctggctccggcagcggccccaagaaaaagagaaaagtctaagctgccttctgcggggcttgccttctggccatgcccttcttctctcccttgcacctgtacctcttggtctttgaataaagcctgagtaggaaggctagcaaaaaaaaaaaaaaaaaaaaaaaaaaaaaaaaaaaaaaaaaaaaaaaaaaaaaaaaaaaaaaaaaaaaaaaaaaaaaaaa

SEQ ID NO: 15697 - RNA, 9485 nt, synthetic construct
  source 1..9485: mol_type = other RNA
aggaaataagagagaaaagaagagtaagaagaaatataagagccaccatggcccctaagaagaagcgtaaagtgagccggatggaacgcctcgtctacgaggtgcggcagaagtgcagaaacatcgaggacatctgcatctcctgcggatctctgaacgtgaccctggagcacccactgttcatcggcggcatgtgccagaactgtaaaaactgttttctggagtgtgcctatcaatacgacgatgacggctaccagagctactgcaccatctgttgcggcggaagagaggtgctgatgtgtggaaataacaactgctgccggtgcttctgcgtggaatgcgtggacctgctggtgggccccggcgccgcccaggccgctattaaggaagatccttggaactgctacatgtgcggccacaagggcacatacggcctgctgagacggagagaggactggcctagcagactgcagatgttcttcgccaataaccacgaccaggagttcgacccccctaaggtgtaccctcccgtccccgccgagaagagaaagcccatccgggtcctgagcctgttcgatggcatcgccaccggtctgctggtgctgaaggacctgggcatccaggtggataggtacattgcctccgaggtgtgcgaggactccatcaccgtgggaatggtgcgtcatcagggcaagatcatgtacgtgggcgacgtgcggagcgtgacacagaagcatatccaggagtggggccctttcgacctggtgatcggcggcagcccttgcaatgacctgagcatcgtgaacccagcccggaagggcctgtacgagggaaccggcagactgttcttcgagttttacagactgctgcacgacgcccggcctaaggaaggcgacgaccggcccttcttttggctgttcgagaatgtggtggccatgggagtcagcgacaagcgggatattagccggttcctggagagcaaccccgtgatgatcgatgccaaggaagtgagcgccgcccaccgggccagatacttctggggcaatctgcctggcatgaacagacccctggccagcaccgtgaacgacaagctggagctgcaggagtgcctggagcacggccggatcgccaagttcagcaaggtgagaaccatcaccacccgaagcaacagcatcaaacaaggcaaggaccagcactttcctgtgttcatgaacgagaaggaggacatcctgtggtgtaccgagatggagagagtgttcgggttcccagtccactacacagatgtcagcaacatgtctagactggccagacagagactgctgggaagaagctggtccgtccctgtgatcagacacctgttcgcccctctgaaggagtacttcgcctgcgtgagcagcggcaacagcaacgccaacagccggggccccagcttctctagcggcctggtgccactgtccctgagagggagccacatgggccccatggagatctacaaaaccgtgagcgcctggaagcggcagcctgtgcgcgtgctgagcctgtttcggaatatcgataaagtcctgaaaagcctgggattcctggagagcggctctggctccggcggtggcaccctgaagtacgtggaggatgtgacaaacgtggtcagacgggatgtggagaagtggggccccttcgatctggtgtacggcagcacccaacccctgggcagctcttgtgaccggtgccctggctggtacatgtttcagttccaccggatcctgcagtacgccctgccgagacaggagtcccagcggccattcttttggattttcatggacaacttgctgctgaccgaggatgaccaggaaactaccactcggttcctgcagaccgaagccgtgaccctgcaggacgtgagaggccgggactaccagaacgccatgcgggtgtggtccaacatccctggactgaaaagcaagcacgcacctctgacccctaaagaagaggagtacctgcaggcccaggtgcggagcagaagcaagctggacgcccctaaggtggatctgctggtgaagaattgcctcctgcccctgagagagtacttcaagtatttcagccagaatagtctgcccctgggaggcagcggcggcggcgccctggtgacatttgaggacgtcgccgtgcggttcacccaggaggaatgggctctgctggatccttctcagaaaatcctgtaccgggacgtgatgagagagacataccggaatctgacctccgtgggcatcaactgggaatgttgggaccttgaagcctgcttcagaagcctgggaagaaacctgagagtgcaggtggtgaagagaaagtgcgagctgaccaacagcggcccctgcgccgagggcggcccaagcagcggcgcccctcctcccagcggcggcagcccagccggctccccaacctctaccgaggagggcacctctgagtccgccacccccgagagcggccctggcacctccaccgagcccagcgagggcagcgcacccggcagccctgccggcagccccacctccacagaggagggaaccagcaccgagcccagcgaaggcagcgccccaggcaccagcaccgagcctagtgagcaggagattaaacggatcaacaagatcagaagaagacttgtgaaagacagcaacaccaagaaggccggcaagacaggccccatgaaaaccctgctggttagagtgatgacacccgatctgagagagcggctggaaaacctgagaaagaagcctgaaaatatcccccagcccatcagcaatacatctagagccaacctgaataagctgctgaccgattacaccgaaatgaagaaggcgatcctgcatgtgtactgggaagagttccagaaggaccctgtgggcctgatgagccgggtggcccagcctgccagcaagaagatcgatcagaacaagctgaaacctgagatggacgagaagggcaacctgaccaccgccggctttgcctgctctcagtgtggccagcccctgttcgtgtacaagctggagcaggtgtctgagaagggcaaggcttacaccaactacttcggacggtgcaatgtggccgagcacgaaaagctgatcctgctggcccagctgaagcccgagaaggatagcgacgaagccgtgacatatagcctgggaaagtttgggcagagggccctggatttctacagcattcatgtgaccaaggagtccacccaccccgtgaagcccctggcccagatcgccggaaacagatacgcctccggacctgtgggaaaggccctgagcgacgcatgtatgggcacaatcgcctccttcctgtctaagtaccaggacatcatcatcgaacaccagaaggtggtgaagggcaaccagaagagactggagagcctgcgggagctggccggcaaggaaaacctggaataccctagcgtgaccctgccacctcagcctcacaccaaggagggcgttgatgcctacaacgaagtgatcgcccgggtgcgaatgtgggtgaacctgaacctgtggcagaagctgaagctaagcagagatgatgccaagcctctgctgagactgaagggattcccttcctttcctctggtcgagagacaggccaacgaagtggactggtgggacatggtgtgtaacgtgaagaagctgatcaacgagaaaaaggaggatggcaaggtgttttggcagaatctggctggctacaagagacaggaagccctgagaccatacctgagcagcgaggaagatcggaagaagggaaagaaattcgctcggtaccagctgggcgacctgctgctgcacctggaaaagaagcacggcgaggactggggaaaggtgtacgacgaggcctgggagcggattgacaagaaagtggaaggcctgagcaagcacatcaagctggaagaggaacggagaagcgaggacgcccagagcaaggccgccctgaccgactggctgcgggctaaggccagcttcgtgatcgagggcctgaaggaggccgacaaggacgagttctgcagatgcgagctgaagctgcagaagtggtacggggacctgcggggaaagcccttcgccatcgaagccgagaacagcatcctggacatcagcggcttcagcaagcagtacaactgtgccttcatctggcagaaggacggcgtgaagaagctgaacctgtacctgatcatcaactacttcaagggcggcaagctgcggttcaagaagatcaaacctgaagccttcgaagccaacagattctacaccgtgatcaacaaaaagagcggcgagatcgtgcccatggaggtgaacttcaacttcgacgaccccaacctgatcatcctgcctctggcctttggcaagagacagggcagagaattcatctggaacgacctgctgtccctggaaaccggcagcctgaagctggccaacggaagagtgatcgagaagacactgtacaacagaagaacccggcaggatgagcctgccctgttcgtggccctgaccttcgagcggcgggaggtcctggactcctccaatatcaaaccaatgaacctgatcggcgtggcaagaggcgaaaacatccccgccgtgatcgccctgaccgaccccgagggctgcccactgagccggtttaaggatagcctgggaaacccaacccacatcctgagaatcggcgagagctataaggagaagcagcggaccatccaggccaagaaggaggtggagcagcggagagccggcggctacagccggaagtacgccagcaaagccaagaatctggcagacgatatggtgagaaacaccgctagagatctgctgtactacgccgtgacccaggatgccatgctgatcttcgccaacctgagccggggcttcggccggcagggcaagcggaccttcatggccgagagacagtacacacggatggaggactggctgaccgccaagctggcctacgagggcctgagcaagacctacctgtccaagacactggcccagtacacctccaagacatgcagcaactgtgggtttaccatcaccagcgccgactacgacagggtgctggagaagctgaagaagacagcaacaggctggatgaccacaattaacggcaaggagctgaaggtggagggccagattacctactacaacagatacaagagacagaacgtagtcaaggacctgtccgtcgagctggatagactgagcgaagaatctgtgaacaacgacatctcctcctggacaaagggcagaagcggagaagctctgagcctcctgaagaaaagattctcccatagacccgtgcaggagaagttcgtgtgcctgaactgcggcttcgagacacacgcagccgagcaagccgccctgaacatcgccagatcctggctgttcctgcggagccaggagtacaagaaataccagacaaacaagacaaccggcaacaccgataagagagccttcgtcgagacctggcagtccttttaccggaagaagcttaaggaggtgtggaaacctgccgtgcggtctggcggatctggcggaggctccagccaggagctgctgaccttcaaggacatcagcatcgacttcacccaggaggagtggggccagctgacccccgcccaccagaacctgtacagggaggtgatgctggagaactacagcaacctggtgagcgtggccggctaccagctgagcaagcccgtggtgatcagccagctggagaagggcgaggagccctggatgaccgagaaggagggccccggcgaccccagcagcgacctgaagagcggcggcccaagcagcggcgcccctcctcccagcggcggcagcccagccggctccccaacctctaccgaggagggcacctctgagtccgccacccccgagagcggccctggcacctccaccgagcccagcgagggcagcgcacccggcagccctgccggcagccccacctccacagaggagggaaccagcaccgagcccagcgaaggcagcgccccaggcaccagcaccgagcctagtgagcaggagattaaacggatcaacaagatcagaagaagacttgtgaaagacagcaacaccaagaaggccggcaagacaggccccatgaaaaccctgctggttagagtgatgacacccgatctgagagagcggctggaaaacctgagaaagaagcctgaaaatatcccccagcccatcagcaatacatctagagccaacctgaataagctgctgaccgattacaccgaaatgaagaaggcgatcctgcatgtgtactgggaagagttccagaaggaccctgtgggcctgatgagccgggtggcccagcctgccagcaagaagatcgatcagaacaagctgaaacctgagatggacgagaagggcaacctgaccaccgccggctttgcctgctctcagtgtggccagcccctgttcgtgtacaagctggagcaggtgtctgagaagggcaaggcttacaccaactacttcggacggtgcaatgtggccgagcacgaaaagctgatcctgctggcccagctgaagcccgagaaggatagcgacgaagccgtgacatatagcctgggaaagtttgggcagagggccctggatttctacagcattcatgtgaccaaggagtccacccaccccgtgaagcccctggcccagatcgccggaaacagatacgcctccggacctgtgggaaaggccctgagcgacgcatgtatgggcacaatcgcctccttcctgtctaagtaccaggacatcatcatcgaacaccagaaggtggtgaagggcaaccagaagagactggagagcctgcgggagctggccggcaaggaaaacctggaataccctagcgtgaccctgccacctcagcctcacaccaaggagggcgttgatgcctacaacgaagtgatcgcccgggtgcgaatgtgggtgaacctgaacctgtggcagaagctgaagctaagcagagatgatgccaagcctctgctgagactgaagggattcccttcctttcctctggtcgagagacaggccaacgaagtggactggtgggacatggtgtgtaacgtgaagaagctgatcaacgagaaaaaggaggatggcaaggtgttttggcagaatctggctggctacaagagacaggaagccctgagaccatacctgagcagcgaggaagatcggaagaagggaaagaaattcgctcggtaccagctgggcgacctgctgctgcacctggaaaagaagcacggcgaggactggggaaaggtgtacgacgaggcctgggagcggattgacaagaaagtggaaggcctgagcaagcacatcaagctggaagaggaacggagaagcgaggacgcccagagcaaggccgccctgaccgactggctgcgggctaaggccagcttcgtgatcgagggcctgaaggaggccgacaaggacgagttctgcagatgcgagctgaagctgcagaagtggtacggggacctgcggggaaagcccttcgccatcgaagccgagaacagcatcctggacatcagcggcttcagcaagcagtacaactgtgccttcatctggcagaaggacggcgtgaagaagctgaacctgtacctgatcatcaactacttcaagggcggcaagctgcggttcaagaagatcaaacctgaagccttcgaagccaacagattctacaccgtgatcaacaaaaagagcggcgagatcgtgcccatggaggtgaacttcaacttcgacgaccccaacctgatcatcctgcctctggcctttggcaagagacagggcagagaattcatctggaacgacctgctgtccctggaaaccggcagcctgaagctggccaacggaagagtgatcgagaagacactgtacaacagaagaacccggcaggatgagcctgccctgttcgtggccctgaccttcgagcggcgggaggtcctggactcctccaatatcaaaccaatgaacctgatcggcgtggcaagaggcgaaaacatccccgccgtgatcgccctgaccgaccccgagggctgcccactgagccggtttaaggatagcctgggaaacccaacccacatcctgagaatcggcgagagctataaggagaagcagcggaccatccaggccaagaaggaggtggagcagcggagagccggcggctacagccggaagtacgccagcaaagccaagaatctggcagacgatatggtgagaaacaccgctagagatctgctgtactacgccgtgacccaggatgccatgctgatcttcgccaacctgagccggggcttcggccggcagggcaagcggaccttcatggccgagagacagtacacacggatggaggactggctgaccgccaagctggcctacgagggcctgagcaagacctacctgtccaagacactggcccagtacacctccaagacatgcagcaactgtgggtttaccatcaccagcgccgactacgacagggtgctggagaagctgaagaagacagcaacaggctggatgaccacaattaacggcaaggagctgaaggtggagggccagattacctactacaacagatacaagagacagaacgtagtcaaggacctgtccgtcgagctggatagactgagcgaagaatctgtgaacaacgacatctcctcctggacaaagggcagaagcggagaagctctgagcctcctgaagaaaagattctcccatagacccgtgcaggagaagttcgtgtgcctgaactgcggcttcgagacacacgcagccgagcaagccgccctgaacatcgccagatcctggctgttcctgcggagccaggagtacaagaaataccagacaaacaagacaaccggcaacaccgataagagagccttcgtcgagacctggcagtccttttaccggaagaagcttaaggaggtgtggaaacctgccgtgcggtctggcggatctggcggaggctcctagccaggagctgctgaccttcaaggacatcagcatcgacttcacccaggaggagtggggccagctgacccccgcccaccagaacctgtacagggaggtgatgctggagaactacagcaacctggtgagcgtggccggctaccagctgagcaagcccgtggtgatcagccagctggagaagggcgaggagccctggatgaccgagaaggagggccccggcgaccccagcagcgacctgaagagcggatctggctccggcagcggccccaagaaaaagagaaaagtctaagctgccttctgcggggcttgccttctggccatgcccttcttctctcccttgcacctgtacctcttggtctttgaataaagcctgagtaggaaggctagcaaaaaaaaaaaaaaaaaaaaaaaaaaaaaaaaaaaaaaaaaaaaaaaaaaaaaaaaaaaaaaaaaaaaaaaaaaaaaaaa

SEQ ID NO: 15698 - RNA, 9485 nt, synthetic construct
  source 1..9485: mol_type = other RNA
aggaaataagagagaaaagaagagtaagaagaaatataagagccaccatggcccctaagaagaagcgtaaagtgagccggatggaacgcctcgtctacgaggtgcggcagaagtgcagaaacatcgaggacatctgcatctcctgcggatctctgaacgtgaccctggagcacccactgttcatcggcggcatgtgccagaactgtaaaaactgttttctggagtgtgcctatcaatacgacgatgacggctaccagagctactgcaccatctgttgcggcggaagagaggtgctgatgtgtggaaataacaactgctgccggtgcttctgcgtggaatgcgtggacctgctggtgggccccggcgccgcccaggccgctattaaggaagatccttggaactgctacatgtgcggccacaagggcacatacggcctgctgagacggagagaggactggcctagcagactgcagatgttcttcgccaataaccacgaccaggagttcgacccccctaaggtgtaccctcccgtccccgccgagaagagaaagcccatccgggtcctgagcctgttcgatggcatcgccaccggtctgctggtgctgaaggacctgggcatccaggtggataggtacattgcctccgaggtgtgcgaggactccatcaccgtgggaatggtgcgtcatcagggcaagatcatgtacgtgggcgacgtgcggagcgtgacacagaagcatatccaggagtggggccctttcgacctggtgatcggcggcagcccttgcaatgacctgagcatcgtgaacccagcccggaagggcctgtacgagggaaccggcagactgttcttcgagttttacagactgctgcacgacgcccggcctaaggaaggcgacgaccggcccttcttttggctgttcgagaatgtggtggccatgggagtcagcgacaagcgggatattagccggttcctggagagcaaccccgtgatgatcgatgccaaggaagtgagcgccgcccaccgggccagatacttctggggcaatctgcctggcatgaacagacccctggccagcaccgtgaacgacaagctggagctgcaggagtgcctggagcacggccggatcgccaagttcagcaaggtgagaaccatcaccacccgaagcaacagcatcaaacaaggcaaggaccagcactttcctgtgttcatgaacgagaaggaggacatcctgtggtgtaccgagatggagagagtgttcgggttcccagtccactacacagatgtcagcaacatgtctagactggccagacagagactgctgggaagaagctggtccgtccctgtgatcagacacctgttcgcccctctgaaggagtacttcgcctgcgtgagcagcggcaacagcaacgccaacagccggggccccagcttctctagcggcctggtgccactgtccctgagagggagccacatgggccccatggagatctacaaaaccgtgagcgcctggaagcggcagcctgtgcgcgtgctgagcctgtttcggaatatcgataaagtcctgaaaagcctgggattcctggagagcggctctggctccggcggtggcaccctgaagtacgtggaggatgtgacaaacgtggtcagacgggatgtggagaagtggggccccttcgatctggtgtacggcagcacccaacccctgggcagctcttgtgaccggtgccctggctggtacatgtttcagttccaccggatcctgcagtacgccctgccgagacaggagtcccagcggccattcttttggattttcatggacaacttgctgctgaccgaggatgaccaggaaactaccactcggttcctgcagaccgaagccgtgaccctgcaggacgtgagaggccgggactaccagaacgccatgcgggtgtggtccaacatccctggactgaaaagcaagcacgcacctctgacccctaaagaagaggagtacctgcaggcccaggtgcggagcagaagcaagctggacgcccctaaggtggatctgctggtgaagaattgcctcctgcccctgagagagtacttcaagtatttcagccagaatagtctgcccctgggaggcagcggcggcggcgccctggtgacatttgaggacgtcgccgtgcggttcacccaggaggaatgggctctgctggatccttctcagaaaatcctgtaccgggacgtgatgagagagacataccggaatctgacctccgtgggcatcaactgggaatgttgggaccttgaagcctgcttcagaagcctgggaagaaacctgagagtgcaggtggtgaagagaaagtgcgagctgaccaacagcggcccctgcgccgagggcggcccaagcagcggcgcccctcctcccagcggcggcagcccagccggctccccaacctctaccgaggagggcacctctgagtccgccacccccgagagcggccctggcacctccaccgagcccagcgagggcagcgcacccggcagccctgccggcagccccacctccacagaggagggaaccagcaccgagcccagcgaaggcagcgccccaggcaccagcaccgagcctagtgagcaggagattaaacggatcaacaagatcagaagaagacttgtgaaagacagcaacaccaagaaggccggcaagacaggccccatgaaaaccctgctggttagagtgatgacacccgatctgagagagcggctggaaaacctgagaaagaagcctgaaaatatcccccagcccatcagcaatacatctagagccaacctgaataagctgctgaccgattacaccgaaatgaagaaggcgatcctgcatgtgtactgggaagagttccagaaggaccctgtgggcctgatgagccgggtggcccagcctgccagcaagaagatcgatcagaacaagctgaaacctgagatggacgagaagggcaacctgaccaccgccggctttgcctgctctcagtgtggccagcccctgttcgtgtacaagctggagcaggtgtctgagaagggcaaggcttacaccaactacttcggacggtgcaatgtggccgagcacgaaaagctgatcctgctggcccagctgaagcccgagaaggatagcgacgaagccgtgacatatagcctgggaaagtttgggcagagggccctggatttctacagcattcatgtgaccaaggagtccacccaccccgtgaagcccctggcccagatcgccggaaacagatacgcctccggacctgtgggaaaggccctgagcgacgcatgtatgggcacaatcgcctccttcctgtctaagtaccaggacatcatcatcgaacaccagaaggtggtgaagggcaaccagaagagactggagagcctgcgggagctggccggcaaggaaaacctggaataccctagcgtgaccctgccacctcagcctcacaccaaggagggcgttgatgcctacaacgaagtgatcgcccgggtgcgaatgtgggtgaacctgaacctgtggcagaagctgaagctaagcagagatgatgccaagcctctgctgagactgaagggattcccttcctttcctctggtcgagagacaggccaacgaagtggactggtgggacatggtgtgtaacgtgaagaagctgatcaacgagaaaaaggaggatggcaaggtgttttggcagaatctggctggctacaagagacaggaagccctgagaccatacctgagcagcgaggaagatcggaagaagggaaagaaattcgctcggtaccagctgggcgacctgctgctgcacctggaaaagaagcacggcgaggactggggaaaggtgtacgacgaggcctgggagcggattgacaagaaagtggaaggcctgagcaagcacatcaagctggaagaggaacggagaagcgaggacgcccagagcaaggccgccctgaccgactggctgcgggctaaggccagcttcgtgatcgagggcctgaaggaggccgacaaggacgagttctgcagatgcgagctgaagctgcagaagtggtacggggacctgcggggaaagcccttcgccatcgaagccgagaacagcatcctggacatcagcggcttcagcaagcagtacaactgtgccttcatctggcagaaggacggcgtgaagaagctgaacctgtacctgatcatcaactacttcaagggcggcaagctgcggttcaagaagatcaaacctgaagccttcgaagccaacagattctacaccgtgatcaacaaaaagagcggcgagatcgtgcccatggaggtgaacttcaacttcgacgaccccaacctgatcatcctgcctctggcctttggcaagagacagggcagagaattcatctggaacgacctgctgtccctggaaaccggcagcctgaagctggccaacggaagagtgatcgagaagacactgtacaacagaagaacccggcaggatgagcctgccctgttcgtggccctgaccttcgagcggcgggaggtcctggactcctccaatatcaaaccaatgaacctgatcggcgtggcaagaggcgaaaacatccccgccgtgatcgccctgaccgaccccgagggctgcccactgagccggtttaaggatagcctgggaaacccaacccacatcctgagaatcggcgagagctataaggagaagcagcggaccatccaggccaagaaggaggtggagcagcggagagccggcggctacagccggaagtacgccagcaaagccaagaatctggcagacgatatggtgagaaacaccgctagagatctgctgtactacgccgtgacccaggatgccatgctgatcttcgccaacctgagccggggcttcggccggcagggcaagcggaccttcatggccgagagacagtacacacggatggaggactggctgaccgccaagctggcctacgagggcctgagcaagacctacctgtccaagacactggcccagtacacctccaagacatgcagcaactgtgggtttaccatcaccagcgccgactacgacagggtgctggagaagctgaagaagacagcaacaggctggatgaccacaattaacggcaaggagctgaaggtggagggccagattacctactacaacagatacaagagacagaacgtagtcaaggacctgtccgtcgagctggatagactgagcgaagaatctgtgaacaacgacatctcctcctggacaaagggcagaagcggagaagctctgagcctcctgaagaaaagattctcccatagacccgtgcaggagaagttcgtgtgcctgaactgcggcttcgagacacacgcagccgagcaagccgccctgaacatcgccagatcctggctgttcctgcggagccaggagtacaagaaataccagacaaacaagacaaccggcaacaccgataagagagccttcgtcgagacctggcagtccttttaccggaagaagcttaaggaggtgtggaaacctgccgtgcggtctggcggatctggcggaggctccgaggagctgcccgtggtgttcgaggacgtggccgtgtacttcaccagggaggagtgggccatgctggacaagaggcagaaggagctgtacagggacgtgatgaggatgaactacgagctgctggccagcctgggccccgccgcccccaagcccgacctgatcctgaagctggagaggagggccgccccctggatcaaggaccccaacggccccaagtggggcaagggcaggccccccggcaagggcggcccaagcagcggcgcccctcctcccagcggcggcagcccagccggctccccaacctctaccgaggagggcacctctgagtccgccacccccgagagcggccctggcacctccaccgagcccagcgagggcagcgcacccggcagccctgccggcagccccacctccacagaggagggaaccagcaccgagcccagcgaaggcagcgccccaggcaccagcaccgagcctagtgagcaggagattaaacggatcaacaagatcagaagaagacttgtgaaagacagcaacaccaagaaggccggcaagacaggccccatgaaaaccctgctggttagagtgatgacacccgatctgagagagcggctggaaaacctgagaaagaagcctgaaaatatcccccagcccatcagcaatacatctagagccaacctgaataagctgctgaccgattacaccgaaatgaagaaggcgatcctgcatgtgtactgggaagagttccagaaggaccctgtgggcctgatgagccgggtggcccagcctgccagcaagaagatcgatcagaacaagctgaaacctgagatggacgagaagggcaacctgaccaccgccggctttgcctgctctcagtgtggccagcccctgttcgtgtacaagctggagcaggtgtctgagaagggcaaggcttacaccaactacttcggacggtgcaatgtggccgagcacgaaaagctgatcctgctggcccagctgaagcccgagaaggatagcgacgaagccgtgacatatagcctgggaaagtttgggcagagggccctggatttctacagcattcatgtgaccaaggagtccacccaccccgtgaagcccctggcccagatcgccggaaacagatacgcctccggacctgtgggaaaggccctgagcgacgcatgtatgggcacaatcgcctccttcctgtctaagtaccaggacatcatcatcgaacaccagaaggtggtgaagggcaaccagaagagactggagagcctgcgggagctggccggcaaggaaaacctggaataccctagcgtgaccctgccacctcagcctcacaccaaggagggcgttgatgcctacaacgaagtgatcgcccgggtgcgaatgtgggtgaacctgaacctgtggcagaagctgaagctaagcagagatgatgccaagcctctgctgagactgaagggattcccttcctttcctctggtcgagagacaggccaacgaagtggactggtgggacatggtgtgtaacgtgaagaagctgatcaacgagaaaaaggaggatggcaaggtgttttggcagaatctggctggctacaagagacaggaagccctgagaccatacctgagcagcgaggaagatcggaagaagggaaagaaattcgctcggtaccagctgggcgacctgctgctgcacctggaaaagaagcacggcgaggactggggaaaggtgtacgacgaggcctgggagcggattgacaagaaagtggaaggcctgagcaagcacatcaagctggaagaggaacggagaagcgaggacgcccagagcaaggccgccctgaccgactggctgcgggctaaggccagcttcgtgatcgagggcctgaaggaggccgacaaggacgagttctgcagatgcgagctgaagctgcagaagtggtacggggacctgcggggaaagcccttcgccatcgaagccgagaacagcatcctggacatcagcggcttcagcaagcagtacaactgtgccttcatctggcagaaggacggcgtgaagaagctgaacctgtacctgatcatcaactacttcaagggcggcaagctgcggttcaagaagatcaaacctgaagccttcgaagccaacagattctacaccgtgatcaacaaaaagagcggcgagatcgtgcccatggaggtgaacttcaacttcgacgaccccaacctgatcatcctgcctctggcctttggcaagagacagggcagagaattcatctggaacgacctgctgtccctggaaaccggcagcctgaagctggccaacggaagagtgatcgagaagacactgtacaacagaagaacccggcaggatgagcctgccctgttcgtggccctgaccttcgagcggcgggaggtcctggactcctccaatatcaaaccaatgaacctgatcggcgtggcaagaggcgaaaacatccccgccgtgatcgccctgaccgaccccgagggctgcccactgagccggtttaaggatagcctgggaaacccaacccacatcctgagaatcggcgagagctataaggagaagcagcggaccatccaggccaagaaggaggtggagcagcggagagccggcggctacagccggaagtacgccagcaaagccaagaatctggcagacgatatggtgagaaacaccgctagagatctgctgtactacgccgtgacccaggatgccatgctgatcttcgccaacctgagccggggcttcggccggcagggcaagcggaccttcatggccgagagacagtacacacggatggaggactggctgaccgccaagctggcctacgagggcctgagcaagacctacctgtccaagacactggcccagtacacctccaagacatgcagcaactgtgggtttaccatcaccagcgccgactacgacagggtgctggagaagctgaagaagacagcaacaggctggatgaccacaattaacggcaaggagctgaaggtggagggccagattacctactacaacagatacaagagacagaacgtagtcaaggacctgtccgtcgagctggatagactgagcgaagaatctgtgaacaacgacatctcctcctggacaaagggcagaagcggagaagctctgagcctcctgaagaaaagattctcccatagacccgtgcaggagaagttcgtgtgcctgaactgcggcttcgagacacacgcagccgagcaagccgccctgaacatcgccagatcctggctgttcctgcggagccaggagtacaagaaataccagacaaacaagacaaccggcaacaccgataagagagccttcgtcgagacctggcagtccttttaccggaagaagcttaaggaggtgtggaaacctgccgtgcggtctggcggatctggcggaggctcctgaggagctgcccgtggtgttcgaggacgtggccgtgtacttcaccagggaggagtgggccatgctggacaagaggcagaaggagctgtacagggacgtgatgaggatgaactacgagctgctggccagcctgggccccgccgcccccaagcccgacctgatcctgaagctggagaggagggccgccccctggatcaaggaccccaacggccccaagtggggcaagggcaggccccccggcaagggatctggctccggcagcggccccaagaaaaagagaaaagtctaagctgccttctgcggggcttgccttctggccatgcccttcttctctcccttgcacctgtacctcttggtctttgaataaagcctgagtaggaaggctagcaaaaaaaaaaaaaaaaaaaaaaaaaaaaaaaaaaaaaaaaaaaaaaaaaaaaaaaaaaaaaaaaaaaaaaaaaaaaaaaa

SEQ ID NO: 15699 - RNA, 9485 nt, synthetic construct
  source 1..9485: mol_type = other RNA
aggaaataagagagaaaagaagagtaagaagaaatataagagccaccatggcccctaagaagaagcgtaaagtgagccggatggaacgcctcgtctacgaggtgcggcagaagtgcagaaacatcgaggacatctgcatctcctgcggatctctgaacgtgaccctggagcacccactgttcatcggcggcatgtgccagaactgtaaaaactgttttctggagtgtgcctatcaatacgacgatgacggctaccagagctactgcaccatctgttgcggcggaagagaggtgctgatgtgtggaaataacaactgctgccggtgcttctgcgtggaatgcgtggacctgctggtgggccccggcgccgcccaggccgctattaaggaagatccttggaactgctacatgtgcggccacaagggcacatacggcctgctgagacggagagaggactggcctagcagactgcagatgttcttcgccaataaccacgaccaggagttcgacccccctaaggtgtaccctcccgtccccgccgagaagagaaagcccatccgggtcctgagcctgttcgatggcatcgccaccggtctgctggtgctgaaggacctgggcatccaggtggataggtacattgcctccgaggtgtgcgaggactccatcaccgtgggaatggtgcgtcatcagggcaagatcatgtacgtgggcgacgtgcggagcgtgacacagaagcatatccaggagtggggccctttcgacctggtgatcggcggcagcccttgcaatgacctgagcatcgtgaacccagcccggaagggcctgtacgagggaaccggcagactgttcttcgagttttacagactgctgcacgacgcccggcctaaggaaggcgacgaccggcccttcttttggctgttcgagaatgtggtggccatgggagtcagcgacaagcgggatattagccggttcctggagagcaaccccgtgatgatcgatgccaaggaagtgagcgccgcccaccgggccagatacttctggggcaatctgcctggcatgaacagacccctggccagcaccgtgaacgacaagctggagctgcaggagtgcctggagcacggccggatcgccaagttcagcaaggtgagaaccatcaccacccgaagcaacagcatcaaacaaggcaaggaccagcactttcctgtgttcatgaacgagaaggaggacatcctgtggtgtaccgagatggagagagtgttcgggttcccagtccactacacagatgtcagcaacatgtctagactggccagacagagactgctgggaagaagctggtccgtccctgtgatcagacacctgttcgcccctctgaaggagtacttcgcctgcgtgagcagcggcaacagcaacgccaacagccggggccccagcttctctagcggcctggtgccactgtccctgagagggagccacatgggccccatggagatctacaaaaccgtgagcgcctggaagcggcagcctgtgcgcgtgctgagcctgtttcggaatatcgataaagtcctgaaaagcctgggattcctggagagcggctctggctccggcggtggcaccctgaagtacgtggaggatgtgacaaacgtggtcagacgggatgtggagaagtggggccccttcgatctggtgtacggcagcacccaacccctgggcagctcttgtgaccggtgccctggctggtacatgtttcagttccaccggatcctgcagtacgccctgccgagacaggagtcccagcggccattcttttggattttcatggacaacttgctgctgaccgaggatgaccaggaaactaccactcggttcctgcagaccgaagccgtgaccctgcaggacgtgagaggccgggactaccagaacgccatgcgggtgtggtccaacatccctggactgaaaagcaagcacgcacctctgacccctaaagaagaggagtacctgcaggcccaggtgcggagcagaagcaagctggacgcccctaaggtggatctgctggtgaagaattgcctcctgcccctgagagagtacttcaagtatttcagccagaatagtctgcccctgggaggcagcggcggcggcgccctggtgacatttgaggacgtcgccgtgcggttcacccaggaggaatgggctctgctggatccttctcagaaaatcctgtaccgggacgtgatgagagagacataccggaatctgacctccgtgggcatcaactgggaatgttgggaccttgaagcctgcttcagaagcctgggaagaaacctgagagtgcaggtggtgaagagaaagtgcgagctgaccaacagcggcccctgcgccgagggcggcccaagcagcggcgcccctcctcccagcggcggcagcccagccggctccccaacctctaccgaggagggcacctctgagtccgccacccccgagagcggccctggcacctccaccgagcccagcgagggcagcgcacccggcagccctgccggcagccccacctccacagaggagggaaccagcaccgagcccagcgaaggcagcgccccaggcaccagcaccgagcctagtgagcaggagattaaacggatcaacaagatcagaagaagacttgtgaaagacagcaacaccaagaaggccggcaagacaggccccatgaaaaccctgctggttagagtgatgacacccgatctgagagagcggctggaaaacctgagaaagaagcctgaaaatatcccccagcccatcagcaatacatctagagccaacctgaataagctgctgaccgattacaccgaaatgaagaaggcgatcctgcatgtgtactgggaagagttccagaaggaccctgtgggcctgatgagccgggtggcccagcctgccagcaagaagatcgatcagaacaagctgaaacctgagatggacgagaagggcaacctgaccaccgccggctttgcctgctctcagtgtggccagcccctgttcgtgtacaagctggagcaggtgtctgagaagggcaaggcttacaccaactacttcggacggtgcaatgtggccgagcacgaaaagctgatcctgctggcccagctgaagcccgagaaggatagcgacgaagccgtgacatatagcctgggaaagtttgggcagagggccctggatttctacagcattcatgtgaccaaggagtccacccaccccgtgaagcccctggcccagatcgccggaaacagatacgcctccggacctgtgggaaaggccctgagcgacgcatgtatgggcacaatcgcctccttcctgtctaagtaccaggacatcatcatcgaacaccagaaggtggtgaagggcaaccagaagagactggagagcctgcgggagctggccggcaaggaaaacctggaataccctagcgtgaccctgccacctcagcctcacaccaaggagggcgttgatgcctacaacgaagtgatcgcccgggtgcgaatgtgggtgaacctgaacctgtggcagaagctgaagctaagcagagatgatgccaagcctctgctgagactgaagggattcccttcctttcctctggtcgagagacaggccaacgaagtggactggtgggacatggtgtgtaacgtgaagaagctgatcaacgagaaaaaggaggatggcaaggtgttttggcagaatctggctggctacaagagacaggaagccctgagaccatacctgagcagcgaggaagatcggaagaagggaaagaaattcgctcggtaccagctgggcgacctgctgctgcacctggaaaagaagcacggcgaggactggggaaaggtgtacgacgaggcctgggagcggattgacaagaaagtggaaggcctgagcaagcacatcaagctggaagaggaacggagaagcgaggacgcccagagcaaggccgccctgaccgactggctgcgggctaaggccagcttcgtgatcgagggcctgaaggaggccgacaaggacgagttctgcagatgcgagctgaagctgcagaagtggtacggggacctgcggggaaagcccttcgccatcgaagccgagaacagcatcctggacatcagcggcttcagcaagcagtacaactgtgccttcatctggcagaaggacggcgtgaagaagctgaacctgtacctgatcatcaactacttcaagggcggcaagctgcggttcaagaagatcaaacctgaagccttcgaagccaacagattctacaccgtgatcaacaaaaagagcggcgagatcgtgcccatggaggtgaacttcaacttcgacgaccccaacctgatcatcctgcctctggcctttggcaagagacagggcagagaattcatctggaacgacctgctgtccctggaaaccggcagcctgaagctggccaacggaagagtgatcgagaagacactgtacaacagaagaacccggcaggatgagcctgccctgttcgtggccctgaccttcgagcggcgggaggtcctggactcctccaatatcaaaccaatgaacctgatcggcgtggcaagaggcgaaaacatccccgccgtgatcgccctgaccgaccccgagggctgcccactgagccggtttaaggatagcctgggaaacccaacccacatcctgagaatcggcgagagctataaggagaagcagcggaccatccaggccaagaaggaggtggagcagcggagagccggcggctacagccggaagtacgccagcaaagccaagaatctggcagacgatatggtgagaaacaccgctagagatctgctgtactacgccgtgacccaggatgccatgctgatcttcgccaacctgagccggggcttcggccggcagggcaagcggaccttcatggccgagagacagtacacacggatggaggactggctgaccgccaagctggcctacgagggcctgagcaagacctacctgtccaagacactggcccagtacacctccaagacatgcagcaactgtgggtttaccatcaccagcgccgactacgacagggtgctggagaagctgaagaagacagcaacaggctggatgaccacaattaacggcaaggagctgaaggtggagggccagattacctactacaacagatacaagagacagaacgtagtcaaggacctgtccgtcgagctggatagactgagcgaagaatctgtgaacaacgacatctcctcctggacaaagggcagaagcggagaagctctgagcctcctgaagaaaagattctcccatagacccgtgcaggagaagttcgtgtgcctgaactgcggcttcgagacacacgcagccgagcaagccgccctgaacatcgccagatcctggctgttcctgcggagccaggagtacaagaaataccagacaaacaagacaaccggcaacaccgataagagagccttcgtcgagacctggcagtccttttaccggaagaagcttaaggaggtgtggaaacctgccgtgcggtctggcggatctggcggaggctccttccaggaggccgtgaccttcaaggacgtggccgtggccttcaccgaggaggagctgggcatgctggacagcgcccagaagaagctgtacagggacgtgatgctggagaacttcaggaacctggtgagcgtgggccaccagagcttcaagcccgacatgatcagccagctggagagggaggagaagctgtggatgaaggagctgcagacccagaggggcaagcacagcggcgagtactgcgccggcggcccaagcagcggcgcccctcctcccagcggcggcagcccagccggctccccaacctctaccgaggagggcacctctgagtccgccacccccgagagcggccctggcacctccaccgagcccagcgagggcagcgcacccggcagccctgccggcagccccacctccacagaggagggaaccagcaccgagcccagcgaaggcagcgccccaggcaccagcaccgagcctagtgagcaggagattaaacggatcaacaagatcagaagaagacttgtgaaagacagcaacaccaagaaggccggcaagacaggccccatgaaaaccctgctggttagagtgatgacacccgatctgagagagcggctggaaaacctgagaaagaagcctgaaaatatcccccagcccatcagcaatacatctagagccaacctgaataagctgctgaccgattacaccgaaatgaagaaggcgatcctgcatgtgtactgggaagagttccagaaggaccctgtgggcctgatgagccgggtggcccagcctgccagcaagaagatcgatcagaacaagctgaaacctgagatggacgagaagggcaacctgaccaccgccggctttgcctgctctcagtgtggccagcccctgttcgtgtacaagctggagcaggtgtctgagaagggcaaggcttacaccaactacttcggacggtgcaatgtggccgagcacgaaaagctgatcctgctggcccagctgaagcccgagaaggatagcgacgaagccgtgacatatagcctgggaaagtttgggcagagggccctggatttctacagcattcatgtgaccaaggagtccacccaccccgtgaagcccctggcccagatcgccggaaacagatacgcctccggacctgtgggaaaggccctgagcgacgcatgtatgggcacaatcgcctccttcctgtctaagtaccaggacatcatcatcgaacaccagaaggtggtgaagggcaaccagaagagactggagagcctgcgggagctggccggcaaggaaaacctggaataccctagcgtgaccctgccacctcagcctcacaccaaggagggcgttgatgcctacaacgaagtgatcgcccgggtgcgaatgtgggtgaacctgaacctgtggcagaagctgaagctaagcagagatgatgccaagcctctgctgagactgaagggattcccttcctttcctctggtcgagagacaggccaacgaagtggactggtgggacatggtgtgtaacgtgaagaagctgatcaacgagaaaaaggaggatggcaaggtgttttggcagaatctggctggctacaagagacaggaagccctgagaccatacctgagcagcgaggaagatcggaagaagggaaagaaattcgctcggtaccagctgggcgacctgctgctgcacctggaaaagaagcacggcgaggactggggaaaggtgtacgacgaggcctgggagcggattgacaagaaagtggaaggcctgagcaagcacatcaagctggaagaggaacggagaagcgaggacgcccagagcaaggccgccctgaccgactggctgcgggctaaggccagcttcgtgatcgagggcctgaaggaggccgacaaggacgagttctgcagatgcgagctgaagctgcagaagtggtacggggacctgcggggaaagcccttcgccatcgaagccgagaacagcatcctggacatcagcggcttcagcaagcagtacaactgtgccttcatctggcagaaggacggcgtgaagaagctgaacctgtacctgatcatcaactacttcaagggcggcaagctgcggttcaagaagatcaaacctgaagccttcgaagccaacagattctacaccgtgatcaacaaaaagagcggcgagatcgtgcccatggaggtgaacttcaacttcgacgaccccaacctgatcatcctgcctctggcctttggcaagagacagggcagagaattcatctggaacgacctgctgtccctggaaaccggcagcctgaagctggccaacggaagagtgatcgagaagacactgtacaacagaagaacccggcaggatgagcctgccctgttcgtggccctgaccttcgagcggcgggaggtcctggactcctccaatatcaaaccaatgaacctgatcggcgtggcaagaggcgaaaacatccccgccgtgatcgccctgaccgaccccgagggctgcccactgagccggtttaaggatagcctgggaaacccaacccacatcctgagaatcggcgagagctataaggagaagcagcggaccatccaggccaagaaggaggtggagcagcggagagccggcggctacagccggaagtacgccagcaaagccaagaatctggcagacgatatggtgagaaacaccgctagagatctgctgtactacgccgtgacccaggatgccatgctgatcttcgccaacctgagccggggcttcggccggcagggcaagcggaccttcatggccgagagacagtacacacggatggaggactggctgaccgccaagctggcctacgagggcctgagcaagacctacctgtccaagacactggcccagtacacctccaagacatgcagcaactgtgggtttaccatcaccagcgccgactacgacagggtgctggagaagctgaagaagacagcaacaggctggatgaccacaattaacggcaaggagctgaaggtggagggccagattacctactacaacagatacaagagacagaacgtagtcaaggacctgtccgtcgagctggatagactgagcgaagaatctgtgaacaacgacatctcctcctggacaaagggcagaagcggagaagctctgagcctcctgaagaaaagattctcccatagacccgtgcaggagaagttcgtgtgcctgaactgcggcttcgagacacacgcagccgagcaagccgccctgaacatcgccagatcctggctgttcctgcggagccaggagtacaagaaataccagacaaacaagacaaccggcaacaccgataagagagccttcgtcgagacctggcagtccttttaccggaagaagcttaaggaggtgtggaaacctgccgtgcggtctggcggatctggcggaggctcctttccaggaggccgtgaccttcaaggacgtggccgtggccttcaccgaggaggagctgggcatgctggacagcgcccagaagaagctgtacagggacgtgatgctggagaacttcaggaacctggtgagcgtgggccaccagagcttcaagcccgacatgatcagccagctggagagggaggagaagctgtggatgaaggagctgcagacccagaggggcaagcacagcggcgagtactgcgccggatctggctccggcagcggccccaagaaaaagagaaaagtctaagctgccttctgcggggcttgccttctggccatgcccttcttctctcccttgcacctgtacctcttggtctttgaataaagcctgagtaggaaggctagcaaaaaaaaaaaaaaaaaaaaaaaaaaaaaaaaaaaaaaaaaaaaaaaaaaaaaaaaaaaaaaaaaaaaaaaaaaaaaaaa

SEQ ID NO: 15700 - RNA, 9485 nt, synthetic construct
  source 1..9485: mol_type = other RNA
aggaaataagagagaaaagaagagtaagaagaaatataagagccaccatggcccctaagaagaagcgtaaagtgagccggatggaacgcctcgtctacgaggtgcggcagaagtgcagaaacatcgaggacatctgcatctcctgcggatctctgaacgtgaccctggagcacccactgttcatcggcggcatgtgccagaactgtaaaaactgttttctggagtgtgcctatcaatacgacgatgacggctaccagagctactgcaccatctgttgcggcggaagagaggtgctgatgtgtggaaataacaactgctgccggtgcttctgcgtggaatgcgtggacctgctggtgggccccggcgccgcccaggccgctattaaggaagatccttggaactgctacatgtgcggccacaagggcacatacggcctgctgagacggagagaggactggcctagcagactgcagatgttcttcgccaataaccacgaccaggagttcgacccccctaaggtgtaccctcccgtccccgccgagaagagaaagcccatccgggtcctgagcctgttcgatggcatcgccaccggtctgctggtgctgaaggacctgggcatccaggtggataggtacattgcctccgaggtgtgcgaggactccatcaccgtgggaatggtgcgtcatcagggcaagatcatgtacgtgggcgacgtgcggagcgtgacacagaagcatatccaggagtggggccctttcgacctggtgatcggcggcagcccttgcaatgacctgagcatcgtgaacccagcccggaagggcctgtacgagggaaccggcagactgttcttcgagttttacagactgctgcacgacgcccggcctaaggaaggcgacgaccggcccttcttttggctgttcgagaatgtggtggccatgggagtcagcgacaagcgggatattagccggttcctggagagcaaccccgtgatgatcgatgccaaggaagtgagcgccgcccaccgggccagatacttctggggcaatctgcctggcatgaacagacccctggccagcaccgtgaacgacaagctggagctgcaggagtgcctggagcacggccggatcgccaagttcagcaaggtgagaaccatcaccacccgaagcaacagcatcaaacaaggcaaggaccagcactttcctgtgttcatgaacgagaaggaggacatcctgtggtgtaccgagatggagagagtgttcgggttcccagtccactacacagatgtcagcaacatgtctagactggccagacagagactgctgggaagaagctggtccgtccctgtgatcagacacctgttcgcccctctgaaggagtacttcgcctgcgtgagcagcggcaacagcaacgccaacagccggggccccagcttctctagcggcctggtgccactgtccctgagagggagccacatgggccccatggagatctacaaaaccgtgagcgcctggaagcggcagcctgtgcgcgtgctgagcctgtttcggaatatcgataaagtcctgaaaagcctgggattcctggagagcggctctggctccggcggtggcaccctgaagtacgtggaggatgtgacaaacgtggtcagacgggatgtggagaagtggggccccttcgatctggtgtacggcagcacccaacccctgggcagctcttgtgaccggtgccctggctggtacatgtttcagttccaccggatcctgcagtacgccctgccgagacaggagtcccagcggccattcttttggattttcatggacaacttgctgctgaccgaggatgaccaggaaactaccactcggttcctgcagaccgaagccgtgaccctgcaggacgtgagaggccgggactaccagaacgccatgcgggtgtggtccaacatccctggactgaaaagcaagcacgcacctctgacccctaaagaagaggagtacctgcaggcccaggtgcggagcagaagcaagctggacgcccctaaggtggatctgctggtgaagaattgcctcctgcccctgagagagtacttcaagtatttcagccagaatagtctgcccctgggaggcagcggcggcggcgccctggtgacatttgaggacgtcgccgtgcggttcacccaggaggaatgggctctgctggatccttctcagaaaatcctgtaccgggacgtgatgagagagacataccggaatctgacctccgtgggcatcaactgggaatgttgggaccttgaagcctgcttcagaagcctgggaagaaacctgagagtgcaggtggtgaagagaaagtgcgagctgaccaacagcggcccctgcgccgagggcggcccaagcagcggcgcccctcctcccagcggcggcagcccagccggctccccaacctctaccgaggagggcacctctgagtccgccacccccgagagcggccctggcacctccaccgagcccagcgagggcagcgcacccggcagccctgccggcagccccacctccacagaggagggaaccagcaccgagcccagcgaaggcagcgccccaggcaccagcaccgagcctagtgagcaggagattaaacggatcaacaagatcagaagaagacttgtgaaagacagcaacaccaagaaggccggcaagacaggccccatgaaaaccctgctggttagagtgatgacacccgatctgagagagcggctggaaaacctgagaaagaagcctgaaaatatcccccagcccatcagcaatacatctagagccaacctgaataagctgctgaccgattacaccgaaatgaagaaggcgatcctgcatgtgtactgggaagagttccagaaggaccctgtgggcctgatgagccgggtggcccagcctgccagcaagaagatcgatcagaacaagctgaaacctgagatggacgagaagggcaacctgaccaccgccggctttgcctgctctcagtgtggccagcccctgttcgtgtacaagctggagcaggtgtctgagaagggcaaggcttacaccaactacttcggacggtgcaatgtggccgagcacgaaaagctgatcctgctggcccagctgaagcccgagaaggatagcgacgaagccgtgacatatagcctgggaaagtttgggcagagggccctggatttctacagcattcatgtgaccaaggagtccacccaccccgtgaagcccctggcccagatcgccggaaacagatacgcctccggacctgtgggaaaggccctgagcgacgcatgtatgggcacaatcgcctccttcctgtctaagtaccaggacatcatcatcgaacaccagaaggtggtgaagggcaaccagaagagactggagagcctgcgggagctggccggcaaggaaaacctggaataccctagcgtgaccctgccacctcagcctcacaccaaggagggcgttgatgcctacaacgaagtgatcgcccgggtgcgaatgtgggtgaacctgaacctgtggcagaagctgaagctaagcagagatgatgccaagcctctgctgagactgaagggattcccttcctttcctctggtcgagagacaggccaacgaagtggactggtgggacatggtgtgtaacgtgaagaagctgatcaacgagaaaaaggaggatggcaaggtgttttggcagaatctggctggctacaagagacaggaagccctgagaccatacctgagcagcgaggaagatcggaagaagggaaagaaattcgctcggtaccagctgggcgacctgctgctgcacctggaaaagaagcacggcgaggactggggaaaggtgtacgacgaggcctgggagcggattgacaagaaagtggaaggcctgagcaagcacatcaagctggaagaggaacggagaagcgaggacgcccagagcaaggccgccctgaccgactggctgcgggctaaggccagcttcgtgatcgagggcctgaaggaggccgacaaggacgagttctgcagatgcgagctgaagctgcagaagtggtacggggacctgcggggaaagcccttcgccatcgaagccgagaacagcatcctggacatcagcggcttcagcaagcagtacaactgtgccttcatctggcagaaggacggcgtgaagaagctgaacctgtacctgatcatcaactacttcaagggcggcaagctgcggttcaagaagatcaaacctgaagccttcgaagccaacagattctacaccgtgatcaacaaaaagagcggcgagatcgtgcccatggaggtgaacttcaacttcgacgaccccaacctgatcatcctgcctctggcctttggcaagagacagggcagagaattcatctggaacgacctgctgtccctggaaaccggcagcctgaagctggccaacggaagagtgatcgagaagacactgtacaacagaagaacccggcaggatgagcctgccctgttcgtggccctgaccttcgagcggcgggaggtcctggactcctccaatatcaaaccaatgaacctgatcggcgtggcaagaggcgaaaacatccccgccgtgatcgccctgaccgaccccgagggctgcccactgagccggtttaaggatagcctgggaaacccaacccacatcctgagaatcggcgagagctataaggagaagcagcggaccatccaggccaagaaggaggtggagcagcggagagccggcggctacagccggaagtacgccagcaaagccaagaatctggcagacgatatggtgagaaacaccgctagagatctgctgtactacgccgtgacccaggatgccatgctgatcttcgccaacctgagccggggcttcggccggcagggcaagcggaccttcatggccgagagacagtacacacggatggaggactggctgaccgccaagctggcctacgagggcctgagcaagacctacctgtccaagacactggcccagtacacctccaagacatgcagcaactgtgggtttaccatcaccagcgccgactacgacagggtgctggagaagctgaagaagacagcaacaggctggatgaccacaattaacggcaaggagctgaaggtggagggccagattacctactacaacagatacaagagacagaacgtagtcaaggacctgtccgtcgagctggatagactgagcgaagaatctgtgaacaacgacatctcctcctggacaaagggcagaagcggagaagctctgagcctcctgaagaaaagattctcccatagacccgtgcaggagaagttcgtgtgcctgaactgcggcttcgagacacacgcagccgagcaagccgccctgaacatcgccagatcctggctgttcctgcggagccaggagtacaagaaataccagacaaacaagacaaccggcaacaccgataagagagccttcgtcgagacctggcagtccttttaccggaagaagcttaaggaggtgtggaaacctgccgtgcggtctggcggatctggcggaggctccatgggccagctgaccttcaacgacgtgaccatcgagttcagcctggaggagtggcagtgcctggacaagccccagcagaacctgtacagggaggtgatgctggagaactacaggaacctggtgttcctgggcatcgccgtgagcaagcccgacctgatcacctgcctgaagcagggcaaggagccctggaacatcaggaggcacgagatggtgaccaagccccccgccatgtgcagccacttcggcggcccaagcagcggcgcccctcctcccagcggcggcagcccagccggctccccaacctctaccgaggagggcacctctgagtccgccacccccgagagcggccctggcacctccaccgagcccagcgagggcagcgcacccggcagccctgccggcagccccacctccacagaggagggaaccagcaccgagcccagcgaaggcagcgccccaggcaccagcaccgagcctagtgagcaggagattaaacggatcaacaagatcagaagaagacttgtgaaagacagcaacaccaagaaggccggcaagacaggccccatgaaaaccctgctggttagagtgatgacacccgatctgagagagcggctggaaaacctgagaaagaagcctgaaaatatcccccagcccatcagcaatacatctagagccaacctgaataagctgctgaccgattacaccgaaatgaagaaggcgatcctgcatgtgtactgggaagagttccagaaggaccctgtgggcctgatgagccgggtggcccagcctgccagcaagaagatcgatcagaacaagctgaaacctgagatggacgagaagggcaacctgaccaccgccggctttgcctgctctcagtgtggccagcccctgttcgtgtacaagctggagcaggtgtctgagaagggcaaggcttacaccaactacttcggacggtgcaatgtggccgagcacgaaaagctgatcctgctggcccagctgaagcccgagaaggatagcgacgaagccgtgacatatagcctgggaaagtttgggcagagggccctggatttctacagcattcatgtgaccaaggagtccacccaccccgtgaagcccctggcccagatcgccggaaacagatacgcctccggacctgtgggaaaggccctgagcgacgcatgtatgggcacaatcgcctccttcctgtctaagtaccaggacatcatcatcgaacaccagaaggtggtgaagggcaaccagaagagactggagagcctgcgggagctggccggcaaggaaaacctggaataccctagcgtgaccctgccacctcagcctcacaccaaggagggcgttgatgcctacaacgaagtgatcgcccgggtgcgaatgtgggtgaacctgaacctgtggcagaagctgaagctaagcagagatgatgccaagcctctgctgagactgaagggattcccttcctttcctctggtcgagagacaggccaacgaagtggactggtgggacatggtgtgtaacgtgaagaagctgatcaacgagaaaaaggaggatggcaaggtgttttggcagaatctggctggctacaagagacaggaagccctgagaccatacctgagcagcgaggaagatcggaagaagggaaagaaattcgctcggtaccagctgggcgacctgctgctgcacctggaaaagaagcacggcgaggactggggaaaggtgtacgacgaggcctgggagcggattgacaagaaagtggaaggcctgagcaagcacatcaagctggaagaggaacggagaagcgaggacgcccagagcaaggccgccctgaccgactggctgcgggctaaggccagcttcgtgatcgagggcctgaaggaggccgacaaggacgagttctgcagatgcgagctgaagctgcagaagtggtacggggacctgcggggaaagcccttcgccatcgaagccgagaacagcatcctggacatcagcggcttcagcaagcagtacaactgtgccttcatctggcagaaggacggcgtgaagaagctgaacctgtacctgatcatcaactacttcaagggcggcaagctgcggttcaagaagatcaaacctgaagccttcgaagccaacagattctacaccgtgatcaacaaaaagagcggcgagatcgtgcccatggaggtgaacttcaacttcgacgaccccaacctgatcatcctgcctctggcctttggcaagagacagggcagagaattcatctggaacgacctgctgtccctggaaaccggcagcctgaagctggccaacggaagagtgatcgagaagacactgtacaacagaagaacccggcaggatgagcctgccctgttcgtggccctgaccttcgagcggcgggaggtcctggactcctccaatatcaaaccaatgaacctgatcggcgtggcaagaggcgaaaacatccccgccgtgatcgccctgaccgaccccgagggctgcccactgagccggtttaaggatagcctgggaaacccaacccacatcctgagaatcggcgagagctataaggagaagcagcggaccatccaggccaagaaggaggtggagcagcggagagccggcggctacagccggaagtacgccagcaaagccaagaatctggcagacgatatggtgagaaacaccgctagagatctgctgtactacgccgtgacccaggatgccatgctgatcttcgccaacctgagccggggcttcggccggcagggcaagcggaccttcatggccgagagacagtacacacggatggaggactggctgaccgccaagctggcctacgagggcctgagcaagacctacctgtccaagacactggcccagtacacctccaagacatgcagcaactgtgggtttaccatcaccagcgccgactacgacagggtgctggagaagctgaagaagacagcaacaggctggatgaccacaattaacggcaaggagctgaaggtggagggccagattacctactacaacagatacaagagacagaacgtagtcaaggacctgtccgtcgagctggatagactgagcgaagaatctgtgaacaacgacatctcctcctggacaaagggcagaagcggagaagctctgagcctcctgaagaaaagattctcccatagacccgtgcaggagaagttcgtgtgcctgaactgcggcttcgagacacacgcagccgagcaagccgccctgaacatcgccagatcctggctgttcctgcggagccaggagtacaagaaataccagacaaacaagacaaccggcaacaccgataagagagccttcgtcgagacctggcagtccttttaccggaagaagcttaaggaggtgtggaaacctgccgtgcggtctggcggatctggcggaggctcctatgggccagctgaccttcaacgacgtgaccatcgagttcagcctggaggagtggcagtgcctggacaagccccagcagaacctgtacagggaggtgatgctggagaactacaggaacctggtgttcctgggcatcgccgtgagcaagcccgacctgatcacctgcctgaagcagggcaaggagccctggaacatcaggaggcacgagatggtgaccaagccccccgccatgtgcagccacttcggatctggctccggcagcggccccaagaaaaagagaaaagtctaagctgccttctgcggggcttgccttctggccatgcccttcttctctcccttgcacctgtacctcttggtctttgaataaagcctgagtaggaaggctagcaaaaaaaaaaaaaaaaaaaaaaaaaaaaaaaaaaaaaaaaaaaaaaaaaaaaaaaaaaaaaaaaaaaaaaaaaaaaaaaa

SEQ ID NO: 15701 - RNA, 9485 nt, synthetic construct
  source 1..9485: mol_type = other RNA
aggaaataagagagaaaagaagagtaagaagaaatataagagccaccatggcccctaagaagaagcgtaaagtgagccggatggaacgcctcgtctacgaggtgcggcagaagtgcagaaacatcgaggacatctgcatctcctgcggatctctgaacgtgaccctggagcacccactgttcatcggcggcatgtgccagaactgtaaaaactgttttctggagtgtgcctatcaatacgacgatgacggctaccagagctactgcaccatctgttgcggcggaagagaggtgctgatgtgtggaaataacaactgctgccggtgcttctgcgtggaatgcgtggacctgctggtgggccccggcgccgcccaggccgctattaaggaagatccttggaactgctacatgtgcggccacaagggcacatacggcctgctgagacggagagaggactggcctagcagactgcagatgttcttcgccaataaccacgaccaggagttcgacccccctaaggtgtaccctcccgtccccgccgagaagagaaagcccatccgggtcctgagcctgttcgatggcatcgccaccggtctgctggtgctgaaggacctgggcatccaggtggataggtacattgcctccgaggtgtgcgaggactccatcaccgtgggaatggtgcgtcatcagggcaagatcatgtacgtgggcgacgtgcggagcgtgacacagaagcatatccaggagtggggccctttcgacctggtgatcggcggcagcccttgcaatgacctgagcatcgtgaacccagcccggaagggcctgtacgagggaaccggcagactgttcttcgagttttacagactgctgcacgacgcccggcctaaggaaggcgacgaccggcccttcttttggctgttcgagaatgtggtggccatgggagtcagcgacaagcgggatattagccggttcctggagagcaaccccgtgatgatcgatgccaaggaagtgagcgccgcccaccgggccagatacttctggggcaatctgcctggcatgaacagacccctggccagcaccgtgaacgacaagctggagctgcaggagtgcctggagcacggccggatcgccaagttcagcaaggtgagaaccatcaccacccgaagcaacagcatcaaacaaggcaaggaccagcactttcctgtgttcatgaacgagaaggaggacatcctgtggtgtaccgagatggagagagtgttcgggttcccagtccactacacagatgtcagcaacatgtctagactggccagacagagactgctgggaagaagctggtccgtccctgtgatcagacacctgttcgcccctctgaaggagtacttcgcctgcgtgagcagcggcaacagcaacgccaacagccggggccccagcttctctagcggcctggtgccactgtccctgagagggagccacatgggccccatggagatctacaaaaccgtgagcgcctggaagcggcagcctgtgcgcgtgctgagcctgtttcggaatatcgataaagtcctgaaaagcctgggattcctggagagcggctctggctccggcggtggcaccctgaagtacgtggaggatgtgacaaacgtggtcagacgggatgtggagaagtggggccccttcgatctggtgtacggcagcacccaacccctgggcagctcttgtgaccggtgccctggctggtacatgtttcagttccaccggatcctgcagtacgccctgccgagacaggagtcccagcggccattcttttggattttcatggacaacttgctgctgaccgaggatgaccaggaaactaccactcggttcctgcagaccgaagccgtgaccctgcaggacgtgagaggccgggactaccagaacgccatgcgggtgtggtccaacatccctggactgaaaagcaagcacgcacctctgacccctaaagaagaggagtacctgcaggcccaggtgcggagcagaagcaagctggacgcccctaaggtggatctgctggtgaagaattgcctcctgcccctgagagagtacttcaagtatttcagccagaatagtctgcccctgggaggcagcggcggcggcgccctggtgacatttgaggacgtcgccgtgcggttcacccaggaggaatgggctctgctggatccttctcagaaaatcctgtaccgggacgtgatgagagagacataccggaatctgacctccgtgggcatcaactgggaatgttgggaccttgaagcctgcttcagaagcctgggaagaaacctgagagtgcaggtggtgaagagaaagtgcgagctgaccaacagcggcccctgcgccgagggcggcccaagcagcggcgcccctcctcccagcggcggcagcccagccggctccccaacctctaccgaggagggcacctctgagtccgccacccccgagagcggccctggcacctccaccgagcccagcgagggcagcgcacccggcagccctgccggcagccccacctccacagaggagggaaccagcaccgagcccagcgaaggcagcgccccaggcaccagcaccgagcctagtgagcaggagattaaacggatcaacaagatcagaagaagacttgtgaaagacagcaacaccaagaaggccggcaagacaggccccatgaaaaccctgctggttagagtgatgacacccgatctgagagagcggctggaaaacctgagaaagaagcctgaaaatatcccccagcccatcagcaatacatctagagccaacctgaataagctgctgaccgattacaccgaaatgaagaaggcgatcctgcatgtgtactgggaagagttccagaaggaccctgtgggcctgatgagccgggtggcccagcctgccagcaagaagatcgatcagaacaagctgaaacctgagatggacgagaagggcaacctgaccaccgccggctttgcctgctctcagtgtggccagcccctgttcgtgtacaagctggagcaggtgtctgagaagggcaaggcttacaccaactacttcggacggtgcaatgtggccgagcacgaaaagctgatcctgctggcccagctgaagcccgagaaggatagcgacgaagccgtgacatatagcctgggaaagtttgggcagagggccctggatttctacagcattcatgtgaccaaggagtccacccaccccgtgaagcccctggcccagatcgccggaaacagatacgcctccggacctgtgggaaaggccctgagcgacgcatgtatgggcacaatcgcctccttcctgtctaagtaccaggacatcatcatcgaacaccagaaggtggtgaagggcaaccagaagagactggagagcctgcgggagctggccggcaaggaaaacctggaataccctagcgtgaccctgccacctcagcctcacaccaaggagggcgttgatgcctacaacgaagtgatcgcccgggtgcgaatgtgggtgaacctgaacctgtggcagaagctgaagctaagcagagatgatgccaagcctctgctgagactgaagggattcccttcctttcctctggtcgagagacaggccaacgaagtggactggtgggacatggtgtgtaacgtgaagaagctgatcaacgagaaaaaggaggatggcaaggtgttttggcagaatctggctggctacaagagacaggaagccctgagaccatacctgagcagcgaggaagatcggaagaagggaaagaaattcgctcggtaccagctgggcgacctgctgctgcacctggaaaagaagcacggcgaggactggggaaaggtgtacgacgaggcctgggagcggattgacaagaaagtggaaggcctgagcaagcacatcaagctggaagaggaacggagaagcgaggacgcccagagcaaggccgccctgaccgactggctgcgggctaaggccagcttcgtgatcgagggcctgaaggaggccgacaaggacgagttctgcagatgcgagctgaagctgcagaagtggtacggggacctgcggggaaagcccttcgccatcgaagccgagaacagcatcctggacatcagcggcttcagcaagcagtacaactgtgccttcatctggcagaaggacggcgtgaagaagctgaacctgtacctgatcatcaactacttcaagggcggcaagctgcggttcaagaagatcaaacctgaagccttcgaagccaacagattctacaccgtgatcaacaaaaagagcggcgagatcgtgcccatggaggtgaacttcaacttcgacgaccccaacctgatcatcctgcctctggcctttggcaagagacagggcagagaattcatctggaacgacctgctgtccctggaaaccggcagcctgaagctggccaacggaagagtgatcgagaagacactgtacaacagaagaacccggcaggatgagcctgccctgttcgtggccctgaccttcgagcggcgggaggtcctggactcctccaatatcaaaccaatgaacctgatcggcgtggcaagaggcgaaaacatccccgccgtgatcgccctgaccgaccccgagggctgcccactgagccggtttaaggatagcctgggaaacccaacccacatcctgagaatcggcgagagctataaggagaagcagcggaccatccaggccaagaaggaggtggagcagcggagagccggcggctacagccggaagtacgccagcaaagccaagaatctggcagacgatatggtgagaaacaccgctagagatctgctgtactacgccgtgacccaggatgccatgctgatcttcgccaacctgagccggggcttcggccggcagggcaagcggaccttcatggccgagagacagtacacacggatggaggactggctgaccgccaagctggcctacgagggcctgagcaagacctacctgtccaagacactggcccagtacacctccaagacatgcagcaactgtgggtttaccatcaccagcgccgactacgacagggtgctggagaagctgaagaagacagcaacaggctggatgaccacaattaacggcaaggagctgaaggtggagggccagattacctactacaacagatacaagagacagaacgtagtcaaggacctgtccgtcgagctggatagactgagcgaagaatctgtgaacaacgacatctcctcctggacaaagggcagaagcggagaagctctgagcctcctgaagaaaagattctcccatagacccgtgcaggagaagttcgtgtgcctgaactgcggcttcgagacacacgcagccgagcaagccgccctgaacatcgccagatcctggctgttcctgcggagccaggagtacaagaaataccagacaaacaagacaaccggcaacaccgataagagagccttcgtcgagacctggcagtccttttaccggaagaagcttaaggaggtgtggaaacctgccgtgcggtctggcggatctggcggaggctccatgcccctgaaggccaggtaccaggagatggtgaccttcgaggacgtggccgtgcacttcaccaagaccgagtggaccggcctgagccccgcccagagggccctgtacaggagcgtgatgctggagaacttcggcaacctgaccgccctgggctaccccgtgcccaagcccgccctgatcagcctgctggagggcggcgacatggcctggggcctggaggcccaggacgacccccccgccgagggcggcccaagcagcggcgcccctcctcccagcggcggcagcccagccggctccccaacctctaccgaggagggcacctctgagtccgccacccccgagagcggccctggcacctccaccgagcccagcgagggcagcgcacccggcagccctgccggcagccccacctccacagaggagggaaccagcaccgagcccagcgaaggcagcgccccaggcaccagcaccgagcctagtgagcaggagattaaacggatcaacaagatcagaagaagacttgtgaaagacagcaacaccaagaaggccggcaagacaggccccatgaaaaccctgctggttagagtgatgacacccgatctgagagagcggctggaaaacctgagaaagaagcctgaaaatatcccccagcccatcagcaatacatctagagccaacctgaataagctgctgaccgattacaccgaaatgaagaaggcgatcctgcatgtgtactgggaagagttccagaaggaccctgtgggcctgatgagccgggtggcccagcctgccagcaagaagatcgatcagaacaagctgaaacctgagatggacgagaagggcaacctgaccaccgccggctttgcctgctctcagtgtggccagcccctgttcgtgtacaagctggagcaggtgtctgagaagggcaaggcttacaccaactacttcggacggtgcaatgtggccgagcacgaaaagctgatcctgctggcccagctgaagcccgagaaggatagcgacgaagccgtgacatatagcctgggaaagtttgggcagagggccctggatttctacagcattcatgtgaccaaggagtccacccaccccgtgaagcccctggcccagatcgccggaaacagatacgcctccggacctgtgggaaaggccctgagcgacgcatgtatgggcacaatcgcctccttcctgtctaagtaccaggacatcatcatcgaacaccagaaggtggtgaagggcaaccagaagagactggagagcctgcgggagctggccggcaaggaaaacctggaataccctagcgtgaccctgccacctcagcctcacaccaaggagggcgttgatgcctacaacgaagtgatcgcccgggtgcgaatgtgggtgaacctgaacctgtggcagaagctgaagctaagcagagatgatgccaagcctctgctgagactgaagggattcccttcctttcctctggtcgagagacaggccaacgaagtggactggtgggacatggtgtgtaacgtgaagaagctgatcaacgagaaaaaggaggatggcaaggtgttttggcagaatctggctggctacaagagacaggaagccctgagaccatacctgagcagcgaggaagatcggaagaagggaaagaaattcgctcggtaccagctgggcgacctgctgctgcacctggaaaagaagcacggcgaggactggggaaaggtgtacgacgaggcctgggagcggattgacaagaaagtggaaggcctgagcaagcacatcaagctggaagaggaacggagaagcgaggacgcccagagcaaggccgccctgaccgactggctgcgggctaaggccagcttcgtgatcgagggcctgaaggaggccgacaaggacgagttctgcagatgcgagctgaagctgcagaagtggtacggggacctgcggggaaagcccttcgccatcgaagccgagaacagcatcctggacatcagcggcttcagcaagcagtacaactgtgccttcatctggcagaaggacggcgtgaagaagctgaacctgtacctgatcatcaactacttcaagggcggcaagctgcggttcaagaagatcaaacctgaagccttcgaagccaacagattctacaccgtgatcaacaaaaagagcggcgagatcgtgcccatggaggtgaacttcaacttcgacgaccccaacctgatcatcctgcctctggcctttggcaagagacagggcagagaattcatctggaacgacctgctgtccctggaaaccggcagcctgaagctggccaacggaagagtgatcgagaagacactgtacaacagaagaacccggcaggatgagcctgccctgttcgtggccctgaccttcgagcggcgggaggtcctggactcctccaatatcaaaccaatgaacctgatcggcgtggcaagaggcgaaaacatccccgccgtgatcgccctgaccgaccccgagggctgcccactgagccggtttaaggatagcctgggaaacccaacccacatcctgagaatcggcgagagctataaggagaagcagcggaccatccaggccaagaaggaggtggagcagcggagagccggcggctacagccggaagtacgccagcaaagccaagaatctggcagacgatatggtgagaaacaccgctagagatctgctgtactacgccgtgacccaggatgccatgctgatcttcgccaacctgagccggggcttcggccggcagggcaagcggaccttcatggccgagagacagtacacacggatggaggactggctgaccgccaagctggcctacgagggcctgagcaagacctacctgtccaagacactggcccagtacacctccaagacatgcagcaactgtgggtttaccatcaccagcgccgactacgacagggtgctggagaagctgaagaagacagcaacaggctggatgaccacaattaacggcaaggagctgaaggtggagggccagattacctactacaacagatacaagagacagaacgtagtcaaggacctgtccgtcgagctggatagactgagcgaagaatctgtgaacaacgacatctcctcctggacaaagggcagaagcggagaagctctgagcctcctgaagaaaagattctcccatagacccgtgcaggagaagttcgtgtgcctgaactgcggcttcgagacacacgcagccgagcaagccgccctgaacatcgccagatcctggctgttcctgcggagccaggagtacaagaaataccagacaaacaagacaaccggcaacaccgataagagagccttcgtcgagacctggcagtccttttaccggaagaagcttaaggaggtgtggaaacctgccgtgcggtctggcggatctggcggaggctcctatgcccctgaaggccaggtaccaggagatggtgaccttcgaggacgtggccgtgcacttcaccaagaccgagtggaccggcctgagccccgcccagagggccctgtacaggagcgtgatgctggagaacttcggcaacctgaccgccctgggctaccccgtgcccaagcccgccctgatcagcctgctggagggcggcgacatggcctggggcctggaggcccaggacgacccccccgccgagggatctggctccggcagcggccccaagaaaaagagaaaagtctaagctgccttctgcggggcttgccttctggccatgcccttcttctctcccttgcacctgtacctcttggtctttgaataaagcctgagtaggaaggctagcaaaaaaaaaaaaaaaaaaaaaaaaaaaaaaaaaaaaaaaaaaaaaaaaaaaaaaaaaaaaaaaaaaaaaaaaaaaaaaaa

SEQ ID NO: 15702 - RNA, 9485 nt, synthetic construct
  source 1..9485: mol_type = other RNA
aggaaataagagagaaaagaagagtaagaagaaatataagagccaccatggcccctaagaagaagcgtaaagtgagccggatggaacgcctcgtctacgaggtgcggcagaagtgcagaaacatcgaggacatctgcatctcctgcggatctctgaacgtgaccctggagcacccactgttcatcggcggcatgtgccagaactgtaaaaactgttttctggagtgtgcctatcaatacgacgatgacggctaccagagctactgcaccatctgttgcggcggaagagaggtgctgatgtgtggaaataacaactgctgccggtgcttctgcgtggaatgcgtggacctgctggtgggccccggcgccgcccaggccgctattaaggaagatccttggaactgctacatgtgcggccacaagggcacatacggcctgctgagacggagagaggactggcctagcagactgcagatgttcttcgccaataaccacgaccaggagttcgacccccctaaggtgtaccctcccgtccccgccgagaagagaaagcccatccgggtcctgagcctgttcgatggcatcgccaccggtctgctggtgctgaaggacctgggcatccaggtggataggtacattgcctccgaggtgtgcgaggactccatcaccgtgggaatggtgcgtcatcagggcaagatcatgtacgtgggcgacgtgcggagcgtgacacagaagcatatccaggagtggggccctttcgacctggtgatcggcggcagcccttgcaatgacctgagcatcgtgaacccagcccggaagggcctgtacgagggaaccggcagactgttcttcgagttttacagactgctgcacgacgcccggcctaaggaaggcgacgaccggcccttcttttggctgttcgagaatgtggtggccatgggagtcagcgacaagcgggatattagccggttcctggagagcaaccccgtgatgatcgatgccaaggaagtgagcgccgcccaccgggccagatacttctggggcaatctgcctggcatgaacagacccctggccagcaccgtgaacgacaagctggagctgcaggagtgcctggagcacggccggatcgccaagttcagcaaggtgagaaccatcaccacccgaagcaacagcatcaaacaaggcaaggaccagcactttcctgtgttcatgaacgagaaggaggacatcctgtggtgtaccgagatggagagagtgttcgggttcccagtccactacacagatgtcagcaacatgtctagactggccagacagagactgctgggaagaagctggtccgtccctgtgatcagacacctgttcgcccctctgaaggagtacttcgcctgcgtgagcagcggcaacagcaacgccaacagccggggccccagcttctctagcggcctggtgccactgtccctgagagggagccacatgggccccatggagatctacaaaaccgtgagcgcctggaagcggcagcctgtgcgcgtgctgagcctgtttcggaatatcgataaagtcctgaaaagcctgggattcctggagagcggctctggctccggcggtggcaccctgaagtacgtggaggatgtgacaaacgtggtcagacgggatgtggagaagtggggccccttcgatctggtgtacggcagcacccaacccctgggcagctcttgtgaccggtgccctggctggtacatgtttcagttccaccggatcctgcagtacgccctgccgagacaggagtcccagcggccattcttttggattttcatggacaacttgctgctgaccgaggatgaccaggaaactaccactcggttcctgcagaccgaagccgtgaccctgcaggacgtgagaggccgggactaccagaacgccatgcgggtgtggtccaacatccctggactgaaaagcaagcacgcacctctgacccctaaagaagaggagtacctgcaggcccaggtgcggagcagaagcaagctggacgcccctaaggtggatctgctggtgaagaattgcctcctgcccctgagagagtacttcaagtatttcagccagaatagtctgcccctgggaggcagcggcggcggcgccctggtgacatttgaggacgtcgccgtgcggttcacccaggaggaatgggctctgctggatccttctcagaaaatcctgtaccgggacgtgatgagagagacataccggaatctgacctccgtgggcatcaactgggaatgttgggaccttgaagcctgcttcagaagcctgggaagaaacctgagagtgcaggtggtgaagagaaagtgcgagctgaccaacagcggcccctgcgccgagggcggcccaagcagcggcgcccctcctcccagcggcggcagcccagccggctccccaacctctaccgaggagggcacctctgagtccgccacccccgagagcggccctggcacctccaccgagcccagcgagggcagcgcacccggcagccctgccggcagccccacctccacagaggagggaaccagcaccgagcccagcgaaggcagcgccccaggcaccagcaccgagcctagtgagcaggagattaaacggatcaacaagatcagaagaagacttgtgaaagacagcaacaccaagaaggccggcaagacaggccccatgaaaaccctgctggttagagtgatgacacccgatctgagagagcggctggaaaacctgagaaagaagcctgaaaatatcccccagcccatcagcaatacatctagagccaacctgaataagctgctgaccgattacaccgaaatgaagaaggcgatcctgcatgtgtactgggaagagttccagaaggaccctgtgggcctgatgagccgggtggcccagcctgccagcaagaagatcgatcagaacaagctgaaacctgagatggacgagaagggcaacctgaccaccgccggctttgcctgctctcagtgtggccagcccctgttcgtgtacaagctggagcaggtgtctgagaagggcaaggcttacaccaactacttcggacggtgcaatgtggccgagcacgaaaagctgatcctgctggcccagctgaagcccgagaaggatagcgacgaagccgtgacatatagcctgggaaagtttgggcagagggccctggatttctacagcattcatgtgaccaaggagtccacccaccccgtgaagcccctggcccagatcgccggaaacagatacgcctccggacctgtgggaaaggccctgagcgacgcatgtatgggcacaatcgcctccttcctgtctaagtaccaggacatcatcatcgaacaccagaaggtggtgaagggcaaccagaagagactggagagcctgcgggagctggccggcaaggaaaacctggaataccctagcgtgaccctgccacctcagcctcacaccaaggagggcgttgatgcctacaacgaagtgatcgcccgggtgcgaatgtgggtgaacctgaacctgtggcagaagctgaagctaagcagagatgatgccaagcctctgctgagactgaagggattcccttcctttcctctggtcgagagacaggccaacgaagtggactggtgggacatggtgtgtaacgtgaagaagctgatcaacgagaaaaaggaggatggcaaggtgttttggcagaatctggctggctacaagagacaggaagccctgagaccatacctgagcagcgaggaagatcggaagaagggaaagaaattcgctcggtaccagctgggcgacctgctgctgcacctggaaaagaagcacggcgaggactggggaaaggtgtacgacgaggcctgggagcggattgacaagaaagtggaaggcctgagcaagcacatcaagctggaagaggaacggagaagcgaggacgcccagagcaaggccgccctgaccgactggctgcgggctaaggccagcttcgtgatcgagggcctgaaggaggccgacaaggacgagttctgcagatgcgagctgaagctgcagaagtggtacggggacctgcggggaaagcccttcgccatcgaagccgagaacagcatcctggacatcagcggcttcagcaagcagtacaactgtgccttcatctggcagaaggacggcgtgaagaagctgaacctgtacctgatcatcaactacttcaagggcggcaagctgcggttcaagaagatcaaacctgaagccttcgaagccaacagattctacaccgtgatcaacaaaaagagcggcgagatcgtgcccatggaggtgaacttcaacttcgacgaccccaacctgatcatcctgcctctggcctttggcaagagacagggcagagaattcatctggaacgacctgctgtccctggaaaccggcagcctgaagctggccaacggaagagtgatcgagaagacactgtacaacagaagaacccggcaggatgagcctgccctgttcgtggccctgaccttcgagcggcgggaggtcctggactcctccaatatcaaaccaatgaacctgatcggcgtggcaagaggcgaaaacatccccgccgtgatcgccctgaccgaccccgagggctgcccactgagccggtttaaggatagcctgggaaacccaacccacatcctgagaatcggcgagagctataaggagaagcagcggaccatccaggccaagaaggaggtggagcagcggagagccggcggctacagccggaagtacgccagcaaagccaagaatctggcagacgatatggtgagaaacaccgctagagatctgctgtactacgccgtgacccaggatgccatgctgatcttcgccaacctgagccggggcttcggccggcagggcaagcggaccttcatggccgagagacagtacacacggatggaggactggctgaccgccaagctggcctacgagggcctgagcaagacctacctgtccaagacactggcccagtacacctccaagacatgcagcaactgtgggtttaccatcaccagcgccgactacgacagggtgctggagaagctgaagaagacagcaacaggctggatgaccacaattaacggcaaggagctgaaggtggagggccagattacctactacaacagatacaagagacagaacgtagtcaaggacctgtccgtcgagctggatagactgagcgaagaatctgtgaacaacgacatctcctcctggacaaagggcagaagcggagaagctctgagcctcctgaagaaaagattctcccatagacccgtgcaggagaagttcgtgtgcctgaactgcggcttcgagacacacgcagccgagcaagccgccctgaacatcgccagatcctggctgttcctgcggagccaggagtacaagaaataccagacaaacaagacaaccggcaacaccgataagagagccttcgtcgagacctggcagtccttttaccggaagaagcttaaggaggtgtggaaacctgccgtgcggtctggcggatctggcggaggctccttccaggagagcgtgatgttcgaggacgtggccgtgtacttcacccagaaggagtgggccgacctggcccccgcccagagggccctgtacagggacgtgatgctggagaactacggcaacatggtgagcctggccttccccttccccaagcccgccgtgatcagcaagctggagaggggcgaggagccctggggcctggacccccaggtggtgcccaacgaggagggcctgaagggcttccccggcggcccaagcagcggcgcccctcctcccagcggcggcagcccagccggctccccaacctctaccgaggagggcacctctgagtccgccacccccgagagcggccctggcacctccaccgagcccagcgagggcagcgcacccggcagccctgccggcagccccacctccacagaggagggaaccagcaccgagcccagcgaaggcagcgccccaggcaccagcaccgagcctagtgagcaggagattaaacggatcaacaagatcagaagaagacttgtgaaagacagcaacaccaagaaggccggcaagacaggccccatgaaaaccctgctggttagagtgatgacacccgatctgagagagcggctggaaaacctgagaaagaagcctgaaaatatcccccagcccatcagcaatacatctagagccaacctgaataagctgctgaccgattacaccgaaatgaagaaggcgatcctgcatgtgtactgggaagagttccagaaggaccctgtgggcctgatgagccgggtggcccagcctgccagcaagaagatcgatcagaacaagctgaaacctgagatggacgagaagggcaacctgaccaccgccggctttgcctgctctcagtgtggccagcccctgttcgtgtacaagctggagcaggtgtctgagaagggcaaggcttacaccaactacttcggacggtgcaatgtggccgagcacgaaaagctgatcctgctggcccagctgaagcccgagaaggatagcgacgaagccgtgacatatagcctgggaaagtttgggcagagggccctggatttctacagcattcatgtgaccaaggagtccacccaccccgtgaagcccctggcccagatcgccggaaacagatacgcctccggacctgtgggaaaggccctgagcgacgcatgtatgggcacaatcgcctccttcctgtctaagtaccaggacatcatcatcgaacaccagaaggtggtgaagggcaaccagaagagactggagagcctgcgggagctggccggcaaggaaaacctggaataccctagcgtgaccctgccacctcagcctcacaccaaggagggcgttgatgcctacaacgaagtgatcgcccgggtgcgaatgtgggtgaacctgaacctgtggcagaagctgaagctaagcagagatgatgccaagcctctgctgagactgaagggattcccttcctttcctctggtcgagagacaggccaacgaagtggactggtgggacatggtgtgtaacgtgaagaagctgatcaacgagaaaaaggaggatggcaaggtgttttggcagaatctggctggctacaagagacaggaagccctgagaccatacctgagcagcgaggaagatcggaagaagggaaagaaattcgctcggtaccagctgggcgacctgctgctgcacctggaaaagaagcacggcgaggactggggaaaggtgtacgacgaggcctgggagcggattgacaagaaagtggaaggcctgagcaagcacatcaagctggaagaggaacggagaagcgaggacgcccagagcaaggccgccctgaccgactggctgcgggctaaggccagcttcgtgatcgagggcctgaaggaggccgacaaggacgagttctgcagatgcgagctgaagctgcagaagtggtacggggacctgcggggaaagcccttcgccatcgaagccgagaacagcatcctggacatcagcggcttcagcaagcagtacaactgtgccttcatctggcagaaggacggcgtgaagaagctgaacctgtacctgatcatcaactacttcaagggcggcaagctgcggttcaagaagatcaaacctgaagccttcgaagccaacagattctacaccgtgatcaacaaaaagagcggcgagatcgtgcccatggaggtgaacttcaacttcgacgaccccaacctgatcatcctgcctctggcctttggcaagagacagggcagagaattcatctggaacgacctgctgtccctggaaaccggcagcctgaagctggccaacggaagagtgatcgagaagacactgtacaacagaagaacccggcaggatgagcctgccctgttcgtggccctgaccttcgagcggcgggaggtcctggactcctccaatatcaaaccaatgaacctgatcggcgtggcaagaggcgaaaacatccccgccgtgatcgccctgaccgaccccgagggctgcccactgagccggtttaaggatagcctgggaaacccaacccacatcctgagaatcggcgagagctataaggagaagcagcggaccatccaggccaagaaggaggtggagcagcggagagccggcggctacagccggaagtacgccagcaaagccaagaatctggcagacgatatggtgagaaacaccgctagagatctgctgtactacgccgtgacccaggatgccatgctgatcttcgccaacctgagccggggcttcggccggcagggcaagcggaccttcatggccgagagacagtacacacggatggaggactggctgaccgccaagctggcctacgagggcctgagcaagacctacctgtccaagacactggcccagtacacctccaagacatgcagcaactgtgggtttaccatcaccagcgccgactacgacagggtgctggagaagctgaagaagacagcaacaggctggatgaccacaattaacggcaaggagctgaaggtggagggccagattacctactacaacagatacaagagacagaacgtagtcaaggacctgtccgtcgagctggatagactgagcgaagaatctgtgaacaacgacatctcctcctggacaaagggcagaagcggagaagctctgagcctcctgaagaaaagattctcccatagacccgtgcaggagaagttcgtgtgcctgaactgcggcttcgagacacacgcagccgagcaagccgccctgaacatcgccagatcctggctgttcctgcggagccaggagtacaagaaataccagacaaacaagacaaccggcaacaccgataagagagccttcgtcgagacctggcagtccttttaccggaagaagcttaaggaggtgtggaaacctgccgtgcggtctggcggatctggcggaggctcctttccaggagagcgtgatgttcgaggacgtggccgtgtacttcacccagaaggagtgggccgacctggcccccgcccagagggccctgtacagggacgtgatgctggagaactacggcaacatggtgagcctggccttccccttccccaagcccgccgtgatcagcaagctggagaggggcgaggagccctggggcctggacccccaggtggtgcccaacgaggagggcctgaagggcttccccggatctggctccggcagcggccccaagaaaaagagaaaagtctaagctgccttctgcggggcttgccttctggccatgcccttcttctctcccttgcacctgtacctcttggtctttgaataaagcctgagtaggaaggctagcaaaaaaaaaaaaaaaaaaaaaaaaaaaaaaaaaaaaaaaaaaaaaaaaaaaaaaaaaaaaaaaaaaaaaaaaaaaaaaaa

SEQ ID NO: 15703 - RNA, 9485 nt, synthetic construct
  source 1..9485: mol_type = other RNA
aggaaataagagagaaaagaagagtaagaagaaatataagagccaccatggcccctaagaagaagcgtaaagtgagccggatggaacgcctcgtctacgaggtgcggcagaagtgcagaaacatcgaggacatctgcatctcctgcggatctctgaacgtgaccctggagcacccactgttcatcggcggcatgtgccagaactgtaaaaactgttttctggagtgtgcctatcaatacgacgatgacggctaccagagctactgcaccatctgttgcggcggaagagaggtgctgatgtgtggaaataacaactgctgccggtgcttctgcgtggaatgcgtggacctgctggtgggccccggcgccgcccaggccgctattaaggaagatccttggaactgctacatgtgcggccacaagggcacatacggcctgctgagacggagagaggactggcctagcagactgcagatgttcttcgccaataaccacgaccaggagttcgacccccctaaggtgtaccctcccgtccccgccgagaagagaaagcccatccgggtcctgagcctgttcgatggcatcgccaccggtctgctggtgctgaaggacctgggcatccaggtggataggtacattgcctccgaggtgtgcgaggactccatcaccgtgggaatggtgcgtcatcagggcaagatcatgtacgtgggcgacgtgcggagcgtgacacagaagcatatccaggagtggggccctttcgacctggtgatcggcggcagcccttgcaatgacctgagcatcgtgaacccagcccggaagggcctgtacgagggaaccggcagactgttcttcgagttttacagactgctgcacgacgcccggcctaaggaaggcgacgaccggcccttcttttggctgttcgagaatgtggtggccatgggagtcagcgacaagcgggatattagccggttcctggagagcaaccccgtgatgatcgatgccaaggaagtgagcgccgcccaccgggccagatacttctggggcaatctgcctggcatgaacagacccctggccagcaccgtgaacgacaagctggagctgcaggagtgcctggagcacggccggatcgccaagttcagcaaggtgagaaccatcaccacccgaagcaacagcatcaaacaaggcaaggaccagcactttcctgtgttcatgaacgagaaggaggacatcctgtggtgtaccgagatggagagagtgttcgggttcccagtccactacacagatgtcagcaacatgtctagactggccagacagagactgctgggaagaagctggtccgtccctgtgatcagacacctgttcgcccctctgaaggagtacttcgcctgcgtgagcagcggcaacagcaacgccaacagccggggccccagcttctctagcggcctggtgccactgtccctgagagggagccacatgggccccatggagatctacaaaaccgtgagcgcctggaagcggcagcctgtgcgcgtgctgagcctgtttcggaatatcgataaagtcctgaaaagcctgggattcctggagagcggctctggctccggcggtggcaccctgaagtacgtggaggatgtgacaaacgtggtcagacgggatgtggagaagtggggccccttcgatctggtgtacggcagcacccaacccctgggcagctcttgtgaccggtgccctggctggtacatgtttcagttccaccggatcctgcagtacgccctgccgagacaggagtcccagcggccattcttttggattttcatggacaacttgctgctgaccgaggatgaccaggaaactaccactcggttcctgcagaccgaagccgtgaccctgcaggacgtgagaggccgggactaccagaacgccatgcgggtgtggtccaacatccctggactgaaaagcaagcacgcacctctgacccctaaagaagaggagtacctgcaggcccaggtgcggagcagaagcaagctggacgcccctaaggtggatctgctggtgaagaattgcctcctgcccctgagagagtacttcaagtatttcagccagaatagtctgcccctgggaggcagcggcggcggcgccctggtgacatttgaggacgtcgccgtgcggttcacccaggaggaatgggctctgctggatccttctcagaaaatcctgtaccgggacgtgatgagagagacataccggaatctgacctccgtgggcatcaactgggaatgttgggaccttgaagcctgcttcagaagcctgggaagaaacctgagagtgcaggtggtgaagagaaagtgcgagctgaccaacagcggcccctgcgccgagggcggcccaagcagcggcgcccctcctcccagcggcggcagcccagccggctccccaacctctaccgaggagggcacctctgagtccgccacccccgagagcggccctggcacctccaccgagcccagcgagggcagcgcacccggcagccctgccggcagccccacctccacagaggagggaaccagcaccgagcccagcgaaggcagcgccccaggcaccagcaccgagcctagtgagcaggagattaaacggatcaacaagatcagaagaagacttgtgaaagacagcaacaccaagaaggccggcaagacaggccccatgaaaaccctgctggttagagtgatgacacccgatctgagagagcggctggaaaacctgagaaagaagcctgaaaatatcccccagcccatcagcaatacatctagagccaacctgaataagctgctgaccgattacaccgaaatgaagaaggcgatcctgcatgtgtactgggaagagttccagaaggaccctgtgggcctgatgagccgggtggcccagcctgccagcaagaagatcgatcagaacaagctgaaacctgagatggacgagaagggcaacctgaccaccgccggctttgcctgctctcagtgtggccagcccctgttcgtgtacaagctggagcaggtgtctgagaagggcaaggcttacaccaactacttcggacggtgcaatgtggccgagcacgaaaagctgatcctgctggcccagctgaagcccgagaaggatagcgacgaagccgtgacatatagcctgggaaagtttgggcagagggccctggatttctacagcattcatgtgaccaaggagtccacccaccccgtgaagcccctggcccagatcgccggaaacagatacgcctccggacctgtgggaaaggccctgagcgacgcatgtatgggcacaatcgcctccttcctgtctaagtaccaggacatcatcatcgaacaccagaaggtggtgaagggcaaccagaagagactggagagcctgcgggagctggccggcaaggaaaacctggaataccctagcgtgaccctgccacctcagcctcacaccaaggagggcgttgatgcctacaacgaagtgatcgcccgggtgcgaatgtgggtgaacctgaacctgtggcagaagctgaagctaagcagagatgatgccaagcctctgctgagactgaagggattcccttcctttcctctggtcgagagacaggccaacgaagtggactggtgggacatggtgtgtaacgtgaagaagctgatcaacgagaaaaaggaggatggcaaggtgttttggcagaatctggctggctacaagagacaggaagccctgagaccatacctgagcagcgaggaagatcggaagaagggaaagaaattcgctcggtaccagctgggcgacctgctgctgcacctggaaaagaagcacggcgaggactggggaaaggtgtacgacgaggcctgggagcggattgacaagaaagtggaaggcctgagcaagcacatcaagctggaagaggaacggagaagcgaggacgcccagagcaaggccgccctgaccgactggctgcgggctaaggccagcttcgtgatcgagggcctgaaggaggccgacaaggacgagttctgcagatgcgagctgaagctgcagaagtggtacggggacctgcggggaaagcccttcgccatcgaagccgagaacagcatcctggacatcagcggcttcagcaagcagtacaactgtgccttcatctggcagaaggacggcgtgaagaagctgaacctgtacctgatcatcaactacttcaagggcggcaagctgcggttcaagaagatcaaacctgaagccttcgaagccaacagattctacaccgtgatcaacaaaaagagcggcgagatcgtgcccatggaggtgaacttcaacttcgacgaccccaacctgatcatcctgcctctggcctttggcaagagacagggcagagaattcatctggaacgacctgctgtccctggaaaccggcagcctgaagctggccaacggaagagtgatcgagaagacactgtacaacagaagaacccggcaggatgagcctgccctgttcgtggccctgaccttcgagcggcgggaggtcctggactcctccaatatcaaaccaatgaacctgatcggcgtggcaagaggcgaaaacatccccgccgtgatcgccctgaccgaccccgagggctgcccactgagccggtttaaggatagcctgggaaacccaacccacatcctgagaatcggcgagagctataaggagaagcagcggaccatccaggccaagaaggaggtggagcagcggagagccggcggctacagccggaagtacgccagcaaagccaagaatctggcagacgatatggtgagaaacaccgctagagatctgctgtactacgccgtgacccaggatgccatgctgatcttcgccaacctgagccggggcttcggccggcagggcaagcggaccttcatggccgagagacagtacacacggatggaggactggctgaccgccaagctggcctacgagggcctgagcaagacctacctgtccaagacactggcccagtacacctccaagacatgcagcaactgtgggtttaccatcaccagcgccgactacgacagggtgctggagaagctgaagaagacagcaacaggctggatgaccacaattaacggcaaggagctgaaggtggagggccagattacctactacaacagatacaagagacagaacgtagtcaaggacctgtccgtcgagctggatagactgagcgaagaatctgtgaacaacgacatctcctcctggacaaagggcagaagcggagaagctctgagcctcctgaagaaaagattctcccatagacccgtgcaggagaagttcgtgtgcctgaactgcggcttcgagacacacgcagccgagcaagccgccctgaacatcgccagatcctggctgttcctgcggagccaggagtacaagaaataccagacaaacaagacaaccggcaacaccgataagagagccttcgtcgagacctggcagtccttttaccggaagaagcttaaggaggtgtggaaacctgccgtgcggtctggcggatctggcggaggctccatggtgttcgaggacgtggccgtgtacttcagcagggaggagtggggcctgctggacagcgcccagagggccctgtacaggcaggtgatgctggagaacttcgccctggtggccagcctgggcctgagcgccagcaggcccaggatcgtgctgcagctggagaggggcgaggagccctgggtgctgagcggcctggacgtggccctggccagggacgcccagaggaggcccggccccggcgagggcggcccaagcagcggcgcccctcctcccagcggcggcagcccagccggctccccaacctctaccgaggagggcacctctgagtccgccacccccgagagcggccctggcacctccaccgagcccagcgagggcagcgcacccggcagccctgccggcagccccacctccacagaggagggaaccagcaccgagcccagcgaaggcagcgccccaggcaccagcaccgagcctagtgagcaggagattaaacggatcaacaagatcagaagaagacttgtgaaagacagcaacaccaagaaggccggcaagacaggccccatgaaaaccctgctggttagagtgatgacacccgatctgagagagcggctggaaaacctgagaaagaagcctgaaaatatcccccagcccatcagcaatacatctagagccaacctgaataagctgctgaccgattacaccgaaatgaagaaggcgatcctgcatgtgtactgggaagagttccagaaggaccctgtgggcctgatgagccgggtggcccagcctgccagcaagaagatcgatcagaacaagctgaaacctgagatggacgagaagggcaacctgaccaccgccggctttgcctgctctcagtgtggccagcccctgttcgtgtacaagctggagcaggtgtctgagaagggcaaggcttacaccaactacttcggacggtgcaatgtggccgagcacgaaaagctgatcctgctggcccagctgaagcccgagaaggatagcgacgaagccgtgacatatagcctgggaaagtttgggcagagggccctggatttctacagcattcatgtgaccaaggagtccacccaccccgtgaagcccctggcccagatcgccggaaacagatacgcctccggacctgtgggaaaggccctgagcgacgcatgtatgggcacaatcgcctccttcctgtctaagtaccaggacatcatcatcgaacaccagaaggtggtgaagggcaaccagaagagactggagagcctgcgggagctggccggcaaggaaaacctggaataccctagcgtgaccctgccacctcagcctcacaccaaggagggcgttgatgcctacaacgaagtgatcgcccgggtgcgaatgtgggtgaacctgaacctgtggcagaagctgaagctaagcagagatgatgccaagcctctgctgagactgaagggattcccttcctttcctctggtcgagagacaggccaacgaagtggactggtgggacatggtgtgtaacgtgaagaagctgatcaacgagaaaaaggaggatggcaaggtgttttggcagaatctggctggctacaagagacaggaagccctgagaccatacctgagcagcgaggaagatcggaagaagggaaagaaattcgctcggtaccagctgggcgacctgctgctgcacctggaaaagaagcacggcgaggactggggaaaggtgtacgacgaggcctgggagcggattgacaagaaagtggaaggcctgagcaagcacatcaagctggaagaggaacggagaagcgaggacgcccagagcaaggccgccctgaccgactggctgcgggctaaggccagcttcgtgatcgagggcctgaaggaggccgacaaggacgagttctgcagatgcgagctgaagctgcagaagtggtacggggacctgcggggaaagcccttcgccatcgaagccgagaacagcatcctggacatcagcggcttcagcaagcagtacaactgtgccttcatctggcagaaggacggcgtgaagaagctgaacctgtacctgatcatcaactacttcaagggcggcaagctgcggttcaagaagatcaaacctgaagccttcgaagccaacagattctacaccgtgatcaacaaaaagagcggcgagatcgtgcccatggaggtgaacttcaacttcgacgaccccaacctgatcatcctgcctctggcctttggcaagagacagggcagagaattcatctggaacgacctgctgtccctggaaaccggcagcctgaagctggccaacggaagagtgatcgagaagacactgtacaacagaagaacccggcaggatgagcctgccctgttcgtggccctgaccttcgagcggcgggaggtcctggactcctccaatatcaaaccaatgaacctgatcggcgtggcaagaggcgaaaacatccccgccgtgatcgccctgaccgaccccgagggctgcccactgagccggtttaaggatagcctgggaaacccaacccacatcctgagaatcggcgagagctataaggagaagcagcggaccatccaggccaagaaggaggtggagcagcggagagccggcggctacagccggaagtacgccagcaaagccaagaatctggcagacgatatggtgagaaacaccgctagagatctgctgtactacgccgtgacccaggatgccatgctgatcttcgccaacctgagccggggcttcggccggcagggcaagcggaccttcatggccgagagacagtacacacggatggaggactggctgaccgccaagctggcctacgagggcctgagcaagacctacctgtccaagacactggcccagtacacctccaagacatgcagcaactgtgggtttaccatcaccagcgccgactacgacagggtgctggagaagctgaagaagacagcaacaggctggatgaccacaattaacggcaaggagctgaaggtggagggccagattacctactacaacagatacaagagacagaacgtagtcaaggacctgtccgtcgagctggatagactgagcgaagaatctgtgaacaacgacatctcctcctggacaaagggcagaagcggagaagctctgagcctcctgaagaaaagattctcccatagacccgtgcaggagaagttcgtgtgcctgaactgcggcttcgagacacacgcagccgagcaagccgccctgaacatcgccagatcctggctgttcctgcggagccaggagtacaagaaataccagacaaacaagacaaccggcaacaccgataagagagccttcgtcgagacctggcagtccttttaccggaagaagcttaaggaggtgtggaaacctgccgtgcggtctggcggatctggcggaggctcctatggtgttcgaggacgtggccgtgtacttcagcagggaggagtggggcctgctggacagcgcccagagggccctgtacaggcaggtgatgctggagaacttcgccctggtggccagcctgggcctgagcgccagcaggcccaggatcgtgctgcagctggagaggggcgaggagccctgggtgctgagcggcctggacgtggccctggccagggacgcccagaggaggcccggccccggcgagggatctggctccggcagcggccccaagaaaaagagaaaagtctaagctgccttctgcggggcttgccttctggccatgcccttcttctctcccttgcacctgtacctcttggtctttgaataaagcctgagtaggaaggctagcaaaaaaaaaaaaaaaaaaaaaaaaaaaaaaaaaaaaaaaaaaaaaaaaaaaaaaaaaaaaaaaaaaaaaaaaaaaaaaaa

SEQ ID NO: 15704 - RNA, 9485 nt, synthetic construct
  source 1..9485: mol_type = other RNA
aggaaataagagagaaaagaagagtaagaagaaatataagagccaccatggcccctaagaagaagcgtaaagtgagccggatggaacgcctcgtctacgaggtgcggcagaagtgcagaaacatcgaggacatctgcatctcctgcggatctctgaacgtgaccctggagcacccactgttcatcggcggcatgtgccagaactgtaaaaactgttttctggagtgtgcctatcaatacgacgatgacggctaccagagctactgcaccatctgttgcggcggaagagaggtgctgatgtgtggaaataacaactgctgccggtgcttctgcgtggaatgcgtggacctgctggtgggccccggcgccgcccaggccgctattaaggaagatccttggaactgctacatgtgcggccacaagggcacatacggcctgctgagacggagagaggactggcctagcagactgcagatgttcttcgccaataaccacgaccaggagttcgacccccctaaggtgtaccctcccgtccccgccgagaagagaaagcccatccgggtcctgagcctgttcgatggcatcgccaccggtctgctggtgctgaaggacctgggcatccaggtggataggtacattgcctccgaggtgtgcgaggactccatcaccgtgggaatggtgcgtcatcagggcaagatcatgtacgtgggcgacgtgcggagcgtgacacagaagcatatccaggagtggggccctttcgacctggtgatcggcggcagcccttgcaatgacctgagcatcgtgaacccagcccggaagggcctgtacgagggaaccggcagactgttcttcgagttttacagactgctgcacgacgcccggcctaaggaaggcgacgaccggcccttcttttggctgttcgagaatgtggtggccatgggagtcagcgacaagcgggatattagccggttcctggagagcaaccccgtgatgatcgatgccaaggaagtgagcgccgcccaccgggccagatacttctggggcaatctgcctggcatgaacagacccctggccagcaccgtgaacgacaagctggagctgcaggagtgcctggagcacggccggatcgccaagttcagcaaggtgagaaccatcaccacccgaagcaacagcatcaaacaaggcaaggaccagcactttcctgtgttcatgaacgagaaggaggacatcctgtggtgtaccgagatggagagagtgttcgggttcccagtccactacacagatgtcagcaacatgtctagactggccagacagagactgctgggaagaagctggtccgtccctgtgatcagacacctgttcgcccctctgaaggagtacttcgcctgcgtgagcagcggcaacagcaacgccaacagccggggccccagcttctctagcggcctggtgccactgtccctgagagggagccacatgggccccatggagatctacaaaaccgtgagcgcctggaagcggcagcctgtgcgcgtgctgagcctgtttcggaatatcgataaagtcctgaaaagcctgggattcctggagagcggctctggctccggcggtggcaccctgaagtacgtggaggatgtgacaaacgtggtcagacgggatgtggagaagtggggccccttcgatctggtgtacggcagcacccaacccctgggcagctcttgtgaccggtgccctggctggtacatgtttcagttccaccggatcctgcagtacgccctgccgagacaggagtcccagcggccattcttttggattttcatggacaacttgctgctgaccgaggatgaccaggaaactaccactcggttcctgcagaccgaagccgtgaccctgcaggacgtgagaggccgggactaccagaacgccatgcgggtgtggtccaacatccctggactgaaaagcaagcacgcacctctgacccctaaagaagaggagtacctgcaggcccaggtgcggagcagaagcaagctggacgcccctaaggtggatctgctggtgaagaattgcctcctgcccctgagagagtacttcaagtatttcagccagaatagtctgcccctgggaggcagcggcggcggcgccctggtgacatttgaggacgtcgccgtgcggttcacccaggaggaatgggctctgctggatccttctcagaaaatcctgtaccgggacgtgatgagagagacataccggaatctgacctccgtgggcatcaactgggaatgttgggaccttgaagcctgcttcagaagcctgggaagaaacctgagagtgcaggtggtgaagagaaagtgcgagctgaccaacagcggcccctgcgccgagggcggcccaagcagcggcgcccctcctcccagcggcggcagcccagccggctccccaacctctaccgaggagggcacctctgagtccgccacccccgagagcggccctggcacctccaccgagcccagcgagggcagcgcacccggcagccctgccggcagccccacctccacagaggagggaaccagcaccgagcccagcgaaggcagcgccccaggcaccagcaccgagcctagtgagcaggagattaaacggatcaacaagatcagaagaagacttgtgaaagacagcaacaccaagaaggccggcaagacaggccccatgaaaaccctgctggttagagtgatgacacccgatctgagagagcggctggaaaacctgagaaagaagcctgaaaatatcccccagcccatcagcaatacatctagagccaacctgaataagctgctgaccgattacaccgaaatgaagaaggcgatcctgcatgtgtactgggaagagttccagaaggaccctgtgggcctgatgagccgggtggcccagcctgccagcaagaagatcgatcagaacaagctgaaacctgagatggacgagaagggcaacctgaccaccgccggctttgcctgctctcagtgtggccagcccctgttcgtgtacaagctggagcaggtgtctgagaagggcaaggcttacaccaactacttcggacggtgcaatgtggccgagcacgaaaagctgatcctgctggcccagctgaagcccgagaaggatagcgacgaagccgtgacatatagcctgggaaagtttgggcagagggccctggatttctacagcattcatgtgaccaaggagtccacccaccccgtgaagcccctggcccagatcgccggaaacagatacgcctccggacctgtgggaaaggccctgagcgacgcatgtatgggcacaatcgcctccttcctgtctaagtaccaggacatcatcatcgaacaccagaaggtggtgaagggcaaccagaagagactggagagcctgcgggagctggccggcaaggaaaacctggaataccctagcgtgaccctgccacctcagcctcacaccaaggagggcgttgatgcctacaacgaagtgatcgcccgggtgcgaatgtgggtgaacctgaacctgtggcagaagctgaagctaagcagagatgatgccaagcctctgctgagactgaagggattcccttcctttcctctggtcgagagacaggccaacgaagtggactggtgggacatggtgtgtaacgtgaagaagctgatcaacgagaaaaaggaggatggcaaggtgttttggcagaatctggctggctacaagagacaggaagccctgagaccatacctgagcagcgaggaagatcggaagaagggaaagaaattcgctcggtaccagctgggcgacctgctgctgcacctggaaaagaagcacggcgaggactggggaaaggtgtacgacgaggcctgggagcggattgacaagaaagtggaaggcctgagcaagcacatcaagctggaagaggaacggagaagcgaggacgcccagagcaaggccgccctgaccgactggctgcgggctaaggccagcttcgtgatcgagggcctgaaggaggccgacaaggacgagttctgcagatgcgagctgaagctgcagaagtggtacggggacctgcggggaaagcccttcgccatcgaagccgagaacagcatcctggacatcagcggcttcagcaagcagtacaactgtgccttcatctggcagaaggacggcgtgaagaagctgaacctgtacctgatcatcaactacttcaagggcggcaagctgcggttcaagaagatcaaacctgaagccttcgaagccaacagattctacaccgtgatcaacaaaaagagcggcgagatcgtgcccatggaggtgaacttcaacttcgacgaccccaacctgatcatcctgcctctggcctttggcaagagacagggcagagaattcatctggaacgacctgctgtccctggaaaccggcagcctgaagctggccaacggaagagtgatcgagaagacactgtacaacagaagaacccggcaggatgagcctgccctgttcgtggccctgaccttcgagcggcgggaggtcctggactcctccaatatcaaaccaatgaacctgatcggcgtggcaagaggcgaaaacatccccgccgtgatcgccctgaccgaccccgagggctgcccactgagccggtttaaggatagcctgggaaacccaacccacatcctgagaatcggcgagagctataaggagaagcagcggaccatccaggccaagaaggaggtggagcagcggagagccggcggctacagccggaagtacgccagcaaagccaagaatctggcagacgatatggtgagaaacaccgctagagatctgctgtactacgccgtgacccaggatgccatgctgatcttcgccaacctgagccggggcttcggccggcagggcaagcggaccttcatggccgagagacagtacacacggatggaggactggctgaccgccaagctggcctacgagggcctgagcaagacctacctgtccaagacactggcccagtacacctccaagacatgcagcaactgtgggtttaccatcaccagcgccgactacgacagggtgctggagaagctgaagaagacagcaacaggctggatgaccacaattaacggcaaggagctgaaggtggagggccagattacctactacaacagatacaagagacagaacgtagtcaaggacctgtccgtcgagctggatagactgagcgaagaatctgtgaacaacgacatctcctcctggacaaagggcagaagcggagaagctctgagcctcctgaagaaaagattctcccatagacccgtgcaggagaagttcgtgtgcctgaactgcggcttcgagacacacgcagccgagcaagccgccctgaacatcgccagatcctggctgttcctgcggagccaggagtacaagaaataccagacaaacaagacaaccggcaacaccgataagagagccttcgtcgagacctggcagtccttttaccggaagaagcttaaggaggtgtggaaacctgccgtgcggtctggcggatctggcggaggctccagcgtggccttcagggacgtgatcgtggacttcacccaggaggagtggcagcagctgaagcccgcccagaaggacctgtacagggacgtgatgatggagaactactggaacctggtgagcctggacctggagaccaggcccgacaagaaggagagcgacccccaggaggacgactgggaggacaggcccagcatcgccgtggtggccgagggccccatgaggaccggcgaccagggctgcatcggcggcccaagcagcggcgcccctcctcccagcggcggcagcccagccggctccccaacctctaccgaggagggcacctctgagtccgccacccccgagagcggccctggcacctccaccgagcccagcgagggcagcgcacccggcagccctgccggcagccccacctccacagaggagggaaccagcaccgagcccagcgaaggcagcgccccaggcaccagcaccgagcctagtgagcaggagattaaacggatcaacaagatcagaagaagacttgtgaaagacagcaacaccaagaaggccggcaagacaggccccatgaaaaccctgctggttagagtgatgacacccgatctgagagagcggctggaaaacctgagaaagaagcctgaaaatatcccccagcccatcagcaatacatctagagccaacctgaataagctgctgaccgattacaccgaaatgaagaaggcgatcctgcatgtgtactgggaagagttccagaaggaccctgtgggcctgatgagccgggtggcccagcctgccagcaagaagatcgatcagaacaagctgaaacctgagatggacgagaagggcaacctgaccaccgccggctttgcctgctctcagtgtggccagcccctgttcgtgtacaagctggagcaggtgtctgagaagggcaaggcttacaccaactacttcggacggtgcaatgtggccgagcacgaaaagctgatcctgctggcccagctgaagcccgagaaggatagcgacgaagccgtgacatatagcctgggaaagtttgggcagagggccctggatttctacagcattcatgtgaccaaggagtccacccaccccgtgaagcccctggcccagatcgccggaaacagatacgcctccggacctgtgggaaaggccctgagcgacgcatgtatgggcacaatcgcctccttcctgtctaagtaccaggacatcatcatcgaacaccagaaggtggtgaagggcaaccagaagagactggagagcctgcgggagctggccggcaaggaaaacctggaataccctagcgtgaccctgccacctcagcctcacaccaaggagggcgttgatgcctacaacgaagtgatcgcccgggtgcgaatgtgggtgaacctgaacctgtggcagaagctgaagctaagcagagatgatgccaagcctctgctgagactgaagggattcccttcctttcctctggtcgagagacaggccaacgaagtggactggtgggacatggtgtgtaacgtgaagaagctgatcaacgagaaaaaggaggatggcaaggtgttttggcagaatctggctggctacaagagacaggaagccctgagaccatacctgagcagcgaggaagatcggaagaagggaaagaaattcgctcggtaccagctgggcgacctgctgctgcacctggaaaagaagcacggcgaggactggggaaaggtgtacgacgaggcctgggagcggattgacaagaaagtggaaggcctgagcaagcacatcaagctggaagaggaacggagaagcgaggacgcccagagcaaggccgccctgaccgactggctgcgggctaaggccagcttcgtgatcgagggcctgaaggaggccgacaaggacgagttctgcagatgcgagctgaagctgcagaagtggtacggggacctgcggggaaagcccttcgccatcgaagccgagaacagcatcctggacatcagcggcttcagcaagcagtacaactgtgccttcatctggcagaaggacggcgtgaagaagctgaacctgtacctgatcatcaactacttcaagggcggcaagctgcggttcaagaagatcaaacctgaagccttcgaagccaacagattctacaccgtgatcaacaaaaagagcggcgagatcgtgcccatggaggtgaacttcaacttcgacgaccccaacctgatcatcctgcctctggcctttggcaagagacagggcagagaattcatctggaacgacctgctgtccctggaaaccggcagcctgaagctggccaacggaagagtgatcgagaagacactgtacaacagaagaacccggcaggatgagcctgccctgttcgtggccctgaccttcgagcggcgggaggtcctggactcctccaatatcaaaccaatgaacctgatcggcgtggcaagaggcgaaaacatccccgccgtgatcgccctgaccgaccccgagggctgcccactgagccggtttaaggatagcctgggaaacccaacccacatcctgagaatcggcgagagctataaggagaagcagcggaccatccaggccaagaaggaggtggagcagcggagagccggcggctacagccggaagtacgccagcaaagccaagaatctggcagacgatatggtgagaaacaccgctagagatctgctgtactacgccgtgacccaggatgccatgctgatcttcgccaacctgagccggggcttcggccggcagggcaagcggaccttcatggccgagagacagtacacacggatggaggactggctgaccgccaagctggcctacgagggcctgagcaagacctacctgtccaagacactggcccagtacacctccaagacatgcagcaactgtgggtttaccatcaccagcgccgactacgacagggtgctggagaagctgaagaagacagcaacaggctggatgaccacaattaacggcaaggagctgaaggtggagggccagattacctactacaacagatacaagagacagaacgtagtcaaggacctgtccgtcgagctggatagactgagcgaagaatctgtgaacaacgacatctcctcctggacaaagggcagaagcggagaagctctgagcctcctgaagaaaagattctcccatagacccgtgcaggagaagttcgtgtgcctgaactgcggcttcgagacacacgcagccgagcaagccgccctgaacatcgccagatcctggctgttcctgcggagccaggagtacaagaaataccagacaaacaagacaaccggcaacaccgataagagagccttcgtcgagacctggcagtccttttaccggaagaagcttaaggaggtgtggaaacctgccgtgcggtctggcggatctggcggaggctcctagcgtggccttcagggacgtgatcgtggacttcacccaggaggagtggcagcagctgaagcccgcccagaaggacctgtacagggacgtgatgatggagaactactggaacctggtgagcctggacctggagaccaggcccgacaagaaggagagcgacccccaggaggacgactgggaggacaggcccagcatcgccgtggtggccgagggccccatgaggaccggcgaccagggctgcatcggatctggctccggcagcggccccaagaaaaagagaaaagtctaagctgccttctgcggggcttgccttctggccatgcccttcttctctcccttgcacctgtacctcttggtctttgaataaagcctgagtaggaaggctagcaaaaaaaaaaaaaaaaaaaaaaaaaaaaaaaaaaaaaaaaaaaaaaaaaaaaaaaaaaaaaaaaaaaaaaaaaaaaaaaa

SEQ ID NO: 15705 - RNA, 9485 nt, synthetic construct
  source 1..9485: mol_type = other RNA
aggaaataagagagaaaagaagagtaagaagaaatataagagccaccatggcccctaagaagaagcgtaaagtgagccggatggaacgcctcgtctacgaggtgcggcagaagtgcagaaacatcgaggacatctgcatctcctgcggatctctgaacgtgaccctggagcacccactgttcatcggcggcatgtgccagaactgtaaaaactgttttctggagtgtgcctatcaatacgacgatgacggctaccagagctactgcaccatctgttgcggcggaagagaggtgctgatgtgtggaaataacaactgctgccggtgcttctgcgtggaatgcgtggacctgctggtgggccccggcgccgcccaggccgctattaaggaagatccttggaactgctacatgtgcggccacaagggcacatacggcctgctgagacggagagaggactggcctagcagactgcagatgttcttcgccaataaccacgaccaggagttcgacccccctaaggtgtaccctcccgtccccgccgagaagagaaagcccatccgggtcctgagcctgttcgatggcatcgccaccggtctgctggtgctgaaggacctgggcatccaggtggataggtacattgcctccgaggtgtgcgaggactccatcaccgtgggaatggtgcgtcatcagggcaagatcatgtacgtgggcgacgtgcggagcgtgacacagaagcatatccaggagtggggccctttcgacctggtgatcggcggcagcccttgcaatgacctgagcatcgtgaacccagcccggaagggcctgtacgagggaaccggcagactgttcttcgagttttacagactgctgcacgacgcccggcctaaggaaggcgacgaccggcccttcttttggctgttcgagaatgtggtggccatgggagtcagcgacaagcgggatattagccggttcctggagagcaaccccgtgatgatcgatgccaaggaagtgagcgccgcccaccgggccagatacttctggggcaatctgcctggcatgaacagacccctggccagcaccgtgaacgacaagctggagctgcaggagtgcctggagcacggccggatcgccaagttcagcaaggtgagaaccatcaccacccgaagcaacagcatcaaacaaggcaaggaccagcactttcctgtgttcatgaacgagaaggaggacatcctgtggtgtaccgagatggagagagtgttcgggttcccagtccactacacagatgtcagcaacatgtctagactggccagacagagactgctgggaagaagctggtccgtccctgtgatcagacacctgttcgcccctctgaaggagtacttcgcctgcgtgagcagcggcaacagcaacgccaacagccggggccccagcttctctagcggcctggtgccactgtccctgagagggagccacatgggccccatggagatctacaaaaccgtgagcgcctggaagcggcagcctgtgcgcgtgctgagcctgtttcggaatatcgataaagtcctgaaaagcctgggattcctggagagcggctctggctccggcggtggcaccctgaagtacgtggaggatgtgacaaacgtggtcagacgggatgtggagaagtggggccccttcgatctggtgtacggcagcacccaacccctgggcagctcttgtgaccggtgccctggctggtacatgtttcagttccaccggatcctgcagtacgccctgccgagacaggagtcccagcggccattcttttggattttcatggacaacttgctgctgaccgaggatgaccaggaaactaccactcggttcctgcagaccgaagccgtgaccctgcaggacgtgagaggccgggactaccagaacgccatgcgggtgtggtccaacatccctggactgaaaagcaagcacgcacctctgacccctaaagaagaggagtacctgcaggcccaggtgcggagcagaagcaagctggacgcccctaaggtggatctgctggtgaagaattgcctcctgcccctgagagagtacttcaagtatttcagccagaatagtctgcccctgggaggcagcggcggcggcgccctggtgacatttgaggacgtcgccgtgcggttcacccaggaggaatgggctctgctggatccttctcagaaaatcctgtaccgggacgtgatgagagagacataccggaatctgacctccgtgggcatcaactgggaatgttgggaccttgaagcctgcttcagaagcctgggaagaaacctgagagtgcaggtggtgaagagaaagtgcgagctgaccaacagcggcccctgcgccgagggcggcccaagcagcggcgcccctcctcccagcggcggcagcccagccggctccccaacctctaccgaggagggcacctctgagtccgccacccccgagagcggccctggcacctccaccgagcccagcgagggcagcgcacccggcagccctgccggcagccccacctccacagaggagggaaccagcaccgagcccagcgaaggcagcgccccaggcaccagcaccgagcctagtgagcaggagattaaacggatcaacaagatcagaagaagacttgtgaaagacagcaacaccaagaaggccggcaagacaggccccatgaaaaccctgctggttagagtgatgacacccgatctgagagagcggctggaaaacctgagaaagaagcctgaaaatatcccccagcccatcagcaatacatctagagccaacctgaataagctgctgaccgattacaccgaaatgaagaaggcgatcctgcatgtgtactgggaagagttccagaaggaccctgtgggcctgatgagccgggtggcccagcctgccagcaagaagatcgatcagaacaagctgaaacctgagatggacgagaagggcaacctgaccaccgccggctttgcctgctctcagtgtggccagcccctgttcgtgtacaagctggagcaggtgtctgagaagggcaaggcttacaccaactacttcggacggtgcaatgtggccgagcacgaaaagctgatcctgctggcccagctgaagcccgagaaggatagcgacgaagccgtgacatatagcctgggaaagtttgggcagagggccctggatttctacagcattcatgtgaccaaggagtccacccaccccgtgaagcccctggcccagatcgccggaaacagatacgcctccggacctgtgggaaaggccctgagcgacgcatgtatgggcacaatcgcctccttcctgtctaagtaccaggacatcatcatcgaacaccagaaggtggtgaagggcaaccagaagagactggagagcctgcgggagctggccggcaaggaaaacctggaataccctagcgtgaccctgccacctcagcctcacaccaaggagggcgttgatgcctacaacgaagtgatcgcccgggtgcgaatgtgggtgaacctgaacctgtggcagaagctgaagctaagcagagatgatgccaagcctctgctgagactgaagggattcccttcctttcctctggtcgagagacaggccaacgaagtggactggtgggacatggtgtgtaacgtgaagaagctgatcaacgagaaaaaggaggatggcaaggtgttttggcagaatctggctggctacaagagacaggaagccctgagaccatacctgagcagcgaggaagatcggaagaagggaaagaaattcgctcggtaccagctgggcgacctgctgctgcacctggaaaagaagcacggcgaggactggggaaaggtgtacgacgaggcctgggagcggattgacaagaaagtggaaggcctgagcaagcacatcaagctggaagaggaacggagaagcgaggacgcccagagcaaggccgccctgaccgactggctgcgggctaaggccagcttcgtgatcgagggcctgaaggaggccgacaaggacgagttctgcagatgcgagctgaagctgcagaagtggtacggggacctgcggggaaagcccttcgccatcgaagccgagaacagcatcctggacatcagcggcttcagcaagcagtacaactgtgccttcatctggcagaaggacggcgtgaagaagctgaacctgtacctgatcatcaactacttcaagggcggcaagctgcggttcaagaagatcaaacctgaagccttcgaagccaacagattctacaccgtgatcaacaaaaagagcggcgagatcgtgcccatggaggtgaacttcaacttcgacgaccccaacctgatcatcctgcctctggcctttggcaagagacagggcagagaattcatctggaacgacctgctgtccctggaaaccggcagcctgaagctggccaacggaagagtgatcgagaagacactgtacaacagaagaacccggcaggatgagcctgccctgttcgtggccctgaccttcgagcggcgggaggtcctggactcctccaatatcaaaccaatgaacctgatcggcgtggcaagaggcgaaaacatccccgccgtgatcgccctgaccgaccccgagggctgcccactgagccggtttaaggatagcctgggaaacccaacccacatcctgagaatcggcgagagctataaggagaagcagcggaccatccaggccaagaaggaggtggagcagcggagagccggcggctacagccggaagtacgccagcaaagccaagaatctggcagacgatatggtgagaaacaccgctagagatctgctgtactacgccgtgacccaggatgccatgctgatcttcgccaacctgagccggggcttcggccggcagggcaagcggaccttcatggccgagagacagtacacacggatggaggactggctgaccgccaagctggcctacgagggcctgagcaagacctacctgtccaagacactggcccagtacacctccaagacatgcagcaactgtgggtttaccatcaccagcgccgactacgacagggtgctggagaagctgaagaagacagcaacaggctggatgaccacaattaacggcaaggagctgaaggtggagggccagattacctactacaacagatacaagagacagaacgtagtcaaggacctgtccgtcgagctggatagactgagcgaagaatctgtgaacaacgacatctcctcctggacaaagggcagaagcggagaagctctgagcctcctgaagaaaagattctcccatagacccgtgcaggagaagttcgtgtgcctgaactgcggcttcgagacacacgcagccgagcaagccgccctgaacatcgccagatcctggctgttcctgcggagccaggagtacaagaaataccagacaaacaagacaaccggcaacaccgataagagagccttcgtcgagacctggcagtccttttaccggaagaagcttaaggaggtgtggaaacctgccgtgcggtctggcggatctggcggaggctccatggacgccgtgacctacgaggacgtgcacgtgaacttcagccaggaggagtgggccctgctggaccccagccagaagagcctgtacaaggacgtgatgctggagacctactggaacctgacctgcatcggctacaagtgggaggaccacaacatcgaggaccagcaccagagcagcggcaggcacggcaggtgcatcaactgccccagcgcctacggcaagaagcagtgcaccaacctgttcggcggcccaagcagcggcgcccctcctcccagcggcggcagcccagccggctccccaacctctaccgaggagggcacctctgagtccgccacccccgagagcggccctggcacctccaccgagcccagcgagggcagcgcacccggcagccctgccggcagccccacctccacagaggagggaaccagcaccgagcccagcgaaggcagcgccccaggcaccagcaccgagcctagtgagcaggagattaaacggatcaacaagatcagaagaagacttgtgaaagacagcaacaccaagaaggccggcaagacaggccccatgaaaaccctgctggttagagtgatgacacccgatctgagagagcggctggaaaacctgagaaagaagcctgaaaatatcccccagcccatcagcaatacatctagagccaacctgaataagctgctgaccgattacaccgaaatgaagaaggcgatcctgcatgtgtactgggaagagttccagaaggaccctgtgggcctgatgagccgggtggcccagcctgccagcaagaagatcgatcagaacaagctgaaacctgagatggacgagaagggcaacctgaccaccgccggctttgcctgctctcagtgtggccagcccctgttcgtgtacaagctggagcaggtgtctgagaagggcaaggcttacaccaactacttcggacggtgcaatgtggccgagcacgaaaagctgatcctgctggcccagctgaagcccgagaaggatagcgacgaagccgtgacatatagcctgggaaagtttgggcagagggccctggatttctacagcattcatgtgaccaaggagtccacccaccccgtgaagcccctggcccagatcgccggaaacagatacgcctccggacctgtgggaaaggccctgagcgacgcatgtatgggcacaatcgcctccttcctgtctaagtaccaggacatcatcatcgaacaccagaaggtggtgaagggcaaccagaagagactggagagcctgcgggagctggccggcaaggaaaacctggaataccctagcgtgaccctgccacctcagcctcacaccaaggagggcgttgatgcctacaacgaagtgatcgcccgggtgcgaatgtgggtgaacctgaacctgtggcagaagctgaagctaagcagagatgatgccaagcctctgctgagactgaagggattcccttcctttcctctggtcgagagacaggccaacgaagtggactggtgggacatggtgtgtaacgtgaagaagctgatcaacgagaaaaaggaggatggcaaggtgttttggcagaatctggctggctacaagagacaggaagccctgagaccatacctgagcagcgaggaagatcggaagaagggaaagaaattcgctcggtaccagctgggcgacctgctgctgcacctggaaaagaagcacggcgaggactggggaaaggtgtacgacgaggcctgggagcggattgacaagaaagtggaaggcctgagcaagcacatcaagctggaagaggaacggagaagcgaggacgcccagagcaaggccgccctgaccgactggctgcgggctaaggccagcttcgtgatcgagggcctgaaggaggccgacaaggacgagttctgcagatgcgagctgaagctgcagaagtggtacggggacctgcggggaaagcccttcgccatcgaagccgagaacagcatcctggacatcagcggcttcagcaagcagtacaactgtgccttcatctggcagaaggacggcgtgaagaagctgaacctgtacctgatcatcaactacttcaagggcggcaagctgcggttcaagaagatcaaacctgaagccttcgaagccaacagattctacaccgtgatcaacaaaaagagcggcgagatcgtgcccatggaggtgaacttcaacttcgacgaccccaacctgatcatcctgcctctggcctttggcaagagacagggcagagaattcatctggaacgacctgctgtccctggaaaccggcagcctgaagctggccaacggaagagtgatcgagaagacactgtacaacagaagaacccggcaggatgagcctgccctgttcgtggccctgaccttcgagcggcgggaggtcctggactcctccaatatcaaaccaatgaacctgatcggcgtggcaagaggcgaaaacatccccgccgtgatcgccctgaccgaccccgagggctgcccactgagccggtttaaggatagcctgggaaacccaacccacatcctgagaatcggcgagagctataaggagaagcagcggaccatccaggccaagaaggaggtggagcagcggagagccggcggctacagccggaagtacgccagcaaagccaagaatctggcagacgatatggtgagaaacaccgctagagatctgctgtactacgccgtgacccaggatgccatgctgatcttcgccaacctgagccggggcttcggccggcagggcaagcggaccttcatggccgagagacagtacacacggatggaggactggctgaccgccaagctggcctacgagggcctgagcaagacctacctgtccaagacactggcccagtacacctccaagacatgcagcaactgtgggtttaccatcaccagcgccgactacgacagggtgctggagaagctgaagaagacagcaacaggctggatgaccacaattaacggcaaggagctgaaggtggagggccagattacctactacaacagatacaagagacagaacgtagtcaaggacctgtccgtcgagctggatagactgagcgaagaatctgtgaacaacgacatctcctcctggacaaagggcagaagcggagaagctctgagcctcctgaagaaaagattctcccatagacccgtgcaggagaagttcgtgtgcctgaactgcggcttcgagacacacgcagccgagcaagccgccctgaacatcgccagatcctggctgttcctgcggagccaggagtacaagaaataccagacaaacaagacaaccggcaacaccgataagagagccttcgtcgagacctggcagtccttttaccggaagaagcttaaggaggtgtggaaacctgccgtgcggtctggcggatctggcggaggctcctatggacgccgtgacctacgaggacgtgcacgtgaacttcagccaggaggagtgggccctgctggaccccagccagaagagcctgtacaaggacgtgatgctggagacctactggaacctgacctgcatcggctacaagtgggaggaccacaacatcgaggaccagcaccagagcagcggcaggcacggcaggtgcatcaactgccccagcgcctacggcaagaagcagtgcaccaacctgttcggatctggctccggcagcggccccaagaaaaagagaaaagtctaagctgccttctgcggggcttgccttctggccatgcccttcttctctcccttgcacctgtacctcttggtctttgaataaagcctgagtaggaaggctagcaaaaaaaaaaaaaaaaaaaaaaaaaaaaaaaaaaaaaaaaaaaaaaaaaaaaaaaaaaaaaaaaaaaaaaaaaaaaaaaa

SEQ ID NO: 15706 - RNA, 9485 nt, synthetic construct
  source 1..9485: mol_type = other RNA
aggaaataagagagaaaagaagagtaagaagaaatataagagccaccatggcccctaagaagaagcgtaaagtgagccggatggaacgcctcgtctacgaggtgcggcagaagtgcagaaacatcgaggacatctgcatctcctgcggatctctgaacgtgaccctggagcacccactgttcatcggcggcatgtgccagaactgtaaaaactgttttctggagtgtgcctatcaatacgacgatgacggctaccagagctactgcaccatctgttgcggcggaagagaggtgctgatgtgtggaaataacaactgctgccggtgcttctgcgtggaatgcgtggacctgctggtgggccccggcgccgcccaggccgctattaaggaagatccttggaactgctacatgtgcggccacaagggcacatacggcctgctgagacggagagaggactggcctagcagactgcagatgttcttcgccaataaccacgaccaggagttcgacccccctaaggtgtaccctcccgtccccgccgagaagagaaagcccatccgggtcctgagcctgttcgatggcatcgccaccggtctgctggtgctgaaggacctgggcatccaggtggataggtacattgcctccgaggtgtgcgaggactccatcaccgtgggaatggtgcgtcatcagggcaagatcatgtacgtgggcgacgtgcggagcgtgacacagaagcatatccaggagtggggccctttcgacctggtgatcggcggcagcccttgcaatgacctgagcatcgtgaacccagcccggaagggcctgtacgagggaaccggcagactgttcttcgagttttacagactgctgcacgacgcccggcctaaggaaggcgacgaccggcccttcttttggctgttcgagaatgtggtggccatgggagtcagcgacaagcgggatattagccggttcctggagagcaaccccgtgatgatcgatgccaaggaagtgagcgccgcccaccgggccagatacttctggggcaatctgcctggcatgaacagacccctggccagcaccgtgaacgacaagctggagctgcaggagtgcctggagcacggccggatcgccaagttcagcaaggtgagaaccatcaccacccgaagcaacagcatcaaacaaggcaaggaccagcactttcctgtgttcatgaacgagaaggaggacatcctgtggtgtaccgagatggagagagtgttcgggttcccagtccactacacagatgtcagcaacatgtctagactggccagacagagactgctgggaagaagctggtccgtccctgtgatcagacacctgttcgcccctctgaaggagtacttcgcctgcgtgagcagcggcaacagcaacgccaacagccggggccccagcttctctagcggcctggtgccactgtccctgagagggagccacatgggccccatggagatctacaaaaccgtgagcgcctggaagcggcagcctgtgcgcgtgctgagcctgtttcggaatatcgataaagtcctgaaaagcctgggattcctggagagcggctctggctccggcggtggcaccctgaagtacgtggaggatgtgacaaacgtggtcagacgggatgtggagaagtggggccccttcgatctggtgtacggcagcacccaacccctgggcagctcttgtgaccggtgccctggctggtacatgtttcagttccaccggatcctgcagtacgccctgccgagacaggagtcccagcggccattcttttggattttcatggacaacttgctgctgaccgaggatgaccaggaaactaccactcggttcctgcagaccgaagccgtgaccctgcaggacgtgagaggccgggactaccagaacgccatgcgggtgtggtccaacatccctggactgaaaagcaagcacgcacctctgacccctaaagaagaggagtacctgcaggcccaggtgcggagcagaagcaagctggacgcccctaaggtggatctgctggtgaagaattgcctcctgcccctgagagagtacttcaagtatttcagccagaatagtctgcccctgggaggcagcggcggcggcgccctggtgacatttgaggacgtcgccgtgcggttcacccaggaggaatgggctctgctggatccttctcagaaaatcctgtaccgggacgtgatgagagagacataccggaatctgacctccgtgggcatcaactgggaatgttgggaccttgaagcctgcttcagaagcctgggaagaaacctgagagtgcaggtggtgaagagaaagtgcgagctgaccaacagcggcccctgcgccgagggcggcccaagcagcggcgcccctcctcccagcggcggcagcccagccggctccccaacctctaccgaggagggcacctctgagtccgccacccccgagagcggccctggcacctccaccgagcccagcgagggcagcgcacccggcagccctgccggcagccccacctccacagaggagggaaccagcaccgagcccagcgaaggcagcgccccaggcaccagcaccgagcctagtgagcaggagattaaacggatcaacaagatcagaagaagacttgtgaaagacagcaacaccaagaaggccggcaagacaggccccatgaaaaccctgctggttagagtgatgacacccgatctgagagagcggctggaaaacctgagaaagaagcctgaaaatatcccccagcccatcagcaatacatctagagccaacctgaataagctgctgaccgattacaccgaaatgaagaaggcgatcctgcatgtgtactgggaagagttccagaaggaccctgtgggcctgatgagccgggtggcccagcctgccagcaagaagatcgatcagaacaagctgaaacctgagatggacgagaagggcaacctgaccaccgccggctttgcctgctctcagtgtggccagcccctgttcgtgtacaagctggagcaggtgtctgagaagggcaaggcttacaccaactacttcggacggtgcaatgtggccgagcacgaaaagctgatcctgctggcccagctgaagcccgagaaggatagcgacgaagccgtgacatatagcctgggaaagtttgggcagagggccctggatttctacagcattcatgtgaccaaggagtccacccaccccgtgaagcccctggcccagatcgccggaaacagatacgcctccggacctgtgggaaaggccctgagcgacgcatgtatgggcacaatcgcctccttcctgtctaagtaccaggacatcatcatcgaacaccagaaggtggtgaagggcaaccagaagagactggagagcctgcgggagctggccggcaaggaaaacctggaataccctagcgtgaccctgccacctcagcctcacaccaaggagggcgttgatgcctacaacgaagtgatcgcccgggtgcgaatgtgggtgaacctgaacctgtggcagaagctgaagctaagcagagatgatgccaagcctctgctgagactgaagggattcccttcctttcctctggtcgagagacaggccaacgaagtggactggtgggacatggtgtgtaacgtgaagaagctgatcaacgagaaaaaggaggatggcaaggtgttttggcagaatctggctggctacaagagacaggaagccctgagaccatacctgagcagcgaggaagatcggaagaagggaaagaaattcgctcggtaccagctgggcgacctgctgctgcacctggaaaagaagcacggcgaggactggggaaaggtgtacgacgaggcctgggagcggattgacaagaaagtggaaggcctgagcaagcacatcaagctggaagaggaacggagaagcgaggacgcccagagcaaggccgccctgaccgactggctgcgggctaaggccagcttcgtgatcgagggcctgaaggaggccgacaaggacgagttctgcagatgcgagctgaagctgcagaagtggtacggggacctgcggggaaagcccttcgccatcgaagccgagaacagcatcctggacatcagcggcttcagcaagcagtacaactgtgccttcatctggcagaaggacggcgtgaagaagctgaacctgtacctgatcatcaactacttcaagggcggcaagctgcggttcaagaagatcaaacctgaagccttcgaagccaacagattctacaccgtgatcaacaaaaagagcggcgagatcgtgcccatggaggtgaacttcaacttcgacgaccccaacctgatcatcctgcctctggcctttggcaagagacagggcagagaattcatctggaacgacctgctgtccctggaaaccggcagcctgaagctggccaacggaagagtgatcgagaagacactgtacaacagaagaacccggcaggatgagcctgccctgttcgtggccctgaccttcgagcggcgggaggtcctggactcctccaatatcaaaccaatgaacctgatcggcgtggcaagaggcgaaaacatccccgccgtgatcgccctgaccgaccccgagggctgcccactgagccggtttaaggatagcctgggaaacccaacccacatcctgagaatcggcgagagctataaggagaagcagcggaccatccaggccaagaaggaggtggagcagcggagagccggcggctacagccggaagtacgccagcaaagccaagaatctggcagacgatatggtgagaaacaccgctagagatctgctgtactacgccgtgacccaggatgccatgctgatcttcgccaacctgagccggggcttcggccggcagggcaagcggaccttcatggccgagagacagtacacacggatggaggactggctgaccgccaagctggcctacgagggcctgagcaagacctacctgtccaagacactggcccagtacacctccaagacatgcagcaactgtgggtttaccatcaccagcgccgactacgacagggtgctggagaagctgaagaagacagcaacaggctggatgaccacaattaacggcaaggagctgaaggtggagggccagattacctactacaacagatacaagagacagaacgtagtcaaggacctgtccgtcgagctggatagactgagcgaagaatctgtgaacaacgacatctcctcctggacaaagggcagaagcggagaagctctgagcctcctgaagaaaagattctcccatagacccgtgcaggagaagttcgtgtgcctgaactgcggcttcgagacacacgcagccgagcaagccgccctgaacatcgccagatcctggctgttcctgcggagccaggagtacaagaaataccagacaaacaagacaaccggcaacaccgataagagagccttcgtcgagacctggcagtccttttaccggaagaagcttaaggaggtgtggaaacctgccgtgcggtctggcggatctggcggaggctccaacgagatggtgaccttcaaggacgtggccgtggtgttcagcggcgaggagctggagctgctggacagcgcccagtggaagctgtaccaggacgtgatgctggagaacttcaggaacctgctgagcgtgggcggcaggatccagaccgagctggagaccttccccgaggccggcccccacgaggagctgagctggcagcagatctgggagcagatcgccagcgacagcaccttcagccaggacggcggcccaagcagcggcgcccctcctcccagcggcggcagcccagccggctccccaacctctaccgaggagggcacctctgagtccgccacccccgagagcggccctggcacctccaccgagcccagcgagggcagcgcacccggcagccctgccggcagccccacctccacagaggagggaaccagcaccgagcccagcgaaggcagcgccccaggcaccagcaccgagcctagtgagcaggagattaaacggatcaacaagatcagaagaagacttgtgaaagacagcaacaccaagaaggccggcaagacaggccccatgaaaaccctgctggttagagtgatgacacccgatctgagagagcggctggaaaacctgagaaagaagcctgaaaatatcccccagcccatcagcaatacatctagagccaacctgaataagctgctgaccgattacaccgaaatgaagaaggcgatcctgcatgtgtactgggaagagttccagaaggaccctgtgggcctgatgagccgggtggcccagcctgccagcaagaagatcgatcagaacaagctgaaacctgagatggacgagaagggcaacctgaccaccgccggctttgcctgctctcagtgtggccagcccctgttcgtgtacaagctggagcaggtgtctgagaagggcaaggcttacaccaactacttcggacggtgcaatgtggccgagcacgaaaagctgatcctgctggcccagctgaagcccgagaaggatagcgacgaagccgtgacatatagcctgggaaagtttgggcagagggccctggatttctacagcattcatgtgaccaaggagtccacccaccccgtgaagcccctggcccagatcgccggaaacagatacgcctccggacctgtgggaaaggccctgagcgacgcatgtatgggcacaatcgcctccttcctgtctaagtaccaggacatcatcatcgaacaccagaaggtggtgaagggcaaccagaagagactggagagcctgcgggagctggccggcaaggaaaacctggaataccctagcgtgaccctgccacctcagcctcacaccaaggagggcgttgatgcctacaacgaagtgatcgcccgggtgcgaatgtgggtgaacctgaacctgtggcagaagctgaagctaagcagagatgatgccaagcctctgctgagactgaagggattcccttcctttcctctggtcgagagacaggccaacgaagtggactggtgggacatggtgtgtaacgtgaagaagctgatcaacgagaaaaaggaggatggcaaggtgttttggcagaatctggctggctacaagagacaggaagccctgagaccatacctgagcagcgaggaagatcggaagaagggaaagaaattcgctcggtaccagctgggcgacctgctgctgcacctggaaaagaagcacggcgaggactggggaaaggtgtacgacgaggcctgggagcggattgacaagaaagtggaaggcctgagcaagcacatcaagctggaagaggaacggagaagcgaggacgcccagagcaaggccgccctgaccgactggctgcgggctaaggccagcttcgtgatcgagggcctgaaggaggccgacaaggacgagttctgcagatgcgagctgaagctgcagaagtggtacggggacctgcggggaaagcccttcgccatcgaagccgagaacagcatcctggacatcagcggcttcagcaagcagtacaactgtgccttcatctggcagaaggacggcgtgaagaagctgaacctgtacctgatcatcaactacttcaagggcggcaagctgcggttcaagaagatcaaacctgaagccttcgaagccaacagattctacaccgtgatcaacaaaaagagcggcgagatcgtgcccatggaggtgaacttcaacttcgacgaccccaacctgatcatcctgcctctggcctttggcaagagacagggcagagaattcatctggaacgacctgctgtccctggaaaccggcagcctgaagctggccaacggaagagtgatcgagaagacactgtacaacagaagaacccggcaggatgagcctgccctgttcgtggccctgaccttcgagcggcgggaggtcctggactcctccaatatcaaaccaatgaacctgatcggcgtggcaagaggcgaaaacatccccgccgtgatcgccctgaccgaccccgagggctgcccactgagccggtttaaggatagcctgggaaacccaacccacatcctgagaatcggcgagagctataaggagaagcagcggaccatccaggccaagaaggaggtggagcagcggagagccggcggctacagccggaagtacgccagcaaagccaagaatctggcagacgatatggtgagaaacaccgctagagatctgctgtactacgccgtgacccaggatgccatgctgatcttcgccaacctgagccggggcttcggccggcagggcaagcggaccttcatggccgagagacagtacacacggatggaggactggctgaccgccaagctggcctacgagggcctgagcaagacctacctgtccaagacactggcccagtacacctccaagacatgcagcaactgtgggtttaccatcaccagcgccgactacgacagggtgctggagaagctgaagaagacagcaacaggctggatgaccacaattaacggcaaggagctgaaggtggagggccagattacctactacaacagatacaagagacagaacgtagtcaaggacctgtccgtcgagctggatagactgagcgaagaatctgtgaacaacgacatctcctcctggacaaagggcagaagcggagaagctctgagcctcctgaagaaaagattctcccatagacccgtgcaggagaagttcgtgtgcctgaactgcggcttcgagacacacgcagccgagcaagccgccctgaacatcgccagatcctggctgttcctgcggagccaggagtacaagaaataccagacaaacaagacaaccggcaacaccgataagagagccttcgtcgagacctggcagtccttttaccggaagaagcttaaggaggtgtggaaacctgccgtgcggtctggcggatctggcggaggctcctaacgagatggtgaccttcaaggacgtggccgtggtgttcagcggcgaggagctggagctgctggacagcgcccagtggaagctgtaccaggacgtgatgctggagaacttcaggaacctgctgagcgtgggcggcaggatccagaccgagctggagaccttccccgaggccggcccccacgaggagctgagctggcagcagatctgggagcagatcgccagcgacagcaccttcagccaggacggatctggctccggcagcggccccaagaaaaagagaaaagtctaagctgccttctgcggggcttgccttctggccatgcccttcttctctcccttgcacctgtacctcttggtctttgaataaagcctgagtaggaaggctagcaaaaaaaaaaaaaaaaaaaaaaaaaaaaaaaaaaaaaaaaaaaaaaaaaaaaaaaaaaaaaaaaaaaaaaaaaaaaaaaa

SEQ ID NO: 15707 - RNA, 9485 nt, synthetic construct
  source 1..9485: mol_type = other RNA
aggaaataagagagaaaagaagagtaagaagaaatataagagccaccatggcccctaagaagaagcgtaaagtgagccggatggaacgcctcgtctacgaggtgcggcagaagtgcagaaacatcgaggacatctgcatctcctgcggatctctgaacgtgaccctggagcacccactgttcatcggcggcatgtgccagaactgtaaaaactgttttctggagtgtgcctatcaatacgacgatgacggctaccagagctactgcaccatctgttgcggcggaagagaggtgctgatgtgtggaaataacaactgctgccggtgcttctgcgtggaatgcgtggacctgctggtgggccccggcgccgcccaggccgctattaaggaagatccttggaactgctacatgtgcggccacaagggcacatacggcctgctgagacggagagaggactggcctagcagactgcagatgttcttcgccaataaccacgaccaggagttcgacccccctaaggtgtaccctcccgtccccgccgagaagagaaagcccatccgggtcctgagcctgttcgatggcatcgccaccggtctgctggtgctgaaggacctgggcatccaggtggataggtacattgcctccgaggtgtgcgaggactccatcaccgtgggaatggtgcgtcatcagggcaagatcatgtacgtgggcgacgtgcggagcgtgacacagaagcatatccaggagtggggccctttcgacctggtgatcggcggcagcccttgcaatgacctgagcatcgtgaacccagcccggaagggcctgtacgagggaaccggcagactgttcttcgagttttacagactgctgcacgacgcccggcctaaggaaggcgacgaccggcccttcttttggctgttcgagaatgtggtggccatgggagtcagcgacaagcgggatattagccggttcctggagagcaaccccgtgatgatcgatgccaaggaagtgagcgccgcccaccgggccagatacttctggggcaatctgcctggcatgaacagacccctggccagcaccgtgaacgacaagctggagctgcaggagtgcctggagcacggccggatcgccaagttcagcaaggtgagaaccatcaccacccgaagcaacagcatcaaacaaggcaaggaccagcactttcctgtgttcatgaacgagaaggaggacatcctgtggtgtaccgagatggagagagtgttcgggttcccagtccactacacagatgtcagcaacatgtctagactggccagacagagactgctgggaagaagctggtccgtccctgtgatcagacacctgttcgcccctctgaaggagtacttcgcctgcgtgagcagcggcaacagcaacgccaacagccggggccccagcttctctagcggcctggtgccactgtccctgagagggagccacatgggccccatggagatctacaaaaccgtgagcgcctggaagcggcagcctgtgcgcgtgctgagcctgtttcggaatatcgataaagtcctgaaaagcctgggattcctggagagcggctctggctccggcggtggcaccctgaagtacgtggaggatgtgacaaacgtggtcagacgggatgtggagaagtggggccccttcgatctggtgtacggcagcacccaacccctgggcagctcttgtgaccggtgccctggctggtacatgtttcagttccaccggatcctgcagtacgccctgccgagacaggagtcccagcggccattcttttggattttcatggacaacttgctgctgaccgaggatgaccaggaaactaccactcggttcctgcagaccgaagccgtgaccctgcaggacgtgagaggccgggactaccagaacgccatgcgggtgtggtccaacatccctggactgaaaagcaagcacgcacctctgacccctaaagaagaggagtacctgcaggcccaggtgcggagcagaagcaagctggacgcccctaaggtggatctgctggtgaagaattgcctcctgcccctgagagagtacttcaagtatttcagccagaatagtctgcccctgggaggcagcggcggcggcgccctggtgacatttgaggacgtcgccgtgcggttcacccaggaggaatgggctctgctggatccttctcagaaaatcctgtaccgggacgtgatgagagagacataccggaatctgacctccgtgggcatcaactgggaatgttgggaccttgaagcctgcttcagaagcctgggaagaaacctgagagtgcaggtggtgaagagaaagtgcgagctgaccaacagcggcccctgcgccgagggcggcccaagcagcggcgcccctcctcccagcggcggcagcccagccggctccccaacctctaccgaggagggcacctctgagtccgccacccccgagagcggccctggcacctccaccgagcccagcgagggcagcgcacccggcagccctgccggcagccccacctccacagaggagggaaccagcaccgagcccagcgaaggcagcgccccaggcaccagcaccgagcctagtgagcaggagattaaacggatcaacaagatcagaagaagacttgtgaaagacagcaacaccaagaaggccggcaagacaggccccatgaaaaccctgctggttagagtgatgacacccgatctgagagagcggctggaaaacctgagaaagaagcctgaaaatatcccccagcccatcagcaatacatctagagccaacctgaataagctgctgaccgattacaccgaaatgaagaaggcgatcctgcatgtgtactgggaagagttccagaaggaccctgtgggcctgatgagccgggtggcccagcctgccagcaagaagatcgatcagaacaagctgaaacctgagatggacgagaagggcaacctgaccaccgccggctttgcctgctctcagtgtggccagcccctgttcgtgtacaagctggagcaggtgtctgagaagggcaaggcttacaccaactacttcggacggtgcaatgtggccgagcacgaaaagctgatcctgctggcccagctgaagcccgagaaggatagcgacgaagccgtgacatatagcctgggaaagtttgggcagagggccctggatttctacagcattcatgtgaccaaggagtccacccaccccgtgaagcccctggcccagatcgccggaaacagatacgcctccggacctgtgggaaaggccctgagcgacgcatgtatgggcacaatcgcctccttcctgtctaagtaccaggacatcatcatcgaacaccagaaggtggtgaagggcaaccagaagagactggagagcctgcgggagctggccggcaaggaaaacctggaataccctagcgtgaccctgccacctcagcctcacaccaaggagggcgttgatgcctacaacgaagtgatcgcccgggtgcgaatgtgggtgaacctgaacctgtggcagaagctgaagctaagcagagatgatgccaagcctctgctgagactgaagggattcccttcctttcctctggtcgagagacaggccaacgaagtggactggtgggacatggtgtgtaacgtgaagaagctgatcaacgagaaaaaggaggatggcaaggtgttttggcagaatctggctggctacaagagacaggaagccctgagaccatacctgagcagcgaggaagatcggaagaagggaaagaaattcgctcggtaccagctgggcgacctgctgctgcacctggaaaagaagcacggcgaggactggggaaaggtgtacgacgaggcctgggagcggattgacaagaaagtggaaggcctgagcaagcacatcaagctggaagaggaacggagaagcgaggacgcccagagcaaggccgccctgaccgactggctgcgggctaaggccagcttcgtgatcgagggcctgaaggaggccgacaaggacgagttctgcagatgcgagctgaagctgcagaagtggtacggggacctgcggggaaagcccttcgccatcgaagccgagaacagcatcctggacatcagcggcttcagcaagcagtacaactgtgccttcatctggcagaaggacggcgtgaagaagctgaacctgtacctgatcatcaactacttcaagggcggcaagctgcggttcaagaagatcaaacctgaagccttcgaagccaacagattctacaccgtgatcaacaaaaagagcggcgagatcgtgcccatggaggtgaacttcaacttcgacgaccccaacctgatcatcctgcctctggcctttggcaagagacagggcagagaattcatctggaacgacctgctgtccctggaaaccggcagcctgaagctggccaacggaagagtgatcgagaagacactgtacaacagaagaacccggcaggatgagcctgccctgttcgtggccctgaccttcgagcggcgggaggtcctggactcctccaatatcaaaccaatgaacctgatcggcgtggcaagaggcgaaaacatccccgccgtgatcgccctgaccgaccccgagggctgcccactgagccggtttaaggatagcctgggaaacccaacccacatcctgagaatcggcgagagctataaggagaagcagcggaccatccaggccaagaaggaggtggagcagcggagagccggcggctacagccggaagtacgccagcaaagccaagaatctggcagacgatatggtgagaaacaccgctagagatctgctgtactacgccgtgacccaggatgccatgctgatcttcgccaacctgagccggggcttcggccggcagggcaagcggaccttcatggccgagagacagtacacacggatggaggactggctgaccgccaagctggcctacgagggcctgagcaagacctacctgtccaagacactggcccagtacacctccaagacatgcagcaactgtgggtttaccatcaccagcgccgactacgacagggtgctggagaagctgaagaagacagcaacaggctggatgaccacaattaacggcaaggagctgaaggtggagggccagattacctactacaacagatacaagagacagaacgtagtcaaggacctgtccgtcgagctggatagactgagcgaagaatctgtgaacaacgacatctcctcctggacaaagggcagaagcggagaagctctgagcctcctgaagaaaagattctcccatagacccgtgcaggagaagttcgtgtgcctgaactgcggcttcgagacacacgcagccgagcaagccgccctgaacatcgccagatcctggctgttcctgcggagccaggagtacaagaaataccagacaaacaagacaaccggcaacaccgataagagagccttcgtcgagacctggcagtccttttaccggaagaagcttaaggaggtgtggaaacctgccgtgcggtctggcggatctggcggaggctccccccaggccgccatgaccttccaggacgtggccgtggacttcaccagggaggagtggaggctgctggagcccccccagaaggagctgtactgggaggtgatgctggagaactacaggaacctggtgtgcctgggcctgaccgtgagcaagcccgacgtgatcagccagctggagcagggcgaggccccctggaggctggagggcggcagcgccaggggcaggtgcctggactggggcatgaggggcggcccaagcagcggcgcccctcctcccagcggcggcagcccagccggctccccaacctctaccgaggagggcacctctgagtccgccacccccgagagcggccctggcacctccaccgagcccagcgagggcagcgcacccggcagccctgccggcagccccacctccacagaggagggaaccagcaccgagcccagcgaaggcagcgccccaggcaccagcaccgagcctagtgagcaggagattaaacggatcaacaagatcagaagaagacttgtgaaagacagcaacaccaagaaggccggcaagacaggccccatgaaaaccctgctggttagagtgatgacacccgatctgagagagcggctggaaaacctgagaaagaagcctgaaaatatcccccagcccatcagcaatacatctagagccaacctgaataagctgctgaccgattacaccgaaatgaagaaggcgatcctgcatgtgtactgggaagagttccagaaggaccctgtgggcctgatgagccgggtggcccagcctgccagcaagaagatcgatcagaacaagctgaaacctgagatggacgagaagggcaacctgaccaccgccggctttgcctgctctcagtgtggccagcccctgttcgtgtacaagctggagcaggtgtctgagaagggcaaggcttacaccaactacttcggacggtgcaatgtggccgagcacgaaaagctgatcctgctggcccagctgaagcccgagaaggatagcgacgaagccgtgacatatagcctgggaaagtttgggcagagggccctggatttctacagcattcatgtgaccaaggagtccacccaccccgtgaagcccctggcccagatcgccggaaacagatacgcctccggacctgtgggaaaggccctgagcgacgcatgtatgggcacaatcgcctccttcctgtctaagtaccaggacatcatcatcgaacaccagaaggtggtgaagggcaaccagaagagactggagagcctgcgggagctggccggcaaggaaaacctggaataccctagcgtgaccctgccacctcagcctcacaccaaggagggcgttgatgcctacaacgaagtgatcgcccgggtgcgaatgtgggtgaacctgaacctgtggcagaagctgaagctaagcagagatgatgccaagcctctgctgagactgaagggattcccttcctttcctctggtcgagagacaggccaacgaagtggactggtgggacatggtgtgtaacgtgaagaagctgatcaacgagaaaaaggaggatggcaaggtgttttggcagaatctggctggctacaagagacaggaagccctgagaccatacctgagcagcgaggaagatcggaagaagggaaagaaattcgctcggtaccagctgggcgacctgctgctgcacctggaaaagaagcacggcgaggactggggaaaggtgtacgacgaggcctgggagcggattgacaagaaagtggaaggcctgagcaagcacatcaagctggaagaggaacggagaagcgaggacgcccagagcaaggccgccctgaccgactggctgcgggctaaggccagcttcgtgatcgagggcctgaaggaggccgacaaggacgagttctgcagatgcgagctgaagctgcagaagtggtacggggacctgcggggaaagcccttcgccatcgaagccgagaacagcatcctggacatcagcggcttcagcaagcagtacaactgtgccttcatctggcagaaggacggcgtgaagaagctgaacctgtacctgatcatcaactacttcaagggcggcaagctgcggttcaagaagatcaaacctgaagccttcgaagccaacagattctacaccgtgatcaacaaaaagagcggcgagatcgtgcccatggaggtgaacttcaacttcgacgaccccaacctgatcatcctgcctctggcctttggcaagagacagggcagagaattcatctggaacgacctgctgtccctggaaaccggcagcctgaagctggccaacggaagagtgatcgagaagacactgtacaacagaagaacccggcaggatgagcctgccctgttcgtggccctgaccttcgagcggcgggaggtcctggactcctccaatatcaaaccaatgaacctgatcggcgtggcaagaggcgaaaacatccccgccgtgatcgccctgaccgaccccgagggctgcccactgagccggtttaaggatagcctgggaaacccaacccacatcctgagaatcggcgagagctataaggagaagcagcggaccatccaggccaagaaggaggtggagcagcggagagccggcggctacagccggaagtacgccagcaaagccaagaatctggcagacgatatggtgagaaacaccgctagagatctgctgtactacgccgtgacccaggatgccatgctgatcttcgccaacctgagccggggcttcggccggcagggcaagcggaccttcatggccgagagacagtacacacggatggaggactggctgaccgccaagctggcctacgagggcctgagcaagacctacctgtccaagacactggcccagtacacctccaagacatgcagcaactgtgggtttaccatcaccagcgccgactacgacagggtgctggagaagctgaagaagacagcaacaggctggatgaccacaattaacggcaaggagctgaaggtggagggccagattacctactacaacagatacaagagacagaacgtagtcaaggacctgtccgtcgagctggatagactgagcgaagaatctgtgaacaacgacatctcctcctggacaaagggcagaagcggagaagctctgagcctcctgaagaaaagattctcccatagacccgtgcaggagaagttcgtgtgcctgaactgcggcttcgagacacacgcagccgagcaagccgccctgaacatcgccagatcctggctgttcctgcggagccaggagtacaagaaataccagacaaacaagacaaccggcaacaccgataagagagccttcgtcgagacctggcagtccttttaccggaagaagcttaaggaggtgtggaaacctgccgtgcggtctggcggatctggcggaggctcctccccaggccgccatgaccttccaggacgtggccgtggacttcaccagggaggagtggaggctgctggagcccccccagaaggagctgtactgggaggtgatgctggagaactacaggaacctggtgtgcctgggcctgaccgtgagcaagcccgacgtgatcagccagctggagcagggcgaggccccctggaggctggagggcggcagcgccaggggcaggtgcctggactggggcatgaggggatctggctccggcagcggccccaagaaaaagagaaaagtctaagctgccttctgcggggcttgccttctggccatgcccttcttctctcccttgcacctgtacctcttggtctttgaataaagcctgagtaggaaggctagcaaaaaaaaaaaaaaaaaaaaaaaaaaaaaaaaaaaaaaaaaaaaaaaaaaaaaaaaaaaaaaaaaaaaaaaaaaaaaaaa

SEQ ID NO: 15708 - RNA, 9485 nt, synthetic construct
  source 1..9485: mol_type = other RNA
aggaaataagagagaaaagaagagtaagaagaaatataagagccaccatggcccctaagaagaagcgtaaagtgagccggatggaacgcctcgtctacgaggtgcggcagaagtgcagaaacatcgaggacatctgcatctcctgcggatctctgaacgtgaccctggagcacccactgttcatcggcggcatgtgccagaactgtaaaaactgttttctggagtgtgcctatcaatacgacgatgacggctaccagagctactgcaccatctgttgcggcggaagagaggtgctgatgtgtggaaataacaactgctgccggtgcttctgcgtggaatgcgtggacctgctggtgggccccggcgccgcccaggccgctattaaggaagatccttggaactgctacatgtgcggccacaagggcacatacggcctgctgagacggagagaggactggcctagcagactgcagatgttcttcgccaataaccacgaccaggagttcgacccccctaaggtgtaccctcccgtccccgccgagaagagaaagcccatccgggtcctgagcctgttcgatggcatcgccaccggtctgctggtgctgaaggacctgggcatccaggtggataggtacattgcctccgaggtgtgcgaggactccatcaccgtgggaatggtgcgtcatcagggcaagatcatgtacgtgggcgacgtgcggagcgtgacacagaagcatatccaggagtggggccctttcgacctggtgatcggcggcagcccttgcaatgacctgagcatcgtgaacccagcccggaagggcctgtacgagggaaccggcagactgttcttcgagttttacagactgctgcacgacgcccggcctaaggaaggcgacgaccggcccttcttttggctgttcgagaatgtggtggccatgggagtcagcgacaagcgggatattagccggttcctggagagcaaccccgtgatgatcgatgccaaggaagtgagcgccgcccaccgggccagatacttctggggcaatctgcctggcatgaacagacccctggccagcaccgtgaacgacaagctggagctgcaggagtgcctggagcacggccggatcgccaagttcagcaaggtgagaaccatcaccacccgaagcaacagcatcaaacaaggcaaggaccagcactttcctgtgttcatgaacgagaaggaggacatcctgtggtgtaccgagatggagagagtgttcgggttcccagtccactacacagatgtcagcaacatgtctagactggccagacagagactgctgggaagaagctggtccgtccctgtgatcagacacctgttcgcccctctgaaggagtacttcgcctgcgtgagcagcggcaacagcaacgccaacagccggggccccagcttctctagcggcctggtgccactgtccctgagagggagccacatgggccccatggagatctacaaaaccgtgagcgcctggaagcggcagcctgtgcgcgtgctgagcctgtttcggaatatcgataaagtcctgaaaagcctgggattcctggagagcggctctggctccggcggtggcaccctgaagtacgtggaggatgtgacaaacgtggtcagacgggatgtggagaagtggggccccttcgatctggtgtacggcagcacccaacccctgggcagctcttgtgaccggtgccctggctggtacatgtttcagttccaccggatcctgcagtacgccctgccgagacaggagtcccagcggccattcttttggattttcatggacaacttgctgctgaccgaggatgaccaggaaactaccactcggttcctgcagaccgaagccgtgaccctgcaggacgtgagaggccgggactaccagaacgccatgcgggtgtggtccaacatccctggactgaaaagcaagcacgcacctctgacccctaaagaagaggagtacctgcaggcccaggtgcggagcagaagcaagctggacgcccctaaggtggatctgctggtgaagaattgcctcctgcccctgagagagtacttcaagtatttcagccagaatagtctgcccctgggaggcagcggcggcggcgccctggtgacatttgaggacgtcgccgtgcggttcacccaggaggaatgggctctgctggatccttctcagaaaatcctgtaccgggacgtgatgagagagacataccggaatctgacctccgtgggcatcaactgggaatgttgggaccttgaagcctgcttcagaagcctgggaagaaacctgagagtgcaggtggtgaagagaaagtgcgagctgaccaacagcggcccctgcgccgagggcggcccaagcagcggcgcccctcctcccagcggcggcagcccagccggctccccaacctctaccgaggagggcacctctgagtccgccacccccgagagcggccctggcacctccaccgagcccagcgagggcagcgcacccggcagccctgccggcagccccacctccacagaggagggaaccagcaccgagcccagcgaaggcagcgccccaggcaccagcaccgagcctagtgagcaggagattaaacggatcaacaagatcagaagaagacttgtgaaagacagcaacaccaagaaggccggcaagacaggccccatgaaaaccctgctggttagagtgatgacacccgatctgagagagcggctggaaaacctgagaaagaagcctgaaaatatcccccagcccatcagcaatacatctagagccaacctgaataagctgctgaccgattacaccgaaatgaagaaggcgatcctgcatgtgtactgggaagagttccagaaggaccctgtgggcctgatgagccgggtggcccagcctgccagcaagaagatcgatcagaacaagctgaaacctgagatggacgagaagggcaacctgaccaccgccggctttgcctgctctcagtgtggccagcccctgttcgtgtacaagctggagcaggtgtctgagaagggcaaggcttacaccaactacttcggacggtgcaatgtggccgagcacgaaaagctgatcctgctggcccagctgaagcccgagaaggatagcgacgaagccgtgacatatagcctgggaaagtttgggcagagggccctggatttctacagcattcatgtgaccaaggagtccacccaccccgtgaagcccctggcccagatcgccggaaacagatacgcctccggacctgtgggaaaggccctgagcgacgcatgtatgggcacaatcgcctccttcctgtctaagtaccaggacatcatcatcgaacaccagaaggtggtgaagggcaaccagaagagactggagagcctgcgggagctggccggcaaggaaaacctggaataccctagcgtgaccctgccacctcagcctcacaccaaggagggcgttgatgcctacaacgaagtgatcgcccgggtgcgaatgtgggtgaacctgaacctgtggcagaagctgaagctaagcagagatgatgccaagcctctgctgagactgaagggattcccttcctttcctctggtcgagagacaggccaacgaagtggactggtgggacatggtgtgtaacgtgaagaagctgatcaacgagaaaaaggaggatggcaaggtgttttggcagaatctggctggctacaagagacaggaagccctgagaccatacctgagcagcgaggaagatcggaagaagggaaagaaattcgctcggtaccagctgggcgacctgctgctgcacctggaaaagaagcacggcgaggactggggaaaggtgtacgacgaggcctgggagcggattgacaagaaagtggaaggcctgagcaagcacatcaagctggaagaggaacggagaagcgaggacgcccagagcaaggccgccctgaccgactggctgcgggctaaggccagcttcgtgatcgagggcctgaaggaggccgacaaggacgagttctgcagatgcgagctgaagctgcagaagtggtacggggacctgcggggaaagcccttcgccatcgaagccgagaacagcatcctggacatcagcggcttcagcaagcagtacaactgtgccttcatctggcagaaggacggcgtgaagaagctgaacctgtacctgatcatcaactacttcaagggcggcaagctgcggttcaagaagatcaaacctgaagccttcgaagccaacagattctacaccgtgatcaacaaaaagagcggcgagatcgtgcccatggaggtgaacttcaacttcgacgaccccaacctgatcatcctgcctctggcctttggcaagagacagggcagagaattcatctggaacgacctgctgtccctggaaaccggcagcctgaagctggccaacggaagagtgatcgagaagacactgtacaacagaagaacccggcaggatgagcctgccctgttcgtggccctgaccttcgagcggcgggaggtcctggactcctccaatatcaaaccaatgaacctgatcggcgtggcaagaggcgaaaacatccccgccgtgatcgccctgaccgaccccgagggctgcccactgagccggtttaaggatagcctgggaaacccaacccacatcctgagaatcggcgagagctataaggagaagcagcggaccatccaggccaagaaggaggtggagcagcggagagccggcggctacagccggaagtacgccagcaaagccaagaatctggcagacgatatggtgagaaacaccgctagagatctgctgtactacgccgtgacccaggatgccatgctgatcttcgccaacctgagccggggcttcggccggcagggcaagcggaccttcatggccgagagacagtacacacggatggaggactggctgaccgccaagctggcctacgagggcctgagcaagacctacctgtccaagacactggcccagtacacctccaagacatgcagcaactgtgggtttaccatcaccagcgccgactacgacagggtgctggagaagctgaagaagacagcaacaggctggatgaccacaattaacggcaaggagctgaaggtggagggccagattacctactacaacagatacaagagacagaacgtagtcaaggacctgtccgtcgagctggatagactgagcgaagaatctgtgaacaacgacatctcctcctggacaaagggcagaagcggagaagctctgagcctcctgaagaaaagattctcccatagacccgtgcaggagaagttcgtgtgcctgaactgcggcttcgagacacacgcagccgagcaagccgccctgaacatcgccagatcctggctgttcctgcggagccaggagtacaagaaataccagacaaacaagacaaccggcaacaccgataagagagccttcgtcgagacctggcagtccttttaccggaagaagcttaaggaggtgtggaaacctgccgtgcggtctggcggatctggcggaggctccgccaagggcctgctgaccttcggcgacgtggccatcgagttcagccaggaggagtgggagtgcctgagccacacccagagggagctgtacagggacgtgatcctggagaactacggccacctgctgttcctgggcgtgatcgtgagcaagcccgacctggtgagcctgctggagcagaggaaggagccctggggcgagaagaggaacaagaccaggatccacgtgggcaagaaccccttcggcggcggcccaagcagcggcgcccctcctcccagcggcggcagcccagccggctccccaacctctaccgaggagggcacctctgagtccgccacccccgagagcggccctggcacctccaccgagcccagcgagggcagcgcacccggcagccctgccggcagccccacctccacagaggagggaaccagcaccgagcccagcgaaggcagcgccccaggcaccagcaccgagcctagtgagcaggagattaaacggatcaacaagatcagaagaagacttgtgaaagacagcaacaccaagaaggccggcaagacaggccccatgaaaaccctgctggttagagtgatgacacccgatctgagagagcggctggaaaacctgagaaagaagcctgaaaatatcccccagcccatcagcaatacatctagagccaacctgaataagctgctgaccgattacaccgaaatgaagaaggcgatcctgcatgtgtactgggaagagttccagaaggaccctgtgggcctgatgagccgggtggcccagcctgccagcaagaagatcgatcagaacaagctgaaacctgagatggacgagaagggcaacctgaccaccgccggctttgcctgctctcagtgtggccagcccctgttcgtgtacaagctggagcaggtgtctgagaagggcaaggcttacaccaactacttcggacggtgcaatgtggccgagcacgaaaagctgatcctgctggcccagctgaagcccgagaaggatagcgacgaagccgtgacatatagcctgggaaagtttgggcagagggccctggatttctacagcattcatgtgaccaaggagtccacccaccccgtgaagcccctggcccagatcgccggaaacagatacgcctccggacctgtgggaaaggccctgagcgacgcatgtatgggcacaatcgcctccttcctgtctaagtaccaggacatcatcatcgaacaccagaaggtggtgaagggcaaccagaagagactggagagcctgcgggagctggccggcaaggaaaacctggaataccctagcgtgaccctgccacctcagcctcacaccaaggagggcgttgatgcctacaacgaagtgatcgcccgggtgcgaatgtgggtgaacctgaacctgtggcagaagctgaagctaagcagagatgatgccaagcctctgctgagactgaagggattcccttcctttcctctggtcgagagacaggccaacgaagtggactggtgggacatggtgtgtaacgtgaagaagctgatcaacgagaaaaaggaggatggcaaggtgttttggcagaatctggctggctacaagagacaggaagccctgagaccatacctgagcagcgaggaagatcggaagaagggaaagaaattcgctcggtaccagctgggcgacctgctgctgcacctggaaaagaagcacggcgaggactggggaaaggtgtacgacgaggcctgggagcggattgacaagaaagtggaaggcctgagcaagcacatcaagctggaagaggaacggagaagcgaggacgcccagagcaaggccgccctgaccgactggctgcgggctaaggccagcttcgtgatcgagggcctgaaggaggccgacaaggacgagttctgcagatgcgagctgaagctgcagaagtggtacggggacctgcggggaaagcccttcgccatcgaagccgagaacagcatcctggacatcagcggcttcagcaagcagtacaactgtgccttcatctggcagaaggacggcgtgaagaagctgaacctgtacctgatcatcaactacttcaagggcggcaagctgcggttcaagaagatcaaacctgaagccttcgaagccaacagattctacaccgtgatcaacaaaaagagcggcgagatcgtgcccatggaggtgaacttcaacttcgacgaccccaacctgatcatcctgcctctggcctttggcaagagacagggcagagaattcatctggaacgacctgctgtccctggaaaccggcagcctgaagctggccaacggaagagtgatcgagaagacactgtacaacagaagaacccggcaggatgagcctgccctgttcgtggccctgaccttcgagcggcgggaggtcctggactcctccaatatcaaaccaatgaacctgatcggcgtggcaagaggcgaaaacatccccgccgtgatcgccctgaccgaccccgagggctgcccactgagccggtttaaggatagcctgggaaacccaacccacatcctgagaatcggcgagagctataaggagaagcagcggaccatccaggccaagaaggaggtggagcagcggagagccggcggctacagccggaagtacgccagcaaagccaagaatctggcagacgatatggtgagaaacaccgctagagatctgctgtactacgccgtgacccaggatgccatgctgatcttcgccaacctgagccggggcttcggccggcagggcaagcggaccttcatggccgagagacagtacacacggatggaggactggctgaccgccaagctggcctacgagggcctgagcaagacctacctgtccaagacactggcccagtacacctccaagacatgcagcaactgtgggtttaccatcaccagcgccgactacgacagggtgctggagaagctgaagaagacagcaacaggctggatgaccacaattaacggcaaggagctgaaggtggagggccagattacctactacaacagatacaagagacagaacgtagtcaaggacctgtccgtcgagctggatagactgagcgaagaatctgtgaacaacgacatctcctcctggacaaagggcagaagcggagaagctctgagcctcctgaagaaaagattctcccatagacccgtgcaggagaagttcgtgtgcctgaactgcggcttcgagacacacgcagccgagcaagccgccctgaacatcgccagatcctggctgttcctgcggagccaggagtacaagaaataccagacaaacaagacaaccggcaacaccgataagagagccttcgtcgagacctggcagtccttttaccggaagaagcttaaggaggtgtggaaacctgccgtgcggtctggcggatctggcggaggctcctgccaagggcctgctgaccttcggcgacgtggccatcgagttcagccaggaggagtgggagtgcctgagccacacccagagggagctgtacagggacgtgatcctggagaactacggccacctgctgttcctgggcgtgatcgtgagcaagcccgacctggtgagcctgctggagcagaggaaggagccctggggcgagaagaggaacaagaccaggatccacgtgggcaagaaccccttcggcggatctggctccggcagcggccccaagaaaaagagaaaagtctaagctgccttctgcggggcttgccttctggccatgcccttcttctctcccttgcacctgtacctcttggtctttgaataaagcctgagtaggaaggctagcaaaaaaaaaaaaaaaaaaaaaaaaaaaaaaaaaaaaaaaaaaaaaaaaaaaaaaaaaaaaaaaaaaaaaaaaaaaaaaaa

SEQ ID NO: 15709 - RNA, 9485 nt, synthetic construct
  source 1..9485: mol_type = other RNA
aggaaataagagagaaaagaagagtaagaagaaatataagagccaccatggcccctaagaagaagcgtaaagtgagccggatggaacgcctcgtctacgaggtgcggcagaagtgcagaaacatcgaggacatctgcatctcctgcggatctctgaacgtgaccctggagcacccactgttcatcggcggcatgtgccagaactgtaaaaactgttttctggagtgtgcctatcaatacgacgatgacggctaccagagctactgcaccatctgttgcggcggaagagaggtgctgatgtgtggaaataacaactgctgccggtgcttctgcgtggaatgcgtggacctgctggtgggccccggcgccgcccaggccgctattaaggaagatccttggaactgctacatgtgcggccacaagggcacatacggcctgctgagacggagagaggactggcctagcagactgcagatgttcttcgccaataaccacgaccaggagttcgacccccctaaggtgtaccctcccgtccccgccgagaagagaaagcccatccgggtcctgagcctgttcgatggcatcgccaccggtctgctggtgctgaaggacctgggcatccaggtggataggtacattgcctccgaggtgtgcgaggactccatcaccgtgggaatggtgcgtcatcagggcaagatcatgtacgtgggcgacgtgcggagcgtgacacagaagcatatccaggagtggggccctttcgacctggtgatcggcggcagcccttgcaatgacctgagcatcgtgaacccagcccggaagggcctgtacgagggaaccggcagactgttcttcgagttttacagactgctgcacgacgcccggcctaaggaaggcgacgaccggcccttcttttggctgttcgagaatgtggtggccatgggagtcagcgacaagcgggatattagccggttcctggagagcaaccccgtgatgatcgatgccaaggaagtgagcgccgcccaccgggccagatacttctggggcaatctgcctggcatgaacagacccctggccagcaccgtgaacgacaagctggagctgcaggagtgcctggagcacggccggatcgccaagttcagcaaggtgagaaccatcaccacccgaagcaacagcatcaaacaaggcaaggaccagcactttcctgtgttcatgaacgagaaggaggacatcctgtggtgtaccgagatggagagagtgttcgggttcccagtccactacacagatgtcagcaacatgtctagactggccagacagagactgctgggaagaagctggtccgtccctgtgatcagacacctgttcgcccctctgaaggagtacttcgcctgcgtgagcagcggcaacagcaacgccaacagccggggccccagcttctctagcggcctggtgccactgtccctgagagggagccacatgggccccatggagatctacaaaaccgtgagcgcctggaagcggcagcctgtgcgcgtgctgagcctgtttcggaatatcgataaagtcctgaaaagcctgggattcctggagagcggctctggctccggcggtggcaccctgaagtacgtggaggatgtgacaaacgtggtcagacgggatgtggagaagtggggccccttcgatctggtgtacggcagcacccaacccctgggcagctcttgtgaccggtgccctggctggtacatgtttcagttccaccggatcctgcagtacgccctgccgagacaggagtcccagcggccattcttttggattttcatggacaacttgctgctgaccgaggatgaccaggaaactaccactcggttcctgcagaccgaagccgtgaccctgcaggacgtgagaggccgggactaccagaacgccatgcgggtgtggtccaacatccctggactgaaaagcaagcacgcacctctgacccctaaagaagaggagtacctgcaggcccaggtgcggagcagaagcaagctggacgcccctaaggtggatctgctggtgaagaattgcctcctgcccctgagagagtacttcaagtatttcagccagaatagtctgcccctgggaggcagcggcggcggcgccctggtgacatttgaggacgtcgccgtgcggttcacccaggaggaatgggctctgctggatccttctcagaaaatcctgtaccgggacgtgatgagagagacataccggaatctgacctccgtgggcatcaactgggaatgttgggaccttgaagcctgcttcagaagcctgggaagaaacctgagagtgcaggtggtgaagagaaagtgcgagctgaccaacagcggcccctgcgccgagggcggcccaagcagcggcgcccctcctcccagcggcggcagcccagccggctccccaacctctaccgaggagggcacctctgagtccgccacccccgagagcggccctggcacctccaccgagcccagcgagggcagcgcacccggcagccctgccggcagccccacctccacagaggagggaaccagcaccgagcccagcgaaggcagcgccccaggcaccagcaccgagcctagtgagcaggagattaaacggatcaacaagatcagaagaagacttgtgaaagacagcaacaccaagaaggccggcaagacaggccccatgaaaaccctgctggttagagtgatgacacccgatctgagagagcggctggaaaacctgagaaagaagcctgaaaatatcccccagcccatcagcaatacatctagagccaacctgaataagctgctgaccgattacaccgaaatgaagaaggcgatcctgcatgtgtactgggaagagttccagaaggaccctgtgggcctgatgagccgggtggcccagcctgccagcaagaagatcgatcagaacaagctgaaacctgagatggacgagaagggcaacctgaccaccgccggctttgcctgctctcagtgtggccagcccctgttcgtgtacaagctggagcaggtgtctgagaagggcaaggcttacaccaactacttcggacggtgcaatgtggccgagcacgaaaagctgatcctgctggcccagctgaagcccgagaaggatagcgacgaagccgtgacatatagcctgggaaagtttgggcagagggccctggatttctacagcattcatgtgaccaaggagtccacccaccccgtgaagcccctggcccagatcgccggaaacagatacgcctccggacctgtgggaaaggccctgagcgacgcatgtatgggcacaatcgcctccttcctgtctaagtaccaggacatcatcatcgaacaccagaaggtggtgaagggcaaccagaagagactggagagcctgcgggagctggccggcaaggaaaacctggaataccctagcgtgaccctgccacctcagcctcacaccaaggagggcgttgatgcctacaacgaagtgatcgcccgggtgcgaatgtgggtgaacctgaacctgtggcagaagctgaagctaagcagagatgatgccaagcctctgctgagactgaagggattcccttcctttcctctggtcgagagacaggccaacgaagtggactggtgggacatggtgtgtaacgtgaagaagctgatcaacgagaaaaaggaggatggcaaggtgttttggcagaatctggctggctacaagagacaggaagccctgagaccatacctgagcagcgaggaagatcggaagaagggaaagaaattcgctcggtaccagctgggcgacctgctgctgcacctggaaaagaagcacggcgaggactggggaaaggtgtacgacgaggcctgggagcggattgacaagaaagtggaaggcctgagcaagcacatcaagctggaagaggaacggagaagcgaggacgcccagagcaaggccgccctgaccgactggctgcgggctaaggccagcttcgtgatcgagggcctgaaggaggccgacaaggacgagttctgcagatgcgagctgaagctgcagaagtggtacggggacctgcggggaaagcccttcgccatcgaagccgagaacagcatcctggacatcagcggcttcagcaagcagtacaactgtgccttcatctggcagaaggacggcgtgaagaagctgaacctgtacctgatcatcaactacttcaagggcggcaagctgcggttcaagaagatcaaacctgaagccttcgaagccaacagattctacaccgtgatcaacaaaaagagcggcgagatcgtgcccatggaggtgaacttcaacttcgacgaccccaacctgatcatcctgcctctggcctttggcaagagacagggcagagaattcatctggaacgacctgctgtccctggaaaccggcagcctgaagctggccaacggaagagtgatcgagaagacactgtacaacagaagaacccggcaggatgagcctgccctgttcgtggccctgaccttcgagcggcgggaggtcctggactcctccaatatcaaaccaatgaacctgatcggcgtggcaagaggcgaaaacatccccgccgtgatcgccctgaccgaccccgagggctgcccactgagccggtttaaggatagcctgggaaacccaacccacatcctgagaatcggcgagagctataaggagaagcagcggaccatccaggccaagaaggaggtggagcagcggagagccggcggctacagccggaagtacgccagcaaagccaagaatctggcagacgatatggtgagaaacaccgctagagatctgctgtactacgccgtgacccaggatgccatgctgatcttcgccaacctgagccggggcttcggccggcagggcaagcggaccttcatggccgagagacagtacacacggatggaggactggctgaccgccaagctggcctacgagggcctgagcaagacctacctgtccaagacactggcccagtacacctccaagacatgcagcaactgtgggtttaccatcaccagcgccgactacgacagggtgctggagaagctgaagaagacagcaacaggctggatgaccacaattaacggcaaggagctgaaggtggagggccagattacctactacaacagatacaagagacagaacgtagtcaaggacctgtccgtcgagctggatagactgagcgaagaatctgtgaacaacgacatctcctcctggacaaagggcagaagcggagaagctctgagcctcctgaagaaaagattctcccatagacccgtgcaggagaagttcgtgtgcctgaactgcggcttcgagacacacgcagccgagcaagccgccctgaacatcgccagatcctggctgttcctgcggagccaggagtacaagaaataccagacaaacaagacaaccggcaacaccgataagagagccttcgtcgagacctggcagtccttttaccggaagaagcttaaggaggtgtggaaacctgccgtgcggtctggcggatctggcggaggctccgaggaggtgcccgtggtgttcgaggacgtggccgtgtacttcaccagggaggagtggggcaccctggacaagaggcagaaggagctgtacagggacgtgatgaggatgaactacgagctgctggccagcctgggccccgccgccgccaagcccgacctgatcagcaagctggagaggagggccgccccctggatcaaggaccccaacggccccaagtggggcaagggcaggccccccggcaagggcggcccaagcagcggcgcccctcctcccagcggcggcagcccagccggctccccaacctctaccgaggagggcacctctgagtccgccacccccgagagcggccctggcacctccaccgagcccagcgagggcagcgcacccggcagccctgccggcagccccacctccacagaggagggaaccagcaccgagcccagcgaaggcagcgccccaggcaccagcaccgagcctagtgagcaggagattaaacggatcaacaagatcagaagaagacttgtgaaagacagcaacaccaagaaggccggcaagacaggccccatgaaaaccctgctggttagagtgatgacacccgatctgagagagcggctggaaaacctgagaaagaagcctgaaaatatcccccagcccatcagcaatacatctagagccaacctgaataagctgctgaccgattacaccgaaatgaagaaggcgatcctgcatgtgtactgggaagagttccagaaggaccctgtgggcctgatgagccgggtggcccagcctgccagcaagaagatcgatcagaacaagctgaaacctgagatggacgagaagggcaacctgaccaccgccggctttgcctgctctcagtgtggccagcccctgttcgtgtacaagctggagcaggtgtctgagaagggcaaggcttacaccaactacttcggacggtgcaatgtggccgagcacgaaaagctgatcctgctggcccagctgaagcccgagaaggatagcgacgaagccgtgacatatagcctgggaaagtttgggcagagggccctggatttctacagcattcatgtgaccaaggagtccacccaccccgtgaagcccctggcccagatcgccggaaacagatacgcctccggacctgtgggaaaggccctgagcgacgcatgtatgggcacaatcgcctccttcctgtctaagtaccaggacatcatcatcgaacaccagaaggtggtgaagggcaaccagaagagactggagagcctgcgggagctggccggcaaggaaaacctggaataccctagcgtgaccctgccacctcagcctcacaccaaggagggcgttgatgcctacaacgaagtgatcgcccgggtgcgaatgtgggtgaacctgaacctgtggcagaagctgaagctaagcagagatgatgccaagcctctgctgagactgaagggattcccttcctttcctctggtcgagagacaggccaacgaagtggactggtgggacatggtgtgtaacgtgaagaagctgatcaacgagaaaaaggaggatggcaaggtgttttggcagaatctggctggctacaagagacaggaagccctgagaccatacctgagcagcgaggaagatcggaagaagggaaagaaattcgctcggtaccagctgggcgacctgctgctgcacctggaaaagaagcacggcgaggactggggaaaggtgtacgacgaggcctgggagcggattgacaagaaagtggaaggcctgagcaagcacatcaagctggaagaggaacggagaagcgaggacgcccagagcaaggccgccctgaccgactggctgcgggctaaggccagcttcgtgatcgagggcctgaaggaggccgacaaggacgagttctgcagatgcgagctgaagctgcagaagtggtacggggacctgcggggaaagcccttcgccatcgaagccgagaacagcatcctggacatcagcggcttcagcaagcagtacaactgtgccttcatctggcagaaggacggcgtgaagaagctgaacctgtacctgatcatcaactacttcaagggcggcaagctgcggttcaagaagatcaaacctgaagccttcgaagccaacagattctacaccgtgatcaacaaaaagagcggcgagatcgtgcccatggaggtgaacttcaacttcgacgaccccaacctgatcatcctgcctctggcctttggcaagagacagggcagagaattcatctggaacgacctgctgtccctggaaaccggcagcctgaagctggccaacggaagagtgatcgagaagacactgtacaacagaagaacccggcaggatgagcctgccctgttcgtggccctgaccttcgagcggcgggaggtcctggactcctccaatatcaaaccaatgaacctgatcggcgtggcaagaggcgaaaacatccccgccgtgatcgccctgaccgaccccgagggctgcccactgagccggtttaaggatagcctgggaaacccaacccacatcctgagaatcggcgagagctataaggagaagcagcggaccatccaggccaagaaggaggtggagcagcggagagccggcggctacagccggaagtacgccagcaaagccaagaatctggcagacgatatggtgagaaacaccgctagagatctgctgtactacgccgtgacccaggatgccatgctgatcttcgccaacctgagccggggcttcggccggcagggcaagcggaccttcatggccgagagacagtacacacggatggaggactggctgaccgccaagctggcctacgagggcctgagcaagacctacctgtccaagacactggcccagtacacctccaagacatgcagcaactgtgggtttaccatcaccagcgccgactacgacagggtgctggagaagctgaagaagacagcaacaggctggatgaccacaattaacggcaaggagctgaaggtggagggccagattacctactacaacagatacaagagacagaacgtagtcaaggacctgtccgtcgagctggatagactgagcgaagaatctgtgaacaacgacatctcctcctggacaaagggcagaagcggagaagctctgagcctcctgaagaaaagattctcccatagacccgtgcaggagaagttcgtgtgcctgaactgcggcttcgagacacacgcagccgagcaagccgccctgaacatcgccagatcctggctgttcctgcggagccaggagtacaagaaataccagacaaacaagacaaccggcaacaccgataagagagccttcgtcgagacctggcagtccttttaccggaagaagcttaaggaggtgtggaaacctgccgtgcggtctggcggatctggcggaggctcctgaggaggtgcccgtggtgttcgaggacgtggccgtgtacttcaccagggaggagtggggcaccctggacaagaggcagaaggagctgtacagggacgtgatgaggatgaactacgagctgctggccagcctgggccccgccgccgccaagcccgacctgatcagcaagctggagaggagggccgccccctggatcaaggaccccaacggccccaagtggggcaagggcaggccccccggcaagggatctggctccggcagcggccccaagaaaaagagaaaagtctaagctgccttctgcggggcttgccttctggccatgcccttcttctctcccttgcacctgtacctcttggtctttgaataaagcctgagtaggaaggctagcaaaaaaaaaaaaaaaaaaaaaaaaaaaaaaaaaaaaaaaaaaaaaaaaaaaaaaaaaaaaaaaaaaaaaaaaaaaaaaaa

SEQ ID NO: 15710 - RNA, 9485 nt, synthetic construct
  source 1..9485: mol_type = other RNA
aggaaataagagagaaaagaagagtaagaagaaatataagagccaccatggcccctaagaagaagcgtaaagtgagccggatggaacgcctcgtctacgaggtgcggcagaagtgcagaaacatcgaggacatctgcatctcctgcggatctctgaacgtgaccctggagcacccactgttcatcggcggcatgtgccagaactgtaaaaactgttttctggagtgtgcctatcaatacgacgatgacggctaccagagctactgcaccatctgttgcggcggaagagaggtgctgatgtgtggaaataacaactgctgccggtgcttctgcgtggaatgcgtggacctgctggtgggccccggcgccgcccaggccgctattaaggaagatccttggaactgctacatgtgcggccacaagggcacatacggcctgctgagacggagagaggactggcctagcagactgcagatgttcttcgccaataaccacgaccaggagttcgacccccctaaggtgtaccctcccgtccccgccgagaagagaaagcccatccgggtcctgagcctgttcgatggcatcgccaccggtctgctggtgctgaaggacctgggcatccaggtggataggtacattgcctccgaggtgtgcgaggactccatcaccgtgggaatggtgcgtcatcagggcaagatcatgtacgtgggcgacgtgcggagcgtgacacagaagcatatccaggagtggggccctttcgacctggtgatcggcggcagcccttgcaatgacctgagcatcgtgaacccagcccggaagggcctgtacgagggaaccggcagactgttcttcgagttttacagactgctgcacgacgcccggcctaaggaaggcgacgaccggcccttcttttggctgttcgagaatgtggtggccatgggagtcagcgacaagcgggatattagccggttcctggagagcaaccccgtgatgatcgatgccaaggaagtgagcgccgcccaccgggccagatacttctggggcaatctgcctggcatgaacagacccctggccagcaccgtgaacgacaagctggagctgcaggagtgcctggagcacggccggatcgccaagttcagcaaggtgagaaccatcaccacccgaagcaacagcatcaaacaaggcaaggaccagcactttcctgtgttcatgaacgagaaggaggacatcctgtggtgtaccgagatggagagagtgttcgggttcccagtccactacacagatgtcagcaacatgtctagactggccagacagagactgctgggaagaagctggtccgtccctgtgatcagacacctgttcgcccctctgaaggagtacttcgcctgcgtgagcagcggcaacagcaacgccaacagccggggccccagcttctctagcggcctggtgccactgtccctgagagggagccacatgggccccatggagatctacaaaaccgtgagcgcctggaagcggcagcctgtgcgcgtgctgagcctgtttcggaatatcgataaagtcctgaaaagcctgggattcctggagagcggctctggctccggcggtggcaccctgaagtacgtggaggatgtgacaaacgtggtcagacgggatgtggagaagtggggccccttcgatctggtgtacggcagcacccaacccctgggcagctcttgtgaccggtgccctggctggtacatgtttcagttccaccggatcctgcagtacgccctgccgagacaggagtcccagcggccattcttttggattttcatggacaacttgctgctgaccgaggatgaccaggaaactaccactcggttcctgcagaccgaagccgtgaccctgcaggacgtgagaggccgggactaccagaacgccatgcgggtgtggtccaacatccctggactgaaaagcaagcacgcacctctgacccctaaagaagaggagtacctgcaggcccaggtgcggagcagaagcaagctggacgcccctaaggtggatctgctggtgaagaattgcctcctgcccctgagagagtacttcaagtatttcagccagaatagtctgcccctgggaggcagcggcggcggcgccctggtgacatttgaggacgtcgccgtgcggttcacccaggaggaatgggctctgctggatccttctcagaaaatcctgtaccgggacgtgatgagagagacataccggaatctgacctccgtgggcatcaactgggaatgttgggaccttgaagcctgcttcagaagcctgggaagaaacctgagagtgcaggtggtgaagagaaagtgcgagctgaccaacagcggcccctgcgccgagggcggcccaagcagcggcgcccctcctcccagcggcggcagcccagccggctccccaacctctaccgaggagggcacctctgagtccgccacccccgagagcggccctggcacctccaccgagcccagcgagggcagcgcacccggcagccctgccggcagccccacctccacagaggagggaaccagcaccgagcccagcgaaggcagcgccccaggcaccagcaccgagcctagtgagcaggagattaaacggatcaacaagatcagaagaagacttgtgaaagacagcaacaccaagaaggccggcaagacaggccccatgaaaaccctgctggttagagtgatgacacccgatctgagagagcggctggaaaacctgagaaagaagcctgaaaatatcccccagcccatcagcaatacatctagagccaacctgaataagctgctgaccgattacaccgaaatgaagaaggcgatcctgcatgtgtactgggaagagttccagaaggaccctgtgggcctgatgagccgggtggcccagcctgccagcaagaagatcgatcagaacaagctgaaacctgagatggacgagaagggcaacctgaccaccgccggctttgcctgctctcagtgtggccagcccctgttcgtgtacaagctggagcaggtgtctgagaagggcaaggcttacaccaactacttcggacggtgcaatgtggccgagcacgaaaagctgatcctgctggcccagctgaagcccgagaaggatagcgacgaagccgtgacatatagcctgggaaagtttgggcagagggccctggatttctacagcattcatgtgaccaaggagtccacccaccccgtgaagcccctggcccagatcgccggaaacagatacgcctccggacctgtgggaaaggccctgagcgacgcatgtatgggcacaatcgcctccttcctgtctaagtaccaggacatcatcatcgaacaccagaaggtggtgaagggcaaccagaagagactggagagcctgcgggagctggccggcaaggaaaacctggaataccctagcgtgaccctgccacctcagcctcacaccaaggagggcgttgatgcctacaacgaagtgatcgcccgggtgcgaatgtgggtgaacctgaacctgtggcagaagctgaagctaagcagagatgatgccaagcctctgctgagactgaagggattcccttcctttcctctggtcgagagacaggccaacgaagtggactggtgggacatggtgtgtaacgtgaagaagctgatcaacgagaaaaaggaggatggcaaggtgttttggcagaatctggctggctacaagagacaggaagccctgagaccatacctgagcagcgaggaagatcggaagaagggaaagaaattcgctcggtaccagctgggcgacctgctgctgcacctggaaaagaagcacggcgaggactggggaaaggtgtacgacgaggcctgggagcggattgacaagaaagtggaaggcctgagcaagcacatcaagctggaagaggaacggagaagcgaggacgcccagagcaaggccgccctgaccgactggctgcgggctaaggccagcttcgtgatcgagggcctgaaggaggccgacaaggacgagttctgcagatgcgagctgaagctgcagaagtggtacggggacctgcggggaaagcccttcgccatcgaagccgagaacagcatcctggacatcagcggcttcagcaagcagtacaactgtgccttcatctggcagaaggacggcgtgaagaagctgaacctgtacctgatcatcaactacttcaagggcggcaagctgcggttcaagaagatcaaacctgaagccttcgaagccaacagattctacaccgtgatcaacaaaaagagcggcgagatcgtgcccatggaggtgaacttcaacttcgacgaccccaacctgatcatcctgcctctggcctttggcaagagacagggcagagaattcatctggaacgacctgctgtccctggaaaccggcagcctgaagctggccaacggaagagtgatcgagaagacactgtacaacagaagaacccggcaggatgagcctgccctgttcgtggccctgaccttcgagcggcgggaggtcctggactcctccaatatcaaaccaatgaacctgatcggcgtggcaagaggcgaaaacatccccgccgtgatcgccctgaccgaccccgagggctgcccactgagccggtttaaggatagcctgggaaacccaacccacatcctgagaatcggcgagagctataaggagaagcagcggaccatccaggccaagaaggaggtggagcagcggagagccggcggctacagccggaagtacgccagcaaagccaagaatctggcagacgatatggtgagaaacaccgctagagatctgctgtactacgccgtgacccaggatgccatgctgatcttcgccaacctgagccggggcttcggccggcagggcaagcggaccttcatggccgagagacagtacacacggatggaggactggctgaccgccaagctggcctacgagggcctgagcaagacctacctgtccaagacactggcccagtacacctccaagacatgcagcaactgtgggtttaccatcaccagcgccgactacgacagggtgctggagaagctgaagaagacagcaacaggctggatgaccacaattaacggcaaggagctgaaggtggagggccagattacctactacaacagatacaagagacagaacgtagtcaaggacctgtccgtcgagctggatagactgagcgaagaatctgtgaacaacgacatctcctcctggacaaagggcagaagcggagaagctctgagcctcctgaagaaaagattctcccatagacccgtgcaggagaagttcgtgtgcctgaactgcggcttcgagacacacgcagccgagcaagccgccctgaacatcgccagatcctggctgttcctgcggagccaggagtacaagaaataccagacaaacaagacaaccggcaacaccgataagagagccttcgtcgagacctggcagtccttttaccggaagaagcttaaggaggtgtggaaacctgccgtgcggtctggcggatctggcggaggctccccccccgagagcgtgaccttcgaggacgtggccgtgtacttcacccagaaggagtgggccagcctgatgcccgcccagaaggccctgtacagggacgtgatgctggagaactacgaggccgtggccttcctggcccccgccaccagcaagcccgccctgatcagccagctggagcagggcgtggagcccagcttcagccaggcccagggcgacctgagcatgagggacaggggcgccggcctgggcggcccaagcagcggcgcccctcctcccagcggcggcagcccagccggctccccaacctctaccgaggagggcacctctgagtccgccacccccgagagcggccctggcacctccaccgagcccagcgagggcagcgcacccggcagccctgccggcagccccacctccacagaggagggaaccagcaccgagcccagcgaaggcagcgccccaggcaccagcaccgagcctagtgagcaggagattaaacggatcaacaagatcagaagaagacttgtgaaagacagcaacaccaagaaggccggcaagacaggccccatgaaaaccctgctggttagagtgatgacacccgatctgagagagcggctggaaaacctgagaaagaagcctgaaaatatcccccagcccatcagcaatacatctagagccaacctgaataagctgctgaccgattacaccgaaatgaagaaggcgatcctgcatgtgtactgggaagagttccagaaggaccctgtgggcctgatgagccgggtggcccagcctgccagcaagaagatcgatcagaacaagctgaaacctgagatggacgagaagggcaacctgaccaccgccggctttgcctgctctcagtgtggccagcccctgttcgtgtacaagctggagcaggtgtctgagaagggcaaggcttacaccaactacttcggacggtgcaatgtggccgagcacgaaaagctgatcctgctggcccagctgaagcccgagaaggatagcgacgaagccgtgacatatagcctgggaaagtttgggcagagggccctggatttctacagcattcatgtgaccaaggagtccacccaccccgtgaagcccctggcccagatcgccggaaacagatacgcctccggacctgtgggaaaggccctgagcgacgcatgtatgggcacaatcgcctccttcctgtctaagtaccaggacatcatcatcgaacaccagaaggtggtgaagggcaaccagaagagactggagagcctgcgggagctggccggcaaggaaaacctggaataccctagcgtgaccctgccacctcagcctcacaccaaggagggcgttgatgcctacaacgaagtgatcgcccgggtgcgaatgtgggtgaacctgaacctgtggcagaagctgaagctaagcagagatgatgccaagcctctgctgagactgaagggattcccttcctttcctctggtcgagagacaggccaacgaagtggactggtgggacatggtgtgtaacgtgaagaagctgatcaacgagaaaaaggaggatggcaaggtgttttggcagaatctggctggctacaagagacaggaagccctgagaccatacctgagcagcgaggaagatcggaagaagggaaagaaattcgctcggtaccagctgggcgacctgctgctgcacctggaaaagaagcacggcgaggactggggaaaggtgtacgacgaggcctgggagcggattgacaagaaagtggaaggcctgagcaagcacatcaagctggaagaggaacggagaagcgaggacgcccagagcaaggccgccctgaccgactggctgcgggctaaggccagcttcgtgatcgagggcctgaaggaggccgacaaggacgagttctgcagatgcgagctgaagctgcagaagtggtacggggacctgcggggaaagcccttcgccatcgaagccgagaacagcatcctggacatcagcggcttcagcaagcagtacaactgtgccttcatctggcagaaggacggcgtgaagaagctgaacctgtacctgatcatcaactacttcaagggcggcaagctgcggttcaagaagatcaaacctgaagccttcgaagccaacagattctacaccgtgatcaacaaaaagagcggcgagatcgtgcccatggaggtgaacttcaacttcgacgaccccaacctgatcatcctgcctctggcctttggcaagagacagggcagagaattcatctggaacgacctgctgtccctggaaaccggcagcctgaagctggccaacggaagagtgatcgagaagacactgtacaacagaagaacccggcaggatgagcctgccctgttcgtggccctgaccttcgagcggcgggaggtcctggactcctccaatatcaaaccaatgaacctgatcggcgtggcaagaggcgaaaacatccccgccgtgatcgccctgaccgaccccgagggctgcccactgagccggtttaaggatagcctgggaaacccaacccacatcctgagaatcggcgagagctataaggagaagcagcggaccatccaggccaagaaggaggtggagcagcggagagccggcggctacagccggaagtacgccagcaaagccaagaatctggcagacgatatggtgagaaacaccgctagagatctgctgtactacgccgtgacccaggatgccatgctgatcttcgccaacctgagccggggcttcggccggcagggcaagcggaccttcatggccgagagacagtacacacggatggaggactggctgaccgccaagctggcctacgagggcctgagcaagacctacctgtccaagacactggcccagtacacctccaagacatgcagcaactgtgggtttaccatcaccagcgccgactacgacagggtgctggagaagctgaagaagacagcaacaggctggatgaccacaattaacggcaaggagctgaaggtggagggccagattacctactacaacagatacaagagacagaacgtagtcaaggacctgtccgtcgagctggatagactgagcgaagaatctgtgaacaacgacatctcctcctggacaaagggcagaagcggagaagctctgagcctcctgaagaaaagattctcccatagacccgtgcaggagaagttcgtgtgcctgaactgcggcttcgagacacacgcagccgagcaagccgccctgaacatcgccagatcctggctgttcctgcggagccaggagtacaagaaataccagacaaacaagacaaccggcaacaccgataagagagccttcgtcgagacctggcagtccttttaccggaagaagcttaaggaggtgtggaaacctgccgtgcggtctggcggatctggcggaggctcctccccccgagagcgtgaccttcgaggacgtggccgtgtacttcacccagaaggagtgggccagcctgatgcccgcccagaaggccctgtacagggacgtgatgctggagaactacgaggccgtggccttcctggcccccgccaccagcaagcccgccctgatcagccagctggagcagggcgtggagcccagcttcagccaggcccagggcgacctgagcatgagggacaggggcgccggcctgggatctggctccggcagcggccccaagaaaaagagaaaagtctaagctgccttctgcggggcttgccttctggccatgcccttcttctctcccttgcacctgtacctcttggtctttgaataaagcctgagtaggaaggctagcaaaaaaaaaaaaaaaaaaaaaaaaaaaaaaaaaaaaaaaaaaaaaaaaaaaaaaaaaaaaaaaaaaaaaaaaaaaaaaaa

SEQ ID NO: 15711 - RNA, 9485 nt, synthetic construct
  source 1..9485: mol_type = other RNA
aggaaataagagagaaaagaagagtaagaagaaatataagagccaccatggcccctaagaagaagcgtaaagtgagccggatggaacgcctcgtctacgaggtgcggcagaagtgcagaaacatcgaggacatctgcatctcctgcggatctctgaacgtgaccctggagcacccactgttcatcggcggcatgtgccagaactgtaaaaactgttttctggagtgtgcctatcaatacgacgatgacggctaccagagctactgcaccatctgttgcggcggaagagaggtgctgatgtgtggaaataacaactgctgccggtgcttctgcgtggaatgcgtggacctgctggtgggccccggcgccgcccaggccgctattaaggaagatccttggaactgctacatgtgcggccacaagggcacatacggcctgctgagacggagagaggactggcctagcagactgcagatgttcttcgccaataaccacgaccaggagttcgacccccctaaggtgtaccctcccgtccccgccgagaagagaaagcccatccgggtcctgagcctgttcgatggcatcgccaccggtctgctggtgctgaaggacctgggcatccaggtggataggtacattgcctccgaggtgtgcgaggactccatcaccgtgggaatggtgcgtcatcagggcaagatcatgtacgtgggcgacgtgcggagcgtgacacagaagcatatccaggagtggggccctttcgacctggtgatcggcggcagcccttgcaatgacctgagcatcgtgaacccagcccggaagggcctgtacgagggaaccggcagactgttcttcgagttttacagactgctgcacgacgcccggcctaaggaaggcgacgaccggcccttcttttggctgttcgagaatgtggtggccatgggagtcagcgacaagcgggatattagccggttcctggagagcaaccccgtgatgatcgatgccaaggaagtgagcgccgcccaccgggccagatacttctggggcaatctgcctggcatgaacagacccctggccagcaccgtgaacgacaagctggagctgcaggagtgcctggagcacggccggatcgccaagttcagcaaggtgagaaccatcaccacccgaagcaacagcatcaaacaaggcaaggaccagcactttcctgtgttcatgaacgagaaggaggacatcctgtggtgtaccgagatggagagagtgttcgggttcccagtccactacacagatgtcagcaacatgtctagactggccagacagagactgctgggaagaagctggtccgtccctgtgatcagacacctgttcgcccctctgaaggagtacttcgcctgcgtgagcagcggcaacagcaacgccaacagccggggccccagcttctctagcggcctggtgccactgtccctgagagggagccacatgggccccatggagatctacaaaaccgtgagcgcctggaagcggcagcctgtgcgcgtgctgagcctgtttcggaatatcgataaagtcctgaaaagcctgggattcctggagagcggctctggctccggcggtggcaccctgaagtacgtggaggatgtgacaaacgtggtcagacgggatgtggagaagtggggccccttcgatctggtgtacggcagcacccaacccctgggcagctcttgtgaccggtgccctggctggtacatgtttcagttccaccggatcctgcagtacgccctgccgagacaggagtcccagcggccattcttttggattttcatggacaacttgctgctgaccgaggatgaccaggaaactaccactcggttcctgcagaccgaagccgtgaccctgcaggacgtgagaggccgggactaccagaacgccatgcgggtgtggtccaacatccctggactgaaaagcaagcacgcacctctgacccctaaagaagaggagtacctgcaggcccaggtgcggagcagaagcaagctggacgcccctaaggtggatctgctggtgaagaattgcctcctgcccctgagagagtacttcaagtatttcagccagaatagtctgcccctgggaggcagcggcggcggcgccctggtgacatttgaggacgtcgccgtgcggttcacccaggaggaatgggctctgctggatccttctcagaaaatcctgtaccgggacgtgatgagagagacataccggaatctgacctccgtgggcatcaactgggaatgttgggaccttgaagcctgcttcagaagcctgggaagaaacctgagagtgcaggtggtgaagagaaagtgcgagctgaccaacagcggcccctgcgccgagggcggcccaagcagcggcgcccctcctcccagcggcggcagcccagccggctccccaacctctaccgaggagggcacctctgagtccgccacccccgagagcggccctggcacctccaccgagcccagcgagggcagcgcacccggcagccctgccggcagccccacctccacagaggagggaaccagcaccgagcccagcgaaggcagcgccccaggcaccagcaccgagcctagtgagcaggagattaaacggatcaacaagatcagaagaagacttgtgaaagacagcaacaccaagaaggccggcaagacaggccccatgaaaaccctgctggttagagtgatgacacccgatctgagagagcggctggaaaacctgagaaagaagcctgaaaatatcccccagcccatcagcaatacatctagagccaacctgaataagctgctgaccgattacaccgaaatgaagaaggcgatcctgcatgtgtactgggaagagttccagaaggaccctgtgggcctgatgagccgggtggcccagcctgccagcaagaagatcgatcagaacaagctgaaacctgagatggacgagaagggcaacctgaccaccgccggctttgcctgctctcagtgtggccagcccctgttcgtgtacaagctggagcaggtgtctgagaagggcaaggcttacaccaactacttcggacggtgcaatgtggccgagcacgaaaagctgatcctgctggcccagctgaagcccgagaaggatagcgacgaagccgtgacatatagcctgggaaagtttgggcagagggccctggatttctacagcattcatgtgaccaaggagtccacccaccccgtgaagcccctggcccagatcgccggaaacagatacgcctccggacctgtgggaaaggccctgagcgacgcatgtatgggcacaatcgcctccttcctgtctaagtaccaggacatcatcatcgaacaccagaaggtggtgaagggcaaccagaagagactggagagcctgcgggagctggccggcaaggaaaacctggaataccctagcgtgaccctgccacctcagcctcacaccaaggagggcgttgatgcctacaacgaagtgatcgcccgggtgcgaatgtgggtgaacctgaacctgtggcagaagctgaagctaagcagagatgatgccaagcctctgctgagactgaagggattcccttcctttcctctggtcgagagacaggccaacgaagtggactggtgggacatggtgtgtaacgtgaagaagctgatcaacgagaaaaaggaggatggcaaggtgttttggcagaatctggctggctacaagagacaggaagccctgagaccatacctgagcagcgaggaagatcggaagaagggaaagaaattcgctcggtaccagctgggcgacctgctgctgcacctggaaaagaagcacggcgaggactggggaaaggtgtacgacgaggcctgggagcggattgacaagaaagtggaaggcctgagcaagcacatcaagctggaagaggaacggagaagcgaggacgcccagagcaaggccgccctgaccgactggctgcgggctaaggccagcttcgtgatcgagggcctgaaggaggccgacaaggacgagttctgcagatgcgagctgaagctgcagaagtggtacggggacctgcggggaaagcccttcgccatcgaagccgagaacagcatcctggacatcagcggcttcagcaagcagtacaactgtgccttcatctggcagaaggacggcgtgaagaagctgaacctgtacctgatcatcaactacttcaagggcggcaagctgcggttcaagaagatcaaacctgaagccttcgaagccaacagattctacaccgtgatcaacaaaaagagcggcgagatcgtgcccatggaggtgaacttcaacttcgacgaccccaacctgatcatcctgcctctggcctttggcaagagacagggcagagaattcatctggaacgacctgctgtccctggaaaccggcagcctgaagctggccaacggaagagtgatcgagaagacactgtacaacagaagaacccggcaggatgagcctgccctgttcgtggccctgaccttcgagcggcgggaggtcctggactcctccaatatcaaaccaatgaacctgatcggcgtggcaagaggcgaaaacatccccgccgtgatcgccctgaccgaccccgagggctgcccactgagccggtttaaggatagcctgggaaacccaacccacatcctgagaatcggcgagagctataaggagaagcagcggaccatccaggccaagaaggaggtggagcagcggagagccggcggctacagccggaagtacgccagcaaagccaagaatctggcagacgatatggtgagaaacaccgctagagatctgctgtactacgccgtgacccaggatgccatgctgatcttcgccaacctgagccggggcttcggccggcagggcaagcggaccttcatggccgagagacagtacacacggatggaggactggctgaccgccaagctggcctacgagggcctgagcaagacctacctgtccaagacactggcccagtacacctccaagacatgcagcaactgtgggtttaccatcaccagcgccgactacgacagggtgctggagaagctgaagaagacagcaacaggctggatgaccacaattaacggcaaggagctgaaggtggagggccagattacctactacaacagatacaagagacagaacgtagtcaaggacctgtccgtcgagctggatagactgagcgaagaatctgtgaacaacgacatctcctcctggacaaagggcagaagcggagaagctctgagcctcctgaagaaaagattctcccatagacccgtgcaggagaagttcgtgtgcctgaactgcggcttcgagacacacgcagccgagcaagccgccctgaacatcgccagatcctggctgttcctgcggagccaggagtacaagaaataccagacaaacaagacaaccggcaacaccgataagagagccttcgtcgagacctggcagtccttttaccggaagaagcttaaggaggtgtggaaacctgccgtgcggtctggcggatctggcggaggctccttccagggcagcatcagcttcaaggacgtgaccgtgggcttcacccaggaggagtggcagcacctggaccccagccagagggccctgtacagggacgtgatgctggagaactacagcaacctggtgagcgtgggctactgcgtgcacaagcccgaggtgatcagcaggctggagcagggcgaggagccctggaggctggaggaggagttccccagccagagcttccccgtgtggaccgccgacggcggcccaagcagcggcgcccctcctcccagcggcggcagcccagccggctccccaacctctaccgaggagggcacctctgagtccgccacccccgagagcggccctggcacctccaccgagcccagcgagggcagcgcacccggcagccctgccggcagccccacctccacagaggagggaaccagcaccgagcccagcgaaggcagcgccccaggcaccagcaccgagcctagtgagcaggagattaaacggatcaacaagatcagaagaagacttgtgaaagacagcaacaccaagaaggccggcaagacaggccccatgaaaaccctgctggttagagtgatgacacccgatctgagagagcggctggaaaacctgagaaagaagcctgaaaatatcccccagcccatcagcaatacatctagagccaacctgaataagctgctgaccgattacaccgaaatgaagaaggcgatcctgcatgtgtactgggaagagttccagaaggaccctgtgggcctgatgagccgggtggcccagcctgccagcaagaagatcgatcagaacaagctgaaacctgagatggacgagaagggcaacctgaccaccgccggctttgcctgctctcagtgtggccagcccctgttcgtgtacaagctggagcaggtgtctgagaagggcaaggcttacaccaactacttcggacggtgcaatgtggccgagcacgaaaagctgatcctgctggcccagctgaagcccgagaaggatagcgacgaagccgtgacatatagcctgggaaagtttgggcagagggccctggatttctacagcattcatgtgaccaaggagtccacccaccccgtgaagcccctggcccagatcgccggaaacagatacgcctccggacctgtgggaaaggccctgagcgacgcatgtatgggcacaatcgcctccttcctgtctaagtaccaggacatcatcatcgaacaccagaaggtggtgaagggcaaccagaagagactggagagcctgcgggagctggccggcaaggaaaacctggaataccctagcgtgaccctgccacctcagcctcacaccaaggagggcgttgatgcctacaacgaagtgatcgcccgggtgcgaatgtgggtgaacctgaacctgtggcagaagctgaagctaagcagagatgatgccaagcctctgctgagactgaagggattcccttcctttcctctggtcgagagacaggccaacgaagtggactggtgggacatggtgtgtaacgtgaagaagctgatcaacgagaaaaaggaggatggcaaggtgttttggcagaatctggctggctacaagagacaggaagccctgagaccatacctgagcagcgaggaagatcggaagaagggaaagaaattcgctcggtaccagctgggcgacctgctgctgcacctggaaaagaagcacggcgaggactggggaaaggtgtacgacgaggcctgggagcggattgacaagaaagtggaaggcctgagcaagcacatcaagctggaagaggaacggagaagcgaggacgcccagagcaaggccgccctgaccgactggctgcgggctaaggccagcttcgtgatcgagggcctgaaggaggccgacaaggacgagttctgcagatgcgagctgaagctgcagaagtggtacggggacctgcggggaaagcccttcgccatcgaagccgagaacagcatcctggacatcagcggcttcagcaagcagtacaactgtgccttcatctggcagaaggacggcgtgaagaagctgaacctgtacctgatcatcaactacttcaagggcggcaagctgcggttcaagaagatcaaacctgaagccttcgaagccaacagattctacaccgtgatcaacaaaaagagcggcgagatcgtgcccatggaggtgaacttcaacttcgacgaccccaacctgatcatcctgcctctggcctttggcaagagacagggcagagaattcatctggaacgacctgctgtccctggaaaccggcagcctgaagctggccaacggaagagtgatcgagaagacactgtacaacagaagaacccggcaggatgagcctgccctgttcgtggccctgaccttcgagcggcgggaggtcctggactcctccaatatcaaaccaatgaacctgatcggcgtggcaagaggcgaaaacatccccgccgtgatcgccctgaccgaccccgagggctgcccactgagccggtttaaggatagcctgggaaacccaacccacatcctgagaatcggcgagagctataaggagaagcagcggaccatccaggccaagaaggaggtggagcagcggagagccggcggctacagccggaagtacgccagcaaagccaagaatctggcagacgatatggtgagaaacaccgctagagatctgctgtactacgccgtgacccaggatgccatgctgatcttcgccaacctgagccggggcttcggccggcagggcaagcggaccttcatggccgagagacagtacacacggatggaggactggctgaccgccaagctggcctacgagggcctgagcaagacctacctgtccaagacactggcccagtacacctccaagacatgcagcaactgtgggtttaccatcaccagcgccgactacgacagggtgctggagaagctgaagaagacagcaacaggctggatgaccacaattaacggcaaggagctgaaggtggagggccagattacctactacaacagatacaagagacagaacgtagtcaaggacctgtccgtcgagctggatagactgagcgaagaatctgtgaacaacgacatctcctcctggacaaagggcagaagcggagaagctctgagcctcctgaagaaaagattctcccatagacccgtgcaggagaagttcgtgtgcctgaactgcggcttcgagacacacgcagccgagcaagccgccctgaacatcgccagatcctggctgttcctgcggagccaggagtacaagaaataccagacaaacaagacaaccggcaacaccgataagagagccttcgtcgagacctggcagtccttttaccggaagaagcttaaggaggtgtggaaacctgccgtgcggtctggcggatctggcggaggctcctttccagggcagcatcagcttcaaggacgtgaccgtgggcttcacccaggaggagtggcagcacctggaccccagccagagggccctgtacagggacgtgatgctggagaactacagcaacctggtgagcgtgggctactgcgtgcacaagcccgaggtgatcagcaggctggagcagggcgaggagccctggaggctggaggaggagttccccagccagagcttccccgtgtggaccgccgacggatctggctccggcagcggccccaagaaaaagagaaaagtctaagctgccttctgcggggcttgccttctggccatgcccttcttctctcccttgcacctgtacctcttggtctttgaataaagcctgagtaggaaggctagcaaaaaaaaaaaaaaaaaaaaaaaaaaaaaaaaaaaaaaaaaaaaaaaaaaaaaaaaaaaaaaaaaaaaaaaaaaaaaaaa

SEQ ID NO: 15712 - RNA, 9485 nt, synthetic construct
  source 1..9485: mol_type = other RNA
aggaaataagagagaaaagaagagtaagaagaaatataagagccaccatggcccctaagaagaagcgtaaagtgagccggatggaacgcctcgtctacgaggtgcggcagaagtgcagaaacatcgaggacatctgcatctcctgcggatctctgaacgtgaccctggagcacccactgttcatcggcggcatgtgccagaactgtaaaaactgttttctggagtgtgcctatcaatacgacgatgacggctaccagagctactgcaccatctgttgcggcggaagagaggtgctgatgtgtggaaataacaactgctgccggtgcttctgcgtggaatgcgtggacctgctggtgggccccggcgccgcccaggccgctattaaggaagatccttggaactgctacatgtgcggccacaagggcacatacggcctgctgagacggagagaggactggcctagcagactgcagatgttcttcgccaataaccacgaccaggagttcgacccccctaaggtgtaccctcccgtccccgccgagaagagaaagcccatccgggtcctgagcctgttcgatggcatcgccaccggtctgctggtgctgaaggacctgggcatccaggtggataggtacattgcctccgaggtgtgcgaggactccatcaccgtgggaatggtgcgtcatcagggcaagatcatgtacgtgggcgacgtgcggagcgtgacacagaagcatatccaggagtggggccctttcgacctggtgatcggcggcagcccttgcaatgacctgagcatcgtgaacccagcccggaagggcctgtacgagggaaccggcagactgttcttcgagttttacagactgctgcacgacgcccggcctaaggaaggcgacgaccggcccttcttttggctgttcgagaatgtggtggccatgggagtcagcgacaagcgggatattagccggttcctggagagcaaccccgtgatgatcgatgccaaggaagtgagcgccgcccaccgggccagatacttctggggcaatctgcctggcatgaacagacccctggccagcaccgtgaacgacaagctggagctgcaggagtgcctggagcacggccggatcgccaagttcagcaaggtgagaaccatcaccacccgaagcaacagcatcaaacaaggcaaggaccagcactttcctgtgttcatgaacgagaaggaggacatcctgtggtgtaccgagatggagagagtgttcgggttcccagtccactacacagatgtcagcaacatgtctagactggccagacagagactgctgggaagaagctggtccgtccctgtgatcagacacctgttcgcccctctgaaggagtacttcgcctgcgtgagcagcggcaacagcaacgccaacagccggggccccagcttctctagcggcctggtgccactgtccctgagagggagccacatgggccccatggagatctacaaaaccgtgagcgcctggaagcggcagcctgtgcgcgtgctgagcctgtttcggaatatcgataaagtcctgaaaagcctgggattcctggagagcggctctggctccggcggtggcaccctgaagtacgtggaggatgtgacaaacgtggtcagacgggatgtggagaagtggggccccttcgatctggtgtacggcagcacccaacccctgggcagctcttgtgaccggtgccctggctggtacatgtttcagttccaccggatcctgcagtacgccctgccgagacaggagtcccagcggccattcttttggattttcatggacaacttgctgctgaccgaggatgaccaggaaactaccactcggttcctgcagaccgaagccgtgaccctgcaggacgtgagaggccgggactaccagaacgccatgcgggtgtggtccaacatccctggactgaaaagcaagcacgcacctctgacccctaaagaagaggagtacctgcaggcccaggtgcggagcagaagcaagctggacgcccctaaggtggatctgctggtgaagaattgcctcctgcccctgagagagtacttcaagtatttcagccagaatagtctgcccctgggaggcagcggcggcggcgccctggtgacatttgaggacgtcgccgtgcggttcacccaggaggaatgggctctgctggatccttctcagaaaatcctgtaccgggacgtgatgagagagacataccggaatctgacctccgtgggcatcaactgggaatgttgggaccttgaagcctgcttcagaagcctgggaagaaacctgagagtgcaggtggtgaagagaaagtgcgagctgaccaacagcggcccctgcgccgagggcggcccaagcagcggcgcccctcctcccagcggcggcagcccagccggctccccaacctctaccgaggagggcacctctgagtccgccacccccgagagcggccctggcacctccaccgagcccagcgagggcagcgcacccggcagccctgccggcagccccacctccacagaggagggaaccagcaccgagcccagcgaaggcagcgccccaggcaccagcaccgagcctagtgagcaggagattaaacggatcaacaagatcagaagaagacttgtgaaagacagcaacaccaagaaggccggcaagacaggccccatgaaaaccctgctggttagagtgatgacacccgatctgagagagcggctggaaaacctgagaaagaagcctgaaaatatcccccagcccatcagcaatacatctagagccaacctgaataagctgctgaccgattacaccgaaatgaagaaggcgatcctgcatgtgtactgggaagagttccagaaggaccctgtgggcctgatgagccgggtggcccagcctgccagcaagaagatcgatcagaacaagctgaaacctgagatggacgagaagggcaacctgaccaccgccggctttgcctgctctcagtgtggccagcccctgttcgtgtacaagctggagcaggtgtctgagaagggcaaggcttacaccaactacttcggacggtgcaatgtggccgagcacgaaaagctgatcctgctggcccagctgaagcccgagaaggatagcgacgaagccgtgacatatagcctgggaaagtttgggcagagggccctggatttctacagcattcatgtgaccaaggagtccacccaccccgtgaagcccctggcccagatcgccggaaacagatacgcctccggacctgtgggaaaggccctgagcgacgcatgtatgggcacaatcgcctccttcctgtctaagtaccaggacatcatcatcgaacaccagaaggtggtgaagggcaaccagaagagactggagagcctgcgggagctggccggcaaggaaaacctggaataccctagcgtgaccctgccacctcagcctcacaccaaggagggcgttgatgcctacaacgaagtgatcgcccgggtgcgaatgtgggtgaacctgaacctgtggcagaagctgaagctaagcagagatgatgccaagcctctgctgagactgaagggattcccttcctttcctctggtcgagagacaggccaacgaagtggactggtgggacatggtgtgtaacgtgaagaagctgatcaacgagaaaaaggaggatggcaaggtgttttggcagaatctggctggctacaagagacaggaagccctgagaccatacctgagcagcgaggaagatcggaagaagggaaagaaattcgctcggtaccagctgggcgacctgctgctgcacctggaaaagaagcacggcgaggactggggaaaggtgtacgacgaggcctgggagcggattgacaagaaagtggaaggcctgagcaagcacatcaagctggaagaggaacggagaagcgaggacgcccagagcaaggccgccctgaccgactggctgcgggctaaggccagcttcgtgatcgagggcctgaaggaggccgacaaggacgagttctgcagatgcgagctgaagctgcagaagtggtacggggacctgcggggaaagcccttcgccatcgaagccgagaacagcatcctggacatcagcggcttcagcaagcagtacaactgtgccttcatctggcagaaggacggcgtgaagaagctgaacctgtacctgatcatcaactacttcaagggcggcaagctgcggttcaagaagatcaaacctgaagccttcgaagccaacagattctacaccgtgatcaacaaaaagagcggcgagatcgtgcccatggaggtgaacttcaacttcgacgaccccaacctgatcatcctgcctctggcctttggcaagagacagggcagagaattcatctggaacgacctgctgtccctggaaaccggcagcctgaagctggccaacggaagagtgatcgagaagacactgtacaacagaagaacccggcaggatgagcctgccctgttcgtggccctgaccttcgagcggcgggaggtcctggactcctccaatatcaaaccaatgaacctgatcggcgtggcaagaggcgaaaacatccccgccgtgatcgccctgaccgaccccgagggctgcccactgagccggtttaaggatagcctgggaaacccaacccacatcctgagaatcggcgagagctataaggagaagcagcggaccatccaggccaagaaggaggtggagcagcggagagccggcggctacagccggaagtacgccagcaaagccaagaatctggcagacgatatggtgagaaacaccgctagagatctgctgtactacgccgtgacccaggatgccatgctgatcttcgccaacctgagccggggcttcggccggcagggcaagcggaccttcatggccgagagacagtacacacggatggaggactggctgaccgccaagctggcctacgagggcctgagcaagacctacctgtccaagacactggcccagtacacctccaagacatgcagcaactgtgggtttaccatcaccagcgccgactacgacagggtgctggagaagctgaagaagacagcaacaggctggatgaccacaattaacggcaaggagctgaaggtggagggccagattacctactacaacagatacaagagacagaacgtagtcaaggacctgtccgtcgagctggatagactgagcgaagaatctgtgaacaacgacatctcctcctggacaaagggcagaagcggagaagctctgagcctcctgaagaaaagattctcccatagacccgtgcaggagaagttcgtgtgcctgaactgcggcttcgagacacacgcagccgagcaagccgccctgaacatcgccagatcctggctgttcctgcggagccaggagtacaagaaataccagacaaacaagacaaccggcaacaccgataagagagccttcgtcgagacctggcagtccttttaccggaagaagcttaaggaggtgtggaaacctgccgtgcggtctggcggatctggcggaggctccagccagggcctggtgaccttcggcgacgtggccgtggacttcagccaggaggagtgggagtggctggactgcgcccagaggaccctgtacaggagcgtgatgctggagaactacaggagcctggtgagcctgggcctgtgcgtgagcaagcccgagatgatcagcagcctggagcagaggaaggagccctggaccgtgaagaggaagtggaccaggggccagtgccccgacagcgaggccgtgggcggcccaagcagcggcgcccctcctcccagcggcggcagcccagccggctccccaacctctaccgaggagggcacctctgagtccgccacccccgagagcggccctggcacctccaccgagcccagcgagggcagcgcacccggcagccctgccggcagccccacctccacagaggagggaaccagcaccgagcccagcgaaggcagcgccccaggcaccagcaccgagcctagtgagcaggagattaaacggatcaacaagatcagaagaagacttgtgaaagacagcaacaccaagaaggccggcaagacaggccccatgaaaaccctgctggttagagtgatgacacccgatctgagagagcggctggaaaacctgagaaagaagcctgaaaatatcccccagcccatcagcaatacatctagagccaacctgaataagctgctgaccgattacaccgaaatgaagaaggcgatcctgcatgtgtactgggaagagttccagaaggaccctgtgggcctgatgagccgggtggcccagcctgccagcaagaagatcgatcagaacaagctgaaacctgagatggacgagaagggcaacctgaccaccgccggctttgcctgctctcagtgtggccagcccctgttcgtgtacaagctggagcaggtgtctgagaagggcaaggcttacaccaactacttcggacggtgcaatgtggccgagcacgaaaagctgatcctgctggcccagctgaagcccgagaaggatagcgacgaagccgtgacatatagcctgggaaagtttgggcagagggccctggatttctacagcattcatgtgaccaaggagtccacccaccccgtgaagcccctggcccagatcgccggaaacagatacgcctccggacctgtgggaaaggccctgagcgacgcatgtatgggcacaatcgcctccttcctgtctaagtaccaggacatcatcatcgaacaccagaaggtggtgaagggcaaccagaagagactggagagcctgcgggagctggccggcaaggaaaacctggaataccctagcgtgaccctgccacctcagcctcacaccaaggagggcgttgatgcctacaacgaagtgatcgcccgggtgcgaatgtgggtgaacctgaacctgtggcagaagctgaagctaagcagagatgatgccaagcctctgctgagactgaagggattcccttcctttcctctggtcgagagacaggccaacgaagtggactggtgggacatggtgtgtaacgtgaagaagctgatcaacgagaaaaaggaggatggcaaggtgttttggcagaatctggctggctacaagagacaggaagccctgagaccatacctgagcagcgaggaagatcggaagaagggaaagaaattcgctcggtaccagctgggcgacctgctgctgcacctggaaaagaagcacggcgaggactggggaaaggtgtacgacgaggcctgggagcggattgacaagaaagtggaaggcctgagcaagcacatcaagctggaagaggaacggagaagcgaggacgcccagagcaaggccgccctgaccgactggctgcgggctaaggccagcttcgtgatcgagggcctgaaggaggccgacaaggacgagttctgcagatgcgagctgaagctgcagaagtggtacggggacctgcggggaaagcccttcgccatcgaagccgagaacagcatcctggacatcagcggcttcagcaagcagtacaactgtgccttcatctggcagaaggacggcgtgaagaagctgaacctgtacctgatcatcaactacttcaagggcggcaagctgcggttcaagaagatcaaacctgaagccttcgaagccaacagattctacaccgtgatcaacaaaaagagcggcgagatcgtgcccatggaggtgaacttcaacttcgacgaccccaacctgatcatcctgcctctggcctttggcaagagacagggcagagaattcatctggaacgacctgctgtccctggaaaccggcagcctgaagctggccaacggaagagtgatcgagaagacactgtacaacagaagaacccggcaggatgagcctgccctgttcgtggccctgaccttcgagcggcgggaggtcctggactcctccaatatcaaaccaatgaacctgatcggcgtggcaagaggcgaaaacatccccgccgtgatcgccctgaccgaccccgagggctgcccactgagccggtttaaggatagcctgggaaacccaacccacatcctgagaatcggcgagagctataaggagaagcagcggaccatccaggccaagaaggaggtggagcagcggagagccggcggctacagccggaagtacgccagcaaagccaagaatctggcagacgatatggtgagaaacaccgctagagatctgctgtactacgccgtgacccaggatgccatgctgatcttcgccaacctgagccggggcttcggccggcagggcaagcggaccttcatggccgagagacagtacacacggatggaggactggctgaccgccaagctggcctacgagggcctgagcaagacctacctgtccaagacactggcccagtacacctccaagacatgcagcaactgtgggtttaccatcaccagcgccgactacgacagggtgctggagaagctgaagaagacagcaacaggctggatgaccacaattaacggcaaggagctgaaggtggagggccagattacctactacaacagatacaagagacagaacgtagtcaaggacctgtccgtcgagctggatagactgagcgaagaatctgtgaacaacgacatctcctcctggacaaagggcagaagcggagaagctctgagcctcctgaagaaaagattctcccatagacccgtgcaggagaagttcgtgtgcctgaactgcggcttcgagacacacgcagccgagcaagccgccctgaacatcgccagatcctggctgttcctgcggagccaggagtacaagaaataccagacaaacaagacaaccggcaacaccgataagagagccttcgtcgagacctggcagtccttttaccggaagaagcttaaggaggtgtggaaacctgccgtgcggtctggcggatctggcggaggctcctagccagggcctggtgaccttcggcgacgtggccgtggacttcagccaggaggagtgggagtggctggactgcgcccagaggaccctgtacaggagcgtgatgctggagaactacaggagcctggtgagcctgggcctgtgcgtgagcaagcccgagatgatcagcagcctggagcagaggaaggagccctggaccgtgaagaggaagtggaccaggggccagtgccccgacagcgaggccgtgggatctggctccggcagcggccccaagaaaaagagaaaagtctaagctgccttctgcggggcttgccttctggccatgcccttcttctctcccttgcacctgtacctcttggtctttgaataaagcctgagtaggaaggctagcaaaaaaaaaaaaaaaaaaaaaaaaaaaaaaaaaaaaaaaaaaaaaaaaaaaaaaaaaaaaaaaaaaaaaaaaaaaaaaaa

SEQ ID NO: 15713 - RNA, 9485 nt, synthetic construct
  source 1..9485: mol_type = other RNA
aggaaataagagagaaaagaagagtaagaagaaatataagagccaccatggcccctaagaagaagcgtaaagtgagccggatggaacgcctcgtctacgaggtgcggcagaagtgcagaaacatcgaggacatctgcatctcctgcggatctctgaacgtgaccctggagcacccactgttcatcggcggcatgtgccagaactgtaaaaactgttttctggagtgtgcctatcaatacgacgatgacggctaccagagctactgcaccatctgttgcggcggaagagaggtgctgatgtgtggaaataacaactgctgccggtgcttctgcgtggaatgcgtggacctgctggtgggccccggcgccgcccaggccgctattaaggaagatccttggaactgctacatgtgcggccacaagggcacatacggcctgctgagacggagagaggactggcctagcagactgcagatgttcttcgccaataaccacgaccaggagttcgacccccctaaggtgtaccctcccgtccccgccgagaagagaaagcccatccgggtcctgagcctgttcgatggcatcgccaccggtctgctggtgctgaaggacctgggcatccaggtggataggtacattgcctccgaggtgtgcgaggactccatcaccgtgggaatggtgcgtcatcagggcaagatcatgtacgtgggcgacgtgcggagcgtgacacagaagcatatccaggagtggggccctttcgacctggtgatcggcggcagcccttgcaatgacctgagcatcgtgaacccagcccggaagggcctgtacgagggaaccggcagactgttcttcgagttttacagactgctgcacgacgcccggcctaaggaaggcgacgaccggcccttcttttggctgttcgagaatgtggtggccatgggagtcagcgacaagcgggatattagccggttcctggagagcaaccccgtgatgatcgatgccaaggaagtgagcgccgcccaccgggccagatacttctggggcaatctgcctggcatgaacagacccctggccagcaccgtgaacgacaagctggagctgcaggagtgcctggagcacggccggatcgccaagttcagcaaggtgagaaccatcaccacccgaagcaacagcatcaaacaaggcaaggaccagcactttcctgtgttcatgaacgagaaggaggacatcctgtggtgtaccgagatggagagagtgttcgggttcccagtccactacacagatgtcagcaacatgtctagactggccagacagagactgctgggaagaagctggtccgtccctgtgatcagacacctgttcgcccctctgaaggagtacttcgcctgcgtgagcagcggcaacagcaacgccaacagccggggccccagcttctctagcggcctggtgccactgtccctgagagggagccacatgggccccatggagatctacaaaaccgtgagcgcctggaagcggcagcctgtgcgcgtgctgagcctgtttcggaatatcgataaagtcctgaaaagcctgggattcctggagagcggctctggctccggcggtggcaccctgaagtacgtggaggatgtgacaaacgtggtcagacgggatgtggagaagtggggccccttcgatctggtgtacggcagcacccaacccctgggcagctcttgtgaccggtgccctggctggtacatgtttcagttccaccggatcctgcagtacgccctgccgagacaggagtcccagcggccattcttttggattttcatggacaacttgctgctgaccgaggatgaccaggaaactaccactcggttcctgcagaccgaagccgtgaccctgcaggacgtgagaggccgggactaccagaacgccatgcgggtgtggtccaacatccctggactgaaaagcaagcacgcacctctgacccctaaagaagaggagtacctgcaggcccaggtgcggagcagaagcaagctggacgcccctaaggtggatctgctggtgaagaattgcctcctgcccctgagagagtacttcaagtatttcagccagaatagtctgcccctgggaggcagcggcggcggcgccctggtgacatttgaggacgtcgccgtgcggttcacccaggaggaatgggctctgctggatccttctcagaaaatcctgtaccgggacgtgatgagagagacataccggaatctgacctccgtgggcatcaactgggaatgttgggaccttgaagcctgcttcagaagcctgggaagaaacctgagagtgcaggtggtgaagagaaagtgcgagctgaccaacagcggcccctgcgccgagggcggcccaagcagcggcgcccctcctcccagcggcggcagcccagccggctccccaacctctaccgaggagggcacctctgagtccgccacccccgagagcggccctggcacctccaccgagcccagcgagggcagcgcacccggcagccctgccggcagccccacctccacagaggagggaaccagcaccgagcccagcgaaggcagcgccccaggcaccagcaccgagcctagtgagcaggagattaaacggatcaacaagatcagaagaagacttgtgaaagacagcaacaccaagaaggccggcaagacaggccccatgaaaaccctgctggttagagtgatgacacccgatctgagagagcggctggaaaacctgagaaagaagcctgaaaatatcccccagcccatcagcaatacatctagagccaacctgaataagctgctgaccgattacaccgaaatgaagaaggcgatcctgcatgtgtactgggaagagttccagaaggaccctgtgggcctgatgagccgggtggcccagcctgccagcaagaagatcgatcagaacaagctgaaacctgagatggacgagaagggcaacctgaccaccgccggctttgcctgctctcagtgtggccagcccctgttcgtgtacaagctggagcaggtgtctgagaagggcaaggcttacaccaactacttcggacggtgcaatgtggccgagcacgaaaagctgatcctgctggcccagctgaagcccgagaaggatagcgacgaagccgtgacatatagcctgggaaagtttgggcagagggccctggatttctacagcattcatgtgaccaaggagtccacccaccccgtgaagcccctggcccagatcgccggaaacagatacgcctccggacctgtgggaaaggccctgagcgacgcatgtatgggcacaatcgcctccttcctgtctaagtaccaggacatcatcatcgaacaccagaaggtggtgaagggcaaccagaagagactggagagcctgcgggagctggccggcaaggaaaacctggaataccctagcgtgaccctgccacctcagcctcacaccaaggagggcgttgatgcctacaacgaagtgatcgcccgggtgcgaatgtgggtgaacctgaacctgtggcagaagctgaagctaagcagagatgatgccaagcctctgctgagactgaagggattcccttcctttcctctggtcgagagacaggccaacgaagtggactggtgggacatggtgtgtaacgtgaagaagctgatcaacgagaaaaaggaggatggcaaggtgttttggcagaatctggctggctacaagagacaggaagccctgagaccatacctgagcagcgaggaagatcggaagaagggaaagaaattcgctcggtaccagctgggcgacctgctgctgcacctggaaaagaagcacggcgaggactggggaaaggtgtacgacgaggcctgggagcggattgacaagaaagtggaaggcctgagcaagcacatcaagctggaagaggaacggagaagcgaggacgcccagagcaaggccgccctgaccgactggctgcgggctaaggccagcttcgtgatcgagggcctgaaggaggccgacaaggacgagttctgcagatgcgagctgaagctgcagaagtggtacggggacctgcggggaaagcccttcgccatcgaagccgagaacagcatcctggacatcagcggcttcagcaagcagtacaactgtgccttcatctggcagaaggacggcgtgaagaagctgaacctgtacctgatcatcaactacttcaagggcggcaagctgcggttcaagaagatcaaacctgaagccttcgaagccaacagattctacaccgtgatcaacaaaaagagcggcgagatcgtgcccatggaggtgaacttcaacttcgacgaccccaacctgatcatcctgcctctggcctttggcaagagacagggcagagaattcatctggaacgacctgctgtccctggaaaccggcagcctgaagctggccaacggaagagtgatcgagaagacactgtacaacagaagaacccggcaggatgagcctgccctgttcgtggccctgaccttcgagcggcgggaggtcctggactcctccaatatcaaaccaatgaacctgatcggcgtggcaagaggcgaaaacatccccgccgtgatcgccctgaccgaccccgagggctgcccactgagccggtttaaggatagcctgggaaacccaacccacatcctgagaatcggcgagagctataaggagaagcagcggaccatccaggccaagaaggaggtggagcagcggagagccggcggctacagccggaagtacgccagcaaagccaagaatctggcagacgatatggtgagaaacaccgctagagatctgctgtactacgccgtgacccaggatgccatgctgatcttcgccaacctgagccggggcttcggccggcagggcaagcggaccttcatggccgagagacagtacacacggatggaggactggctgaccgccaagctggcctacgagggcctgagcaagacctacctgtccaagacactggcccagtacacctccaagacatgcagcaactgtgggtttaccatcaccagcgccgactacgacagggtgctggagaagctgaagaagacagcaacaggctggatgaccacaattaacggcaaggagctgaaggtggagggccagattacctactacaacagatacaagagacagaacgtagtcaaggacctgtccgtcgagctggatagactgagcgaagaatctgtgaacaacgacatctcctcctggacaaagggcagaagcggagaagctctgagcctcctgaagaaaagattctcccatagacccgtgcaggagaagttcgtgtgcctgaactgcggcttcgagacacacgcagccgagcaagccgccctgaacatcgccagatcctggctgttcctgcggagccaggagtacaagaaataccagacaaacaagacaaccggcaacaccgataagagagccttcgtcgagacctggcagtccttttaccggaagaagcttaaggaggtgtggaaacctgccgtgcggtctggcggatctggcggaggctccatgatcgagtaccagatccccgtgagcttcaaggacgtggtggtgggcttcacccaggaggagtggcaccagctgagccccgcccagagggccctgtacagggacgtgatgctggagacctacagcaacctggtgagcgtgggctacgagggcaccaagcccgacgtgatcctgaggctggagcaggaggaggccccctggatcggcgaggccgcctgcctgggctgccactgctggggcaagggcggcccaagcagcggcgcccctcctcccagcggcggcagcccagccggctccccaacctctaccgaggagggcacctctgagtccgccacccccgagagcggccctggcacctccaccgagcccagcgagggcagcgcacccggcagccctgccggcagccccacctccacagaggagggaaccagcaccgagcccagcgaaggcagcgccccaggcaccagcaccgagcctagtgagcaggagattaaacggatcaacaagatcagaagaagacttgtgaaagacagcaacaccaagaaggccggcaagacaggccccatgaaaaccctgctggttagagtgatgacacccgatctgagagagcggctggaaaacctgagaaagaagcctgaaaatatcccccagcccatcagcaatacatctagagccaacctgaataagctgctgaccgattacaccgaaatgaagaaggcgatcctgcatgtgtactgggaagagttccagaaggaccctgtgggcctgatgagccgggtggcccagcctgccagcaagaagatcgatcagaacaagctgaaacctgagatggacgagaagggcaacctgaccaccgccggctttgcctgctctcagtgtggccagcccctgttcgtgtacaagctggagcaggtgtctgagaagggcaaggcttacaccaactacttcggacggtgcaatgtggccgagcacgaaaagctgatcctgctggcccagctgaagcccgagaaggatagcgacgaagccgtgacatatagcctgggaaagtttgggcagagggccctggatttctacagcattcatgtgaccaaggagtccacccaccccgtgaagcccctggcccagatcgccggaaacagatacgcctccggacctgtgggaaaggccctgagcgacgcatgtatgggcacaatcgcctccttcctgtctaagtaccaggacatcatcatcgaacaccagaaggtggtgaagggcaaccagaagagactggagagcctgcgggagctggccggcaaggaaaacctggaataccctagcgtgaccctgccacctcagcctcacaccaaggagggcgttgatgcctacaacgaagtgatcgcccgggtgcgaatgtgggtgaacctgaacctgtggcagaagctgaagctaagcagagatgatgccaagcctctgctgagactgaagggattcccttcctttcctctggtcgagagacaggccaacgaagtggactggtgggacatggtgtgtaacgtgaagaagctgatcaacgagaaaaaggaggatggcaaggtgttttggcagaatctggctggctacaagagacaggaagccctgagaccatacctgagcagcgaggaagatcggaagaagggaaagaaattcgctcggtaccagctgggcgacctgctgctgcacctggaaaagaagcacggcgaggactggggaaaggtgtacgacgaggcctgggagcggattgacaagaaagtggaaggcctgagcaagcacatcaagctggaagaggaacggagaagcgaggacgcccagagcaaggccgccctgaccgactggctgcgggctaaggccagcttcgtgatcgagggcctgaaggaggccgacaaggacgagttctgcagatgcgagctgaagctgcagaagtggtacggggacctgcggggaaagcccttcgccatcgaagccgagaacagcatcctggacatcagcggcttcagcaagcagtacaactgtgccttcatctggcagaaggacggcgtgaagaagctgaacctgtacctgatcatcaactacttcaagggcggcaagctgcggttcaagaagatcaaacctgaagccttcgaagccaacagattctacaccgtgatcaacaaaaagagcggcgagatcgtgcccatggaggtgaacttcaacttcgacgaccccaacctgatcatcctgcctctggcctttggcaagagacagggcagagaattcatctggaacgacctgctgtccctggaaaccggcagcctgaagctggccaacggaagagtgatcgagaagacactgtacaacagaagaacccggcaggatgagcctgccctgttcgtggccctgaccttcgagcggcgggaggtcctggactcctccaatatcaaaccaatgaacctgatcggcgtggcaagaggcgaaaacatccccgccgtgatcgccctgaccgaccccgagggctgcccactgagccggtttaaggatagcctgggaaacccaacccacatcctgagaatcggcgagagctataaggagaagcagcggaccatccaggccaagaaggaggtggagcagcggagagccggcggctacagccggaagtacgccagcaaagccaagaatctggcagacgatatggtgagaaacaccgctagagatctgctgtactacgccgtgacccaggatgccatgctgatcttcgccaacctgagccggggcttcggccggcagggcaagcggaccttcatggccgagagacagtacacacggatggaggactggctgaccgccaagctggcctacgagggcctgagcaagacctacctgtccaagacactggcccagtacacctccaagacatgcagcaactgtgggtttaccatcaccagcgccgactacgacagggtgctggagaagctgaagaagacagcaacaggctggatgaccacaattaacggcaaggagctgaaggtggagggccagattacctactacaacagatacaagagacagaacgtagtcaaggacctgtccgtcgagctggatagactgagcgaagaatctgtgaacaacgacatctcctcctggacaaagggcagaagcggagaagctctgagcctcctgaagaaaagattctcccatagacccgtgcaggagaagttcgtgtgcctgaactgcggcttcgagacacacgcagccgagcaagccgccctgaacatcgccagatcctggctgttcctgcggagccaggagtacaagaaataccagacaaacaagacaaccggcaacaccgataagagagccttcgtcgagacctggcagtccttttaccggaagaagcttaaggaggtgtggaaacctgccgtgcggtctggcggatctggcggaggctcctatgatcgagtaccagatccccgtgagcttcaaggacgtggtggtgggcttcacccaggaggagtggcaccagctgagccccgcccagagggccctgtacagggacgtgatgctggagacctacagcaacctggtgagcgtgggctacgagggcaccaagcccgacgtgatcctgaggctggagcaggaggaggccccctggatcggcgaggccgcctgcctgggctgccactgctggggcaagggatctggctccggcagcggccccaagaaaaagagaaaagtctaagctgccttctgcggggcttgccttctggccatgcccttcttctctcccttgcacctgtacctcttggtctttgaataaagcctgagtaggaaggctagcaaaaaaaaaaaaaaaaaaaaaaaaaaaaaaaaaaaaaaaaaaaaaaaaaaaaaaaaaaaaaaaaaaaaaaaaaaaaaaaa

SEQ ID NO: 15714 - RNA, 9485 nt, synthetic construct
  source 1..9485: mol_type = other RNA
aggaaataagagagaaaagaagagtaagaagaaatataagagccaccatggcccctaagaagaagcgtaaagtgagccggatggaacgcctcgtctacgaggtgcggcagaagtgcagaaacatcgaggacatctgcatctcctgcggatctctgaacgtgaccctggagcacccactgttcatcggcggcatgtgccagaactgtaaaaactgttttctggagtgtgcctatcaatacgacgatgacggctaccagagctactgcaccatctgttgcggcggaagagaggtgctgatgtgtggaaataacaactgctgccggtgcttctgcgtggaatgcgtggacctgctggtgggccccggcgccgcccaggccgctattaaggaagatccttggaactgctacatgtgcggccacaagggcacatacggcctgctgagacggagagaggactggcctagcagactgcagatgttcttcgccaataaccacgaccaggagttcgacccccctaaggtgtaccctcccgtccccgccgagaagagaaagcccatccgggtcctgagcctgttcgatggcatcgccaccggtctgctggtgctgaaggacctgggcatccaggtggataggtacattgcctccgaggtgtgcgaggactccatcaccgtgggaatggtgcgtcatcagggcaagatcatgtacgtgggcgacgtgcggagcgtgacacagaagcatatccaggagtggggccctttcgacctggtgatcggcggcagcccttgcaatgacctgagcatcgtgaacccagcccggaagggcctgtacgagggaaccggcagactgttcttcgagttttacagactgctgcacgacgcccggcctaaggaaggcgacgaccggcccttcttttggctgttcgagaatgtggtggccatgggagtcagcgacaagcgggatattagccggttcctggagagcaaccccgtgatgatcgatgccaaggaagtgagcgccgcccaccgggccagatacttctggggcaatctgcctggcatgaacagacccctggccagcaccgtgaacgacaagctggagctgcaggagtgcctggagcacggccggatcgccaagttcagcaaggtgagaaccatcaccacccgaagcaacagcatcaaacaaggcaaggaccagcactttcctgtgttcatgaacgagaaggaggacatcctgtggtgtaccgagatggagagagtgttcgggttcccagtccactacacagatgtcagcaacatgtctagactggccagacagagactgctgggaagaagctggtccgtccctgtgatcagacacctgttcgcccctctgaaggagtacttcgcctgcgtgagcagcggcaacagcaacgccaacagccggggccccagcttctctagcggcctggtgccactgtccctgagagggagccacatgggccccatggagatctacaaaaccgtgagcgcctggaagcggcagcctgtgcgcgtgctgagcctgtttcggaatatcgataaagtcctgaaaagcctgggattcctggagagcggctctggctccggcggtggcaccctgaagtacgtggaggatgtgacaaacgtggtcagacgggatgtggagaagtggggccccttcgatctggtgtacggcagcacccaacccctgggcagctcttgtgaccggtgccctggctggtacatgtttcagttccaccggatcctgcagtacgccctgccgagacaggagtcccagcggccattcttttggattttcatggacaacttgctgctgaccgaggatgaccaggaaactaccactcggttcctgcagaccgaagccgtgaccctgcaggacgtgagaggccgggactaccagaacgccatgcgggtgtggtccaacatccctggactgaaaagcaagcacgcacctctgacccctaaagaagaggagtacctgcaggcccaggtgcggagcagaagcaagctggacgcccctaaggtggatctgctggtgaagaattgcctcctgcccctgagagagtacttcaagtatttcagccagaatagtctgcccctgggaggcagcggcggcggcgccctggtgacatttgaggacgtcgccgtgcggttcacccaggaggaatgggctctgctggatccttctcagaaaatcctgtaccgggacgtgatgagagagacataccggaatctgacctccgtgggcatcaactgggaatgttgggaccttgaagcctgcttcagaagcctgggaagaaacctgagagtgcaggtggtgaagagaaagtgcgagctgaccaacagcggcccctgcgccgagggcggcccaagcagcggcgcccctcctcccagcggcggcagcccagccggctccccaacctctaccgaggagggcacctctgagtccgccacccccgagagcggccctggcacctccaccgagcccagcgagggcagcgcacccggcagccctgccggcagccccacctccacagaggagggaaccagcaccgagcccagcgaaggcagcgccccaggcaccagcaccgagcctagtgagcaggagattaaacggatcaacaagatcagaagaagacttgtgaaagacagcaacaccaagaaggccggcaagacaggccccatgaaaaccctgctggttagagtgatgacacccgatctgagagagcggctggaaaacctgagaaagaagcctgaaaatatcccccagcccatcagcaatacatctagagccaacctgaataagctgctgaccgattacaccgaaatgaagaaggcgatcctgcatgtgtactgggaagagttccagaaggaccctgtgggcctgatgagccgggtggcccagcctgccagcaagaagatcgatcagaacaagctgaaacctgagatggacgagaagggcaacctgaccaccgccggctttgcctgctctcagtgtggccagcccctgttcgtgtacaagctggagcaggtgtctgagaagggcaaggcttacaccaactacttcggacggtgcaatgtggccgagcacgaaaagctgatcctgctggcccagctgaagcccgagaaggatagcgacgaagccgtgacatatagcctgggaaagtttgggcagagggccctggatttctacagcattcatgtgaccaaggagtccacccaccccgtgaagcccctggcccagatcgccggaaacagatacgcctccggacctgtgggaaaggccctgagcgacgcatgtatgggcacaatcgcctccttcctgtctaagtaccaggacatcatcatcgaacaccagaaggtggtgaagggcaaccagaagagactggagagcctgcgggagctggccggcaaggaaaacctggaataccctagcgtgaccctgccacctcagcctcacaccaaggagggcgttgatgcctacaacgaagtgatcgcccgggtgcgaatgtgggtgaacctgaacctgtggcagaagctgaagctaagcagagatgatgccaagcctctgctgagactgaagggattcccttcctttcctctggtcgagagacaggccaacgaagtggactggtgggacatggtgtgtaacgtgaagaagctgatcaacgagaaaaaggaggatggcaaggtgttttggcagaatctggctggctacaagagacaggaagccctgagaccatacctgagcagcgaggaagatcggaagaagggaaagaaattcgctcggtaccagctgggcgacctgctgctgcacctggaaaagaagcacggcgaggactggggaaaggtgtacgacgaggcctgggagcggattgacaagaaagtggaaggcctgagcaagcacatcaagctggaagaggaacggagaagcgaggacgcccagagcaaggccgccctgaccgactggctgcgggctaaggccagcttcgtgatcgagggcctgaaggaggccgacaaggacgagttctgcagatgcgagctgaagctgcagaagtggtacggggacctgcggggaaagcccttcgccatcgaagccgagaacagcatcctggacatcagcggcttcagcaagcagtacaactgtgccttcatctggcagaaggacggcgtgaagaagctgaacctgtacctgatcatcaactacttcaagggcggcaagctgcggttcaagaagatcaaacctgaagccttcgaagccaacagattctacaccgtgatcaacaaaaagagcggcgagatcgtgcccatggaggtgaacttcaacttcgacgaccccaacctgatcatcctgcctctggcctttggcaagagacagggcagagaattcatctggaacgacctgctgtccctggaaaccggcagcctgaagctggccaacggaagagtgatcgagaagacactgtacaacagaagaacccggcaggatgagcctgccctgttcgtggccctgaccttcgagcggcgggaggtcctggactcctccaatatcaaaccaatgaacctgatcggcgtggcaagaggcgaaaacatccccgccgtgatcgccctgaccgaccccgagggctgcccactgagccggtttaaggatagcctgggaaacccaacccacatcctgagaatcggcgagagctataaggagaagcagcggaccatccaggccaagaaggaggtggagcagcggagagccggcggctacagccggaagtacgccagcaaagccaagaatctggcagacgatatggtgagaaacaccgctagagatctgctgtactacgccgtgacccaggatgccatgctgatcttcgccaacctgagccggggcttcggccggcagggcaagcggaccttcatggccgagagacagtacacacggatggaggactggctgaccgccaagctggcctacgagggcctgagcaagacctacctgtccaagacactggcccagtacacctccaagacatgcagcaactgtgggtttaccatcaccagcgccgactacgacagggtgctggagaagctgaagaagacagcaacaggctggatgaccacaattaacggcaaggagctgaaggtggagggccagattacctactacaacagatacaagagacagaacgtagtcaaggacctgtccgtcgagctggatagactgagcgaagaatctgtgaacaacgacatctcctcctggacaaagggcagaagcggagaagctctgagcctcctgaagaaaagattctcccatagacccgtgcaggagaagttcgtgtgcctgaactgcggcttcgagacacacgcagccgagcaagccgccctgaacatcgccagatcctggctgttcctgcggagccaggagtacaagaaataccagacaaacaagacaaccggcaacaccgataagagagccttcgtcgagacctggcagtccttttaccggaagaagcttaaggaggtgtggaaacctgccgtgcggtctggcggatctggcggaggctcctacgaggagatggtgaccttcgaggacgtggccgtgcacttcaccaagaccgagtggaccggcctgagccccgcccagagggccctgtacaggagcgtgatgctggagaacttcggcaacctgaccgccctgggctaccccgtgcccaagcccgccctgatcagcctgctggagggcggcgacatggcctggggcctggaggcccaggacgaccccctggccgagatgaccaagaacgtgtgcggcggcccaagcagcggcgcccctcctcccagcggcggcagcccagccggctccccaacctctaccgaggagggcacctctgagtccgccacccccgagagcggccctggcacctccaccgagcccagcgagggcagcgcacccggcagccctgccggcagccccacctccacagaggagggaaccagcaccgagcccagcgaaggcagcgccccaggcaccagcaccgagcctagtgagcaggagattaaacggatcaacaagatcagaagaagacttgtgaaagacagcaacaccaagaaggccggcaagacaggccccatgaaaaccctgctggttagagtgatgacacccgatctgagagagcggctggaaaacctgagaaagaagcctgaaaatatcccccagcccatcagcaatacatctagagccaacctgaataagctgctgaccgattacaccgaaatgaagaaggcgatcctgcatgtgtactgggaagagttccagaaggaccctgtgggcctgatgagccgggtggcccagcctgccagcaagaagatcgatcagaacaagctgaaacctgagatggacgagaagggcaacctgaccaccgccggctttgcctgctctcagtgtggccagcccctgttcgtgtacaagctggagcaggtgtctgagaagggcaaggcttacaccaactacttcggacggtgcaatgtggccgagcacgaaaagctgatcctgctggcccagctgaagcccgagaaggatagcgacgaagccgtgacatatagcctgggaaagtttgggcagagggccctggatttctacagcattcatgtgaccaaggagtccacccaccccgtgaagcccctggcccagatcgccggaaacagatacgcctccggacctgtgggaaaggccctgagcgacgcatgtatgggcacaatcgcctccttcctgtctaagtaccaggacatcatcatcgaacaccagaaggtggtgaagggcaaccagaagagactggagagcctgcgggagctggccggcaaggaaaacctggaataccctagcgtgaccctgccacctcagcctcacaccaaggagggcgttgatgcctacaacgaagtgatcgcccgggtgcgaatgtgggtgaacctgaacctgtggcagaagctgaagctaagcagagatgatgccaagcctctgctgagactgaagggattcccttcctttcctctggtcgagagacaggccaacgaagtggactggtgggacatggtgtgtaacgtgaagaagctgatcaacgagaaaaaggaggatggcaaggtgttttggcagaatctggctggctacaagagacaggaagccctgagaccatacctgagcagcgaggaagatcggaagaagggaaagaaattcgctcggtaccagctgggcgacctgctgctgcacctggaaaagaagcacggcgaggactggggaaaggtgtacgacgaggcctgggagcggattgacaagaaagtggaaggcctgagcaagcacatcaagctggaagaggaacggagaagcgaggacgcccagagcaaggccgccctgaccgactggctgcgggctaaggccagcttcgtgatcgagggcctgaaggaggccgacaaggacgagttctgcagatgcgagctgaagctgcagaagtggtacggggacctgcggggaaagcccttcgccatcgaagccgagaacagcatcctggacatcagcggcttcagcaagcagtacaactgtgccttcatctggcagaaggacggcgtgaagaagctgaacctgtacctgatcatcaactacttcaagggcggcaagctgcggttcaagaagatcaaacctgaagccttcgaagccaacagattctacaccgtgatcaacaaaaagagcggcgagatcgtgcccatggaggtgaacttcaacttcgacgaccccaacctgatcatcctgcctctggcctttggcaagagacagggcagagaattcatctggaacgacctgctgtccctggaaaccggcagcctgaagctggccaacggaagagtgatcgagaagacactgtacaacagaagaacccggcaggatgagcctgccctgttcgtggccctgaccttcgagcggcgggaggtcctggactcctccaatatcaaaccaatgaacctgatcggcgtggcaagaggcgaaaacatccccgccgtgatcgccctgaccgaccccgagggctgcccactgagccggtttaaggatagcctgggaaacccaacccacatcctgagaatcggcgagagctataaggagaagcagcggaccatccaggccaagaaggaggtggagcagcggagagccggcggctacagccggaagtacgccagcaaagccaagaatctggcagacgatatggtgagaaacaccgctagagatctgctgtactacgccgtgacccaggatgccatgctgatcttcgccaacctgagccggggcttcggccggcagggcaagcggaccttcatggccgagagacagtacacacggatggaggactggctgaccgccaagctggcctacgagggcctgagcaagacctacctgtccaagacactggcccagtacacctccaagacatgcagcaactgtgggtttaccatcaccagcgccgactacgacagggtgctggagaagctgaagaagacagcaacaggctggatgaccacaattaacggcaaggagctgaaggtggagggccagattacctactacaacagatacaagagacagaacgtagtcaaggacctgtccgtcgagctggatagactgagcgaagaatctgtgaacaacgacatctcctcctggacaaagggcagaagcggagaagctctgagcctcctgaagaaaagattctcccatagacccgtgcaggagaagttcgtgtgcctgaactgcggcttcgagacacacgcagccgagcaagccgccctgaacatcgccagatcctggctgttcctgcggagccaggagtacaagaaataccagacaaacaagacaaccggcaacaccgataagagagccttcgtcgagacctggcagtccttttaccggaagaagcttaaggaggtgtggaaacctgccgtgcggtctggcggatctggcggaggctccttacgaggagatggtgaccttcgaggacgtggccgtgcacttcaccaagaccgagtggaccggcctgagccccgcccagagggccctgtacaggagcgtgatgctggagaacttcggcaacctgaccgccctgggctaccccgtgcccaagcccgccctgatcagcctgctggagggcggcgacatggcctggggcctggaggcccaggacgaccccctggccgagatgaccaagaacgtgtgcggatctggctccggcagcggccccaagaaaaagagaaaagtctaagctgccttctgcggggcttgccttctggccatgcccttcttctctcccttgcacctgtacctcttggtctttgaataaagcctgagtaggaaggctagcaaaaaaaaaaaaaaaaaaaaaaaaaaaaaaaaaaaaaaaaaaaaaaaaaaaaaaaaaaaaaaaaaaaaaaaaaaaaaaaa

SEQ ID NO: 15715 - RNA, 9485 nt, synthetic construct
  source 1..9485: mol_type = other RNA
aggaaataagagagaaaagaagagtaagaagaaatataagagccaccatggcccctaagaagaagcgtaaagtgagccggatggaacgcctcgtctacgaggtgcggcagaagtgcagaaacatcgaggacatctgcatctcctgcggatctctgaacgtgaccctggagcacccactgttcatcggcggcatgtgccagaactgtaaaaactgttttctggagtgtgcctatcaatacgacgatgacggctaccagagctactgcaccatctgttgcggcggaagagaggtgctgatgtgtggaaataacaactgctgccggtgcttctgcgtggaatgcgtggacctgctggtgggccccggcgccgcccaggccgctattaaggaagatccttggaactgctacatgtgcggccacaagggcacatacggcctgctgagacggagagaggactggcctagcagactgcagatgttcttcgccaataaccacgaccaggagttcgacccccctaaggtgtaccctcccgtccccgccgagaagagaaagcccatccgggtcctgagcctgttcgatggcatcgccaccggtctgctggtgctgaaggacctgggcatccaggtggataggtacattgcctccgaggtgtgcgaggactccatcaccgtgggaatggtgcgtcatcagggcaagatcatgtacgtgggcgacgtgcggagcgtgacacagaagcatatccaggagtggggccctttcgacctggtgatcggcggcagcccttgcaatgacctgagcatcgtgaacccagcccggaagggcctgtacgagggaaccggcagactgttcttcgagttttacagactgctgcacgacgcccggcctaaggaaggcgacgaccggcccttcttttggctgttcgagaatgtggtggccatgggagtcagcgacaagcgggatattagccggttcctggagagcaaccccgtgatgatcgatgccaaggaagtgagcgccgcccaccgggccagatacttctggggcaatctgcctggcatgaacagacccctggccagcaccgtgaacgacaagctggagctgcaggagtgcctggagcacggccggatcgccaagttcagcaaggtgagaaccatcaccacccgaagcaacagcatcaaacaaggcaaggaccagcactttcctgtgttcatgaacgagaaggaggacatcctgtggtgtaccgagatggagagagtgttcgggttcccagtccactacacagatgtcagcaacatgtctagactggccagacagagactgctgggaagaagctggtccgtccctgtgatcagacacctgttcgcccctctgaaggagtacttcgcctgcgtgagcagcggcaacagcaacgccaacagccggggccccagcttctctagcggcctggtgccactgtccctgagagggagccacatgggccccatggagatctacaaaaccgtgagcgcctggaagcggcagcctgtgcgcgtgctgagcctgtttcggaatatcgataaagtcctgaaaagcctgggattcctggagagcggctctggctccggcggtggcaccctgaagtacgtggaggatgtgacaaacgtggtcagacgggatgtggagaagtggggccccttcgatctggtgtacggcagcacccaacccctgggcagctcttgtgaccggtgccctggctggtacatgtttcagttccaccggatcctgcagtacgccctgccgagacaggagtcccagcggccattcttttggattttcatggacaacttgctgctgaccgaggatgaccaggaaactaccactcggttcctgcagaccgaagccgtgaccctgcaggacgtgagaggccgggactaccagaacgccatgcgggtgtggtccaacatccctggactgaaaagcaagcacgcacctctgacccctaaagaagaggagtacctgcaggcccaggtgcggagcagaagcaagctggacgcccctaaggtggatctgctggtgaagaattgcctcctgcccctgagagagtacttcaagtatttcagccagaatagtctgcccctgggaggcagcggcggcggcgccctggtgacatttgaggacgtcgccgtgcggttcacccaggaggaatgggctctgctggatccttctcagaaaatcctgtaccgggacgtgatgagagagacataccggaatctgacctccgtgggcatcaactgggaatgttgggaccttgaagcctgcttcagaagcctgggaagaaacctgagagtgcaggtggtgaagagaaagtgcgagctgaccaacagcggcccctgcgccgagggcggcccaagcagcggcgcccctcctcccagcggcggcagcccagccggctccccaacctctaccgaggagggcacctctgagtccgccacccccgagagcggccctggcacctccaccgagcccagcgagggcagcgcacccggcagccctgccggcagccccacctccacagaggagggaaccagcaccgagcccagcgaaggcagcgccccaggcaccagcaccgagcctagtgagcaggagattaaacggatcaacaagatcagaagaagacttgtgaaagacagcaacaccaagaaggccggcaagacaggccccatgaaaaccctgctggttagagtgatgacacccgatctgagagagcggctggaaaacctgagaaagaagcctgaaaatatcccccagcccatcagcaatacatctagagccaacctgaataagctgctgaccgattacaccgaaatgaagaaggcgatcctgcatgtgtactgggaagagttccagaaggaccctgtgggcctgatgagccgggtggcccagcctgccagcaagaagatcgatcagaacaagctgaaacctgagatggacgagaagggcaacctgaccaccgccggctttgcctgctctcagtgtggccagcccctgttcgtgtacaagctggagcaggtgtctgagaagggcaaggcttacaccaactacttcggacggtgcaatgtggccgagcacgaaaagctgatcctgctggcccagctgaagcccgagaaggatagcgacgaagccgtgacatatagcctgggaaagtttgggcagagggccctggatttctacagcattcatgtgaccaaggagtccacccaccccgtgaagcccctggcccagatcgccggaaacagatacgcctccggacctgtgggaaaggccctgagcgacgcatgtatgggcacaatcgcctccttcctgtctaagtaccaggacatcatcatcgaacaccagaaggtggtgaagggcaaccagaagagactggagagcctgcgggagctggccggcaaggaaaacctggaataccctagcgtgaccctgccacctcagcctcacaccaaggagggcgttgatgcctacaacgaagtgatcgcccgggtgcgaatgtgggtgaacctgaacctgtggcagaagctgaagctaagcagagatgatgccaagcctctgctgagactgaagggattcccttcctttcctctggtcgagagacaggccaacgaagtggactggtgggacatggtgtgtaacgtgaagaagctgatcaacgagaaaaaggaggatggcaaggtgttttggcagaatctggctggctacaagagacaggaagccctgagaccatacctgagcagcgaggaagatcggaagaagggaaagaaattcgctcggtaccagctgggcgacctgctgctgcacctggaaaagaagcacggcgaggactggggaaaggtgtacgacgaggcctgggagcggattgacaagaaagtggaaggcctgagcaagcacatcaagctggaagaggaacggagaagcgaggacgcccagagcaaggccgccctgaccgactggctgcgggctaaggccagcttcgtgatcgagggcctgaaggaggccgacaaggacgagttctgcagatgcgagctgaagctgcagaagtggtacggggacctgcggggaaagcccttcgccatcgaagccgagaacagcatcctggacatcagcggcttcagcaagcagtacaactgtgccttcatctggcagaaggacggcgtgaagaagctgaacctgtacctgatcatcaactacttcaagggcggcaagctgcggttcaagaagatcaaacctgaagccttcgaagccaacagattctacaccgtgatcaacaaaaagagcggcgagatcgtgcccatggaggtgaacttcaacttcgacgaccccaacctgatcatcctgcctctggcctttggcaagagacagggcagagaattcatctggaacgacctgctgtccctggaaaccggcagcctgaagctggccaacggaagagtgatcgagaagacactgtacaacagaagaacccggcaggatgagcctgccctgttcgtggccctgaccttcgagcggcgggaggtcctggactcctccaatatcaaaccaatgaacctgatcggcgtggcaagaggcgaaaacatccccgccgtgatcgccctgaccgaccccgagggctgcccactgagccggtttaaggatagcctgggaaacccaacccacatcctgagaatcggcgagagctataaggagaagcagcggaccatccaggccaagaaggaggtggagcagcggagagccggcggctacagccggaagtacgccagcaaagccaagaatctggcagacgatatggtgagaaacaccgctagagatctgctgtactacgccgtgacccaggatgccatgctgatcttcgccaacctgagccggggcttcggccggcagggcaagcggaccttcatggccgagagacagtacacacggatggaggactggctgaccgccaagctggcctacgagggcctgagcaagacctacctgtccaagacactggcccagtacacctccaagacatgcagcaactgtgggtttaccatcaccagcgccgactacgacagggtgctggagaagctgaagaagacagcaacaggctggatgaccacaattaacggcaaggagctgaaggtggagggccagattacctactacaacagatacaagagacagaacgtagtcaaggacctgtccgtcgagctggatagactgagcgaagaatctgtgaacaacgacatctcctcctggacaaagggcagaagcggagaagctctgagcctcctgaagaaaagattctcccatagacccgtgcaggagaagttcgtgtgcctgaactgcggcttcgagacacacgcagccgagcaagccgccctgaacatcgccagatcctggctgttcctgcggagccaggagtacaagaaataccagacaaacaagacaaccggcaacaccgataagagagccttcgtcgagacctggcagtccttttaccggaagaagcttaaggaggtgtggaaacctgccgtgcggtctggcggatctggcggaggctccagccccaccctggtgaccttcaaggacatccacgtgaacttcaccagggaggagtggaacctgctggacgccgcccagcagatcatgtacaaggacgtgatgctggagaactacaagaacctggtgagcgtgggccaccagctgcccaagcccgacgtgatcctgcagctggagaagggcgaggagccctggctggtggagaggggcgtgaggcaggacaccaggcccgactgggacaccgccggcggcccaagcagcggcgcccctcctcccagcggcggcagcccagccggctccccaacctctaccgaggagggcacctctgagtccgccacccccgagagcggccctggcacctccaccgagcccagcgagggcagcgcacccggcagccctgccggcagccccacctccacagaggagggaaccagcaccgagcccagcgaaggcagcgccccaggcaccagcaccgagcctagtgagcaggagattaaacggatcaacaagatcagaagaagacttgtgaaagacagcaacaccaagaaggccggcaagacaggccccatgaaaaccctgctggttagagtgatgacacccgatctgagagagcggctggaaaacctgagaaagaagcctgaaaatatcccccagcccatcagcaatacatctagagccaacctgaataagctgctgaccgattacaccgaaatgaagaaggcgatcctgcatgtgtactgggaagagttccagaaggaccctgtgggcctgatgagccgggtggcccagcctgccagcaagaagatcgatcagaacaagctgaaacctgagatggacgagaagggcaacctgaccaccgccggctttgcctgctctcagtgtggccagcccctgttcgtgtacaagctggagcaggtgtctgagaagggcaaggcttacaccaactacttcggacggtgcaatgtggccgagcacgaaaagctgatcctgctggcccagctgaagcccgagaaggatagcgacgaagccgtgacatatagcctgggaaagtttgggcagagggccctggatttctacagcattcatgtgaccaaggagtccacccaccccgtgaagcccctggcccagatcgccggaaacagatacgcctccggacctgtgggaaaggccctgagcgacgcatgtatgggcacaatcgcctccttcctgtctaagtaccaggacatcatcatcgaacaccagaaggtggtgaagggcaaccagaagagactggagagcctgcgggagctggccggcaaggaaaacctggaataccctagcgtgaccctgccacctcagcctcacaccaaggagggcgttgatgcctacaacgaagtgatcgcccgggtgcgaatgtgggtgaacctgaacctgtggcagaagctgaagctaagcagagatgatgccaagcctctgctgagactgaagggattcccttcctttcctctggtcgagagacaggccaacgaagtggactggtgggacatggtgtgtaacgtgaagaagctgatcaacgagaaaaaggaggatggcaaggtgttttggcagaatctggctggctacaagagacaggaagccctgagaccatacctgagcagcgaggaagatcggaagaagggaaagaaattcgctcggtaccagctgggcgacctgctgctgcacctggaaaagaagcacggcgaggactggggaaaggtgtacgacgaggcctgggagcggattgacaagaaagtggaaggcctgagcaagcacatcaagctggaagaggaacggagaagcgaggacgcccagagcaaggccgccctgaccgactggctgcgggctaaggccagcttcgtgatcgagggcctgaaggaggccgacaaggacgagttctgcagatgcgagctgaagctgcagaagtggtacggggacctgcggggaaagcccttcgccatcgaagccgagaacagcatcctggacatcagcggcttcagcaagcagtacaactgtgccttcatctggcagaaggacggcgtgaagaagctgaacctgtacctgatcatcaactacttcaagggcggcaagctgcggttcaagaagatcaaacctgaagccttcgaagccaacagattctacaccgtgatcaacaaaaagagcggcgagatcgtgcccatggaggtgaacttcaacttcgacgaccccaacctgatcatcctgcctctggcctttggcaagagacagggcagagaattcatctggaacgacctgctgtccctggaaaccggcagcctgaagctggccaacggaagagtgatcgagaagacactgtacaacagaagaacccggcaggatgagcctgccctgttcgtggccctgaccttcgagcggcgggaggtcctggactcctccaatatcaaaccaatgaacctgatcggcgtggcaagaggcgaaaacatccccgccgtgatcgccctgaccgaccccgagggctgcccactgagccggtttaaggatagcctgggaaacccaacccacatcctgagaatcggcgagagctataaggagaagcagcggaccatccaggccaagaaggaggtggagcagcggagagccggcggctacagccggaagtacgccagcaaagccaagaatctggcagacgatatggtgagaaacaccgctagagatctgctgtactacgccgtgacccaggatgccatgctgatcttcgccaacctgagccggggcttcggccggcagggcaagcggaccttcatggccgagagacagtacacacggatggaggactggctgaccgccaagctggcctacgagggcctgagcaagacctacctgtccaagacactggcccagtacacctccaagacatgcagcaactgtgggtttaccatcaccagcgccgactacgacagggtgctggagaagctgaagaagacagcaacaggctggatgaccacaattaacggcaaggagctgaaggtggagggccagattacctactacaacagatacaagagacagaacgtagtcaaggacctgtccgtcgagctggatagactgagcgaagaatctgtgaacaacgacatctcctcctggacaaagggcagaagcggagaagctctgagcctcctgaagaaaagattctcccatagacccgtgcaggagaagttcgtgtgcctgaactgcggcttcgagacacacgcagccgagcaagccgccctgaacatcgccagatcctggctgttcctgcggagccaggagtacaagaaataccagacaaacaagacaaccggcaacaccgataagagagccttcgtcgagacctggcagtccttttaccggaagaagcttaaggaggtgtggaaacctgccgtgcggtctggcggatctggcggaggctcctagccccaccctggtgaccttcaaggacatccacgtgaacttcaccagggaggagtggaacctgctggacgccgcccagcagatcatgtacaaggacgtgatgctggagaactacaagaacctggtgagcgtgggccaccagctgcccaagcccgacgtgatcctgcagctggagaagggcgaggagccctggctggtggagaggggcgtgaggcaggacaccaggcccgactgggacaccgccggatctggctccggcagcggccccaagaaaaagagaaaagtctaagctgccttctgcggggcttgccttctggccatgcccttcttctctcccttgcacctgtacctcttggtctttgaataaagcctgagtaggaaggctagcaaaaaaaaaaaaaaaaaaaaaaaaaaaaaaaaaaaaaaaaaaaaaaaaaaaaaaaaaaaaaaaaaaaaaaaaaaaaaaaa

SEQ ID NO: 15716 - RNA, 9485 nt, synthetic construct
  source 1..9485: mol_type = other RNA
aggaaataagagagaaaagaagagtaagaagaaatataagagccaccatggcccctaagaagaagcgtaaagtgagccggatggaacgcctcgtctacgaggtgcggcagaagtgcagaaacatcgaggacatctgcatctcctgcggatctctgaacgtgaccctggagcacccactgttcatcggcggcatgtgccagaactgtaaaaactgttttctggagtgtgcctatcaatacgacgatgacggctaccagagctactgcaccatctgttgcggcggaagagaggtgctgatgtgtggaaataacaactgctgccggtgcttctgcgtggaatgcgtggacctgctggtgggccccggcgccgcccaggccgctattaaggaagatccttggaactgctacatgtgcggccacaagggcacatacggcctgctgagacggagagaggactggcctagcagactgcagatgttcttcgccaataaccacgaccaggagttcgacccccctaaggtgtaccctcccgtccccgccgagaagagaaagcccatccgggtcctgagcctgttcgatggcatcgccaccggtctgctggtgctgaaggacctgggcatccaggtggataggtacattgcctccgaggtgtgcgaggactccatcaccgtgggaatggtgcgtcatcagggcaagatcatgtacgtgggcgacgtgcggagcgtgacacagaagcatatccaggagtggggccctttcgacctggtgatcggcggcagcccttgcaatgacctgagcatcgtgaacccagcccggaagggcctgtacgagggaaccggcagactgttcttcgagttttacagactgctgcacgacgcccggcctaaggaaggcgacgaccggcccttcttttggctgttcgagaatgtggtggccatgggagtcagcgacaagcgggatattagccggttcctggagagcaaccccgtgatgatcgatgccaaggaagtgagcgccgcccaccgggccagatacttctggggcaatctgcctggcatgaacagacccctggccagcaccgtgaacgacaagctggagctgcaggagtgcctggagcacggccggatcgccaagttcagcaaggtgagaaccatcaccacccgaagcaacagcatcaaacaaggcaaggaccagcactttcctgtgttcatgaacgagaaggaggacatcctgtggtgtaccgagatggagagagtgttcgggttcccagtccactacacagatgtcagcaacatgtctagactggccagacagagactgctgggaagaagctggtccgtccctgtgatcagacacctgttcgcccctctgaaggagtacttcgcctgcgtgagcagcggcaacagcaacgccaacagccggggccccagcttctctagcggcctggtgccactgtccctgagagggagccacatgggccccatggagatctacaaaaccgtgagcgcctggaagcggcagcctgtgcgcgtgctgagcctgtttcggaatatcgataaagtcctgaaaagcctgggattcctggagagcggctctggctccggcggtggcaccctgaagtacgtggaggatgtgacaaacgtggtcagacgggatgtggagaagtggggccccttcgatctggtgtacggcagcacccaacccctgggcagctcttgtgaccggtgccctggctggtacatgtttcagttccaccggatcctgcagtacgccctgccgagacaggagtcccagcggccattcttttggattttcatggacaacttgctgctgaccgaggatgaccaggaaactaccactcggttcctgcagaccgaagccgtgaccctgcaggacgtgagaggccgggactaccagaacgccatgcgggtgtggtccaacatccctggactgaaaagcaagcacgcacctctgacccctaaagaagaggagtacctgcaggcccaggtgcggagcagaagcaagctggacgcccctaaggtggatctgctggtgaagaattgcctcctgcccctgagagagtacttcaagtatttcagccagaatagtctgcccctgggaggcagcggcggcggcgccctggtgacatttgaggacgtcgccgtgcggttcacccaggaggaatgggctctgctggatccttctcagaaaatcctgtaccgggacgtgatgagagagacataccggaatctgacctccgtgggcatcaactgggaatgttgggaccttgaagcctgcttcagaagcctgggaagaaacctgagagtgcaggtggtgaagagaaagtgcgagctgaccaacagcggcccctgcgccgagggcggcccaagcagcggcgcccctcctcccagcggcggcagcccagccggctccccaacctctaccgaggagggcacctctgagtccgccacccccgagagcggccctggcacctccaccgagcccagcgagggcagcgcacccggcagccctgccggcagccccacctccacagaggagggaaccagcaccgagcccagcgaaggcagcgccccaggcaccagcaccgagcctagtgagcaggagattaaacggatcaacaagatcagaagaagacttgtgaaagacagcaacaccaagaaggccggcaagacaggccccatgaaaaccctgctggttagagtgatgacacccgatctgagagagcggctggaaaacctgagaaagaagcctgaaaatatcccccagcccatcagcaatacatctagagccaacctgaataagctgctgaccgattacaccgaaatgaagaaggcgatcctgcatgtgtactgggaagagttccagaaggaccctgtgggcctgatgagccgggtggcccagcctgccagcaagaagatcgatcagaacaagctgaaacctgagatggacgagaagggcaacctgaccaccgccggctttgcctgctctcagtgtggccagcccctgttcgtgtacaagctggagcaggtgtctgagaagggcaaggcttacaccaactacttcggacggtgcaatgtggccgagcacgaaaagctgatcctgctggcccagctgaagcccgagaaggatagcgacgaagccgtgacatatagcctgggaaagtttgggcagagggccctggatttctacagcattcatgtgaccaaggagtccacccaccccgtgaagcccctggcccagatcgccggaaacagatacgcctccggacctgtgggaaaggccctgagcgacgcatgtatgggcacaatcgcctccttcctgtctaagtaccaggacatcatcatcgaacaccagaaggtggtgaagggcaaccagaagagactggagagcctgcgggagctggccggcaaggaaaacctggaataccctagcgtgaccctgccacctcagcctcacaccaaggagggcgttgatgcctacaacgaagtgatcgcccgggtgcgaatgtgggtgaacctgaacctgtggcagaagctgaagctaagcagagatgatgccaagcctctgctgagactgaagggattcccttcctttcctctggtcgagagacaggccaacgaagtggactggtgggacatggtgtgtaacgtgaagaagctgatcaacgagaaaaaggaggatggcaaggtgttttggcagaatctggctggctacaagagacaggaagccctgagaccatacctgagcagcgaggaagatcggaagaagggaaagaaattcgctcggtaccagctgggcgacctgctgctgcacctggaaaagaagcacggcgaggactggggaaaggtgtacgacgaggcctgggagcggattgacaagaaagtggaaggcctgagcaagcacatcaagctggaagaggaacggagaagcgaggacgcccagagcaaggccgccctgaccgactggctgcgggctaaggccagcttcgtgatcgagggcctgaaggaggccgacaaggacgagttctgcagatgcgagctgaagctgcagaagtggtacggggacctgcggggaaagcccttcgccatcgaagccgagaacagcatcctggacatcagcggcttcagcaagcagtacaactgtgccttcatctggcagaaggacggcgtgaagaagctgaacctgtacctgatcatcaactacttcaagggcggcaagctgcggttcaagaagatcaaacctgaagccttcgaagccaacagattctacaccgtgatcaacaaaaagagcggcgagatcgtgcccatggaggtgaacttcaacttcgacgaccccaacctgatcatcctgcctctggcctttggcaagagacagggcagagaattcatctggaacgacctgctgtccctggaaaccggcagcctgaagctggccaacggaagagtgatcgagaagacactgtacaacagaagaacccggcaggatgagcctgccctgttcgtggccctgaccttcgagcggcgggaggtcctggactcctccaatatcaaaccaatgaacctgatcggcgtggcaagaggcgaaaacatccccgccgtgatcgccctgaccgaccccgagggctgcccactgagccggtttaaggatagcctgggaaacccaacccacatcctgagaatcggcgagagctataaggagaagcagcggaccatccaggccaagaaggaggtggagcagcggagagccggcggctacagccggaagtacgccagcaaagccaagaatctggcagacgatatggtgagaaacaccgctagagatctgctgtactacgccgtgacccaggatgccatgctgatcttcgccaacctgagccggggcttcggccggcagggcaagcggaccttcatggccgagagacagtacacacggatggaggactggctgaccgccaagctggcctacgagggcctgagcaagacctacctgtccaagacactggcccagtacacctccaagacatgcagcaactgtgggtttaccatcaccagcgccgactacgacagggtgctggagaagctgaagaagacagcaacaggctggatgaccacaattaacggcaaggagctgaaggtggagggccagattacctactacaacagatacaagagacagaacgtagtcaaggacctgtccgtcgagctggatagactgagcgaagaatctgtgaacaacgacatctcctcctggacaaagggcagaagcggagaagctctgagcctcctgaagaaaagattctcccatagacccgtgcaggagaagttcgtgtgcctgaactgcggcttcgagacacacgcagccgagcaagccgccctgaacatcgccagatcctggctgttcctgcggagccaggagtacaagaaataccagacaaacaagacaaccggcaacaccgataagagagccttcgtcgagacctggcagtccttttaccggaagaagcttaaggaggtgtggaaacctgccgtgcggtctggcggatctggcggaggctccgccagggagagcgtgatgttcagcgacgtgagcatcgacttcagcctggaggagtgggagttcctgaacctggagcagagggacctgtacagggacgtgatgctggagaactacagcaacctggtgagcctgggctgcttcatcagcaagcccgacgtgatcagcctgctggagcagggcaaggagccctggaacgtggtgaggaagggcaggaggcagtaccccgacctggagaccaactacggcggcccaagcagcggcgcccctcctcccagcggcggcagcccagccggctccccaacctctaccgaggagggcacctctgagtccgccacccccgagagcggccctggcacctccaccgagcccagcgagggcagcgcacccggcagccctgccggcagccccacctccacagaggagggaaccagcaccgagcccagcgaaggcagcgccccaggcaccagcaccgagcctagtgagcaggagattaaacggatcaacaagatcagaagaagacttgtgaaagacagcaacaccaagaaggccggcaagacaggccccatgaaaaccctgctggttagagtgatgacacccgatctgagagagcggctggaaaacctgagaaagaagcctgaaaatatcccccagcccatcagcaatacatctagagccaacctgaataagctgctgaccgattacaccgaaatgaagaaggcgatcctgcatgtgtactgggaagagttccagaaggaccctgtgggcctgatgagccgggtggcccagcctgccagcaagaagatcgatcagaacaagctgaaacctgagatggacgagaagggcaacctgaccaccgccggctttgcctgctctcagtgtggccagcccctgttcgtgtacaagctggagcaggtgtctgagaagggcaaggcttacaccaactacttcggacggtgcaatgtggccgagcacgaaaagctgatcctgctggcccagctgaagcccgagaaggatagcgacgaagccgtgacatatagcctgggaaagtttgggcagagggccctggatttctacagcattcatgtgaccaaggagtccacccaccccgtgaagcccctggcccagatcgccggaaacagatacgcctccggacctgtgggaaaggccctgagcgacgcatgtatgggcacaatcgcctccttcctgtctaagtaccaggacatcatcatcgaacaccagaaggtggtgaagggcaaccagaagagactggagagcctgcgggagctggccggcaaggaaaacctggaataccctagcgtgaccctgccacctcagcctcacaccaaggagggcgttgatgcctacaacgaagtgatcgcccgggtgcgaatgtgggtgaacctgaacctgtggcagaagctgaagctaagcagagatgatgccaagcctctgctgagactgaagggattcccttcctttcctctggtcgagagacaggccaacgaagtggactggtgggacatggtgtgtaacgtgaagaagctgatcaacgagaaaaaggaggatggcaaggtgttttggcagaatctggctggctacaagagacaggaagccctgagaccatacctgagcagcgaggaagatcggaagaagggaaagaaattcgctcggtaccagctgggcgacctgctgctgcacctggaaaagaagcacggcgaggactggggaaaggtgtacgacgaggcctgggagcggattgacaagaaagtggaaggcctgagcaagcacatcaagctggaagaggaacggagaagcgaggacgcccagagcaaggccgccctgaccgactggctgcgggctaaggccagcttcgtgatcgagggcctgaaggaggccgacaaggacgagttctgcagatgcgagctgaagctgcagaagtggtacggggacctgcggggaaagcccttcgccatcgaagccgagaacagcatcctggacatcagcggcttcagcaagcagtacaactgtgccttcatctggcagaaggacggcgtgaagaagctgaacctgtacctgatcatcaactacttcaagggcggcaagctgcggttcaagaagatcaaacctgaagccttcgaagccaacagattctacaccgtgatcaacaaaaagagcggcgagatcgtgcccatggaggtgaacttcaacttcgacgaccccaacctgatcatcctgcctctggcctttggcaagagacagggcagagaattcatctggaacgacctgctgtccctggaaaccggcagcctgaagctggccaacggaagagtgatcgagaagacactgtacaacagaagaacccggcaggatgagcctgccctgttcgtggccctgaccttcgagcggcgggaggtcctggactcctccaatatcaaaccaatgaacctgatcggcgtggcaagaggcgaaaacatccccgccgtgatcgccctgaccgaccccgagggctgcccactgagccggtttaaggatagcctgggaaacccaacccacatcctgagaatcggcgagagctataaggagaagcagcggaccatccaggccaagaaggaggtggagcagcggagagccggcggctacagccggaagtacgccagcaaagccaagaatctggcagacgatatggtgagaaacaccgctagagatctgctgtactacgccgtgacccaggatgccatgctgatcttcgccaacctgagccggggcttcggccggcagggcaagcggaccttcatggccgagagacagtacacacggatggaggactggctgaccgccaagctggcctacgagggcctgagcaagacctacctgtccaagacactggcccagtacacctccaagacatgcagcaactgtgggtttaccatcaccagcgccgactacgacagggtgctggagaagctgaagaagacagcaacaggctggatgaccacaattaacggcaaggagctgaaggtggagggccagattacctactacaacagatacaagagacagaacgtagtcaaggacctgtccgtcgagctggatagactgagcgaagaatctgtgaacaacgacatctcctcctggacaaagggcagaagcggagaagctctgagcctcctgaagaaaagattctcccatagacccgtgcaggagaagttcgtgtgcctgaactgcggcttcgagacacacgcagccgagcaagccgccctgaacatcgccagatcctggctgttcctgcggagccaggagtacaagaaataccagacaaacaagacaaccggcaacaccgataagagagccttcgtcgagacctggcagtccttttaccggaagaagcttaaggaggtgtggaaacctgccgtgcggtctggcggatctggcggaggctcctgccagggagagcgtgatgttcagcgacgtgagcatcgacttcagcctggaggagtgggagttcctgaacctggagcagagggacctgtacagggacgtgatgctggagaactacagcaacctggtgagcctgggctgcttcatcagcaagcccgacgtgatcagcctgctggagcagggcaaggagccctggaacgtggtgaggaagggcaggaggcagtaccccgacctggagaccaactacggatctggctccggcagcggccccaagaaaaagagaaaagtctaagctgccttctgcggggcttgccttctggccatgcccttcttctctcccttgcacctgtacctcttggtctttgaataaagcctgagtaggaaggctagcaaaaaaaaaaaaaaaaaaaaaaaaaaaaaaaaaaaaaaaaaaaaaaaaaaaaaaaaaaaaaaaaaaaaaaaaaaaaaaaa

SEQ ID NO: 15717 - RNA, 9485 nt, synthetic construct
  source 1..9485: mol_type = other RNA
aggaaataagagagaaaagaagagtaagaagaaatataagagccaccatggcccctaagaagaagcgtaaagtgagccggatggaacgcctcgtctacgaggtgcggcagaagtgcagaaacatcgaggacatctgcatctcctgcggatctctgaacgtgaccctggagcacccactgttcatcggcggcatgtgccagaactgtaaaaactgttttctggagtgtgcctatcaatacgacgatgacggctaccagagctactgcaccatctgttgcggcggaagagaggtgctgatgtgtggaaataacaactgctgccggtgcttctgcgtggaatgcgtggacctgctggtgggccccggcgccgcccaggccgctattaaggaagatccttggaactgctacatgtgcggccacaagggcacatacggcctgctgagacggagagaggactggcctagcagactgcagatgttcttcgccaataaccacgaccaggagttcgacccccctaaggtgtaccctcccgtccccgccgagaagagaaagcccatccgggtcctgagcctgttcgatggcatcgccaccggtctgctggtgctgaaggacctgggcatccaggtggataggtacattgcctccgaggtgtgcgaggactccatcaccgtgggaatggtgcgtcatcagggcaagatcatgtacgtgggcgacgtgcggagcgtgacacagaagcatatccaggagtggggccctttcgacctggtgatcggcggcagcccttgcaatgacctgagcatcgtgaacccagcccggaagggcctgtacgagggaaccggcagactgttcttcgagttttacagactgctgcacgacgcccggcctaaggaaggcgacgaccggcccttcttttggctgttcgagaatgtggtggccatgggagtcagcgacaagcgggatattagccggttcctggagagcaaccccgtgatgatcgatgccaaggaagtgagcgccgcccaccgggccagatacttctggggcaatctgcctggcatgaacagacccctggccagcaccgtgaacgacaagctggagctgcaggagtgcctggagcacggccggatcgccaagttcagcaaggtgagaaccatcaccacccgaagcaacagcatcaaacaaggcaaggaccagcactttcctgtgttcatgaacgagaaggaggacatcctgtggtgtaccgagatggagagagtgttcgggttcccagtccactacacagatgtcagcaacatgtctagactggccagacagagactgctgggaagaagctggtccgtccctgtgatcagacacctgttcgcccctctgaaggagtacttcgcctgcgtgagcagcggcaacagcaacgccaacagccggggccccagcttctctagcggcctggtgccactgtccctgagagggagccacatgggccccatggagatctacaaaaccgtgagcgcctggaagcggcagcctgtgcgcgtgctgagcctgtttcggaatatcgataaagtcctgaaaagcctgggattcctggagagcggctctggctccggcggtggcaccctgaagtacgtggaggatgtgacaaacgtggtcagacgggatgtggagaagtggggccccttcgatctggtgtacggcagcacccaacccctgggcagctcttgtgaccggtgccctggctggtacatgtttcagttccaccggatcctgcagtacgccctgccgagacaggagtcccagcggccattcttttggattttcatggacaacttgctgctgaccgaggatgaccaggaaactaccactcggttcctgcagaccgaagccgtgaccctgcaggacgtgagaggccgggactaccagaacgccatgcgggtgtggtccaacatccctggactgaaaagcaagcacgcacctctgacccctaaagaagaggagtacctgcaggcccaggtgcggagcagaagcaagctggacgcccctaaggtggatctgctggtgaagaattgcctcctgcccctgagagagtacttcaagtatttcagccagaatagtctgcccctgggaggcagcggcggcggcgccctggtgacatttgaggacgtcgccgtgcggttcacccaggaggaatgggctctgctggatccttctcagaaaatcctgtaccgggacgtgatgagagagacataccggaatctgacctccgtgggcatcaactgggaatgttgggaccttgaagcctgcttcagaagcctgggaagaaacctgagagtgcaggtggtgaagagaaagtgcgagctgaccaacagcggcccctgcgccgagggcggcccaagcagcggcgcccctcctcccagcggcggcagcccagccggctccccaacctctaccgaggagggcacctctgagtccgccacccccgagagcggccctggcacctccaccgagcccagcgagggcagcgcacccggcagccctgccggcagccccacctccacagaggagggaaccagcaccgagcccagcgaaggcagcgccccaggcaccagcaccgagcctagtgagcaggagattaaacggatcaacaagatcagaagaagacttgtgaaagacagcaacaccaagaaggccggcaagacaggccccatgaaaaccctgctggttagagtgatgacacccgatctgagagagcggctggaaaacctgagaaagaagcctgaaaatatcccccagcccatcagcaatacatctagagccaacctgaataagctgctgaccgattacaccgaaatgaagaaggcgatcctgcatgtgtactgggaagagttccagaaggaccctgtgggcctgatgagccgggtggcccagcctgccagcaagaagatcgatcagaacaagctgaaacctgagatggacgagaagggcaacctgaccaccgccggctttgcctgctctcagtgtggccagcccctgttcgtgtacaagctggagcaggtgtctgagaagggcaaggcttacaccaactacttcggacggtgcaatgtggccgagcacgaaaagctgatcctgctggcccagctgaagcccgagaaggatagcgacgaagccgtgacatatagcctgggaaagtttgggcagagggccctggatttctacagcattcatgtgaccaaggagtccacccaccccgtgaagcccctggcccagatcgccggaaacagatacgcctccggacctgtgggaaaggccctgagcgacgcatgtatgggcacaatcgcctccttcctgtctaagtaccaggacatcatcatcgaacaccagaaggtggtgaagggcaaccagaagagactggagagcctgcgggagctggccggcaaggaaaacctggaataccctagcgtgaccctgccacctcagcctcacaccaaggagggcgttgatgcctacaacgaagtgatcgcccgggtgcgaatgtgggtgaacctgaacctgtggcagaagctgaagctaagcagagatgatgccaagcctctgctgagactgaagggattcccttcctttcctctggtcgagagacaggccaacgaagtggactggtgggacatggtgtgtaacgtgaagaagctgatcaacgagaaaaaggaggatggcaaggtgttttggcagaatctggctggctacaagagacaggaagccctgagaccatacctgagcagcgaggaagatcggaagaagggaaagaaattcgctcggtaccagctgggcgacctgctgctgcacctggaaaagaagcacggcgaggactggggaaaggtgtacgacgaggcctgggagcggattgacaagaaagtggaaggcctgagcaagcacatcaagctggaagaggaacggagaagcgaggacgcccagagcaaggccgccctgaccgactggctgcgggctaaggccagcttcgtgatcgagggcctgaaggaggccgacaaggacgagttctgcagatgcgagctgaagctgcagaagtggtacggggacctgcggggaaagcccttcgccatcgaagccgagaacagcatcctggacatcagcggcttcagcaagcagtacaactgtgccttcatctggcagaaggacggcgtgaagaagctgaacctgtacctgatcatcaactacttcaagggcggcaagctgcggttcaagaagatcaaacctgaagccttcgaagccaacagattctacaccgtgatcaacaaaaagagcggcgagatcgtgcccatggaggtgaacttcaacttcgacgaccccaacctgatcatcctgcctctggcctttggcaagagacagggcagagaattcatctggaacgacctgctgtccctggaaaccggcagcctgaagctggccaacggaagagtgatcgagaagacactgtacaacagaagaacccggcaggatgagcctgccctgttcgtggccctgaccttcgagcggcgggaggtcctggactcctccaatatcaaaccaatgaacctgatcggcgtggcaagaggcgaaaacatccccgccgtgatcgccctgaccgaccccgagggctgcccactgagccggtttaaggatagcctgggaaacccaacccacatcctgagaatcggcgagagctataaggagaagcagcggaccatccaggccaagaaggaggtggagcagcggagagccggcggctacagccggaagtacgccagcaaagccaagaatctggcagacgatatggtgagaaacaccgctagagatctgctgtactacgccgtgacccaggatgccatgctgatcttcgccaacctgagccggggcttcggccggcagggcaagcggaccttcatggccgagagacagtacacacggatggaggactggctgaccgccaagctggcctacgagggcctgagcaagacctacctgtccaagacactggcccagtacacctccaagacatgcagcaactgtgggtttaccatcaccagcgccgactacgacagggtgctggagaagctgaagaagacagcaacaggctggatgaccacaattaacggcaaggagctgaaggtggagggccagattacctactacaacagatacaagagacagaacgtagtcaaggacctgtccgtcgagctggatagactgagcgaagaatctgtgaacaacgacatctcctcctggacaaagggcagaagcggagaagctctgagcctcctgaagaaaagattctcccatagacccgtgcaggagaagttcgtgtgcctgaactgcggcttcgagacacacgcagccgagcaagccgccctgaacatcgccagatcctggctgttcctgcggagccaggagtacaagaaataccagacaaacaagacaaccggcaacaccgataagagagccttcgtcgagacctggcagtccttttaccggaagaagcttaaggaggtgtggaaacctgccgtgcggtctggcggatctggcggaggctcctgccaggagaccctgaccttcaaggacgtggccgtggacttcaccagggaggagtggggccacctgggccccgcccagagggacctgtacaaggaggtgatgctggacaactacaggaacctggtgagcctgggcctgcaggtgagcaagcccgacgtgatcttccagctggagaggggcgagagccccagcatgctggagggcaaggacagcagcgacccctgccccgagttcctgagccagggcggcccaagcagcggcgcccctcctcccagcggcggcagcccagccggctccccaacctctaccgaggagggcacctctgagtccgccacccccgagagcggccctggcacctccaccgagcccagcgagggcagcgcacccggcagccctgccggcagccccacctccacagaggagggaaccagcaccgagcccagcgaaggcagcgccccaggcaccagcaccgagcctagtgagcaggagattaaacggatcaacaagatcagaagaagacttgtgaaagacagcaacaccaagaaggccggcaagacaggccccatgaaaaccctgctggttagagtgatgacacccgatctgagagagcggctggaaaacctgagaaagaagcctgaaaatatcccccagcccatcagcaatacatctagagccaacctgaataagctgctgaccgattacaccgaaatgaagaaggcgatcctgcatgtgtactgggaagagttccagaaggaccctgtgggcctgatgagccgggtggcccagcctgccagcaagaagatcgatcagaacaagctgaaacctgagatggacgagaagggcaacctgaccaccgccggctttgcctgctctcagtgtggccagcccctgttcgtgtacaagctggagcaggtgtctgagaagggcaaggcttacaccaactacttcggacggtgcaatgtggccgagcacgaaaagctgatcctgctggcccagctgaagcccgagaaggatagcgacgaagccgtgacatatagcctgggaaagtttgggcagagggccctggatttctacagcattcatgtgaccaaggagtccacccaccccgtgaagcccctggcccagatcgccggaaacagatacgcctccggacctgtgggaaaggccctgagcgacgcatgtatgggcacaatcgcctccttcctgtctaagtaccaggacatcatcatcgaacaccagaaggtggtgaagggcaaccagaagagactggagagcctgcgggagctggccggcaaggaaaacctggaataccctagcgtgaccctgccacctcagcctcacaccaaggagggcgttgatgcctacaacgaagtgatcgcccgggtgcgaatgtgggtgaacctgaacctgtggcagaagctgaagctaagcagagatgatgccaagcctctgctgagactgaagggattcccttcctttcctctggtcgagagacaggccaacgaagtggactggtgggacatggtgtgtaacgtgaagaagctgatcaacgagaaaaaggaggatggcaaggtgttttggcagaatctggctggctacaagagacaggaagccctgagaccatacctgagcagcgaggaagatcggaagaagggaaagaaattcgctcggtaccagctgggcgacctgctgctgcacctggaaaagaagcacggcgaggactggggaaaggtgtacgacgaggcctgggagcggattgacaagaaagtggaaggcctgagcaagcacatcaagctggaagaggaacggagaagcgaggacgcccagagcaaggccgccctgaccgactggctgcgggctaaggccagcttcgtgatcgagggcctgaaggaggccgacaaggacgagttctgcagatgcgagctgaagctgcagaagtggtacggggacctgcggggaaagcccttcgccatcgaagccgagaacagcatcctggacatcagcggcttcagcaagcagtacaactgtgccttcatctggcagaaggacggcgtgaagaagctgaacctgtacctgatcatcaactacttcaagggcggcaagctgcggttcaagaagatcaaacctgaagccttcgaagccaacagattctacaccgtgatcaacaaaaagagcggcgagatcgtgcccatggaggtgaacttcaacttcgacgaccccaacctgatcatcctgcctctggcctttggcaagagacagggcagagaattcatctggaacgacctgctgtccctggaaaccggcagcctgaagctggccaacggaagagtgatcgagaagacactgtacaacagaagaacccggcaggatgagcctgccctgttcgtggccctgaccttcgagcggcgggaggtcctggactcctccaatatcaaaccaatgaacctgatcggcgtggcaagaggcgaaaacatccccgccgtgatcgccctgaccgaccccgagggctgcccactgagccggtttaaggatagcctgggaaacccaacccacatcctgagaatcggcgagagctataaggagaagcagcggaccatccaggccaagaaggaggtggagcagcggagagccggcggctacagccggaagtacgccagcaaagccaagaatctggcagacgatatggtgagaaacaccgctagagatctgctgtactacgccgtgacccaggatgccatgctgatcttcgccaacctgagccggggcttcggccggcagggcaagcggaccttcatggccgagagacagtacacacggatggaggactggctgaccgccaagctggcctacgagggcctgagcaagacctacctgtccaagacactggcccagtacacctccaagacatgcagcaactgtgggtttaccatcaccagcgccgactacgacagggtgctggagaagctgaagaagacagcaacaggctggatgaccacaattaacggcaaggagctgaaggtggagggccagattacctactacaacagatacaagagacagaacgtagtcaaggacctgtccgtcgagctggatagactgagcgaagaatctgtgaacaacgacatctcctcctggacaaagggcagaagcggagaagctctgagcctcctgaagaaaagattctcccatagacccgtgcaggagaagttcgtgtgcctgaactgcggcttcgagacacacgcagccgagcaagccgccctgaacatcgccagatcctggctgttcctgcggagccaggagtacaagaaataccagacaaacaagacaaccggcaacaccgataagagagccttcgtcgagacctggcagtccttttaccggaagaagcttaaggaggtgtggaaacctgccgtgcggtctggcggatctggcggaggctccttgccaggagaccctgaccttcaaggacgtggccgtggacttcaccagggaggagtggggccacctgggccccgcccagagggacctgtacaaggaggtgatgctggacaactacaggaacctggtgagcctgggcctgcaggtgagcaagcccgacgtgatcttccagctggagaggggcgagagccccagcatgctggagggcaaggacagcagcgacccctgccccgagttcctgagccagggatctggctccggcagcggccccaagaaaaagagaaaagtctaagctgccttctgcggggcttgccttctggccatgcccttcttctctcccttgcacctgtacctcttggtctttgaataaagcctgagtaggaaggctagcaaaaaaaaaaaaaaaaaaaaaaaaaaaaaaaaaaaaaaaaaaaaaaaaaaaaaaaaaaaaaaaaaaaaaaaaaaaaaaaa

SEQ ID NO: 15718 - RNA, 9485 nt, synthetic construct
  source 1..9485: mol_type = other RNA
aggaaataagagagaaaagaagagtaagaagaaatataagagccaccatggcccctaagaagaagcgtaaagtgagccggatggaacgcctcgtctacgaggtgcggcagaagtgcagaaacatcgaggacatctgcatctcctgcggatctctgaacgtgaccctggagcacccactgttcatcggcggcatgtgccagaactgtaaaaactgttttctggagtgtgcctatcaatacgacgatgacggctaccagagctactgcaccatctgttgcggcggaagagaggtgctgatgtgtggaaataacaactgctgccggtgcttctgcgtggaatgcgtggacctgctggtgggccccggcgccgcccaggccgctattaaggaagatccttggaactgctacatgtgcggccacaagggcacatacggcctgctgagacggagagaggactggcctagcagactgcagatgttcttcgccaataaccacgaccaggagttcgacccccctaaggtgtaccctcccgtccccgccgagaagagaaagcccatccgggtcctgagcctgttcgatggcatcgccaccggtctgctggtgctgaaggacctgggcatccaggtggataggtacattgcctccgaggtgtgcgaggactccatcaccgtgggaatggtgcgtcatcagggcaagatcatgtacgtgggcgacgtgcggagcgtgacacagaagcatatccaggagtggggccctttcgacctggtgatcggcggcagcccttgcaatgacctgagcatcgtgaacccagcccggaagggcctgtacgagggaaccggcagactgttcttcgagttttacagactgctgcacgacgcccggcctaaggaaggcgacgaccggcccttcttttggctgttcgagaatgtggtggccatgggagtcagcgacaagcgggatattagccggttcctggagagcaaccccgtgatgatcgatgccaaggaagtgagcgccgcccaccgggccagatacttctggggcaatctgcctggcatgaacagacccctggccagcaccgtgaacgacaagctggagctgcaggagtgcctggagcacggccggatcgccaagttcagcaaggtgagaaccatcaccacccgaagcaacagcatcaaacaaggcaaggaccagcactttcctgtgttcatgaacgagaaggaggacatcctgtggtgtaccgagatggagagagtgttcgggttcccagtccactacacagatgtcagcaacatgtctagactggccagacagagactgctgggaagaagctggtccgtccctgtgatcagacacctgttcgcccctctgaaggagtacttcgcctgcgtgagcagcggcaacagcaacgccaacagccggggccccagcttctctagcggcctggtgccactgtccctgagagggagccacatgggccccatggagatctacaaaaccgtgagcgcctggaagcggcagcctgtgcgcgtgctgagcctgtttcggaatatcgataaagtcctgaaaagcctgggattcctggagagcggctctggctccggcggtggcaccctgaagtacgtggaggatgtgacaaacgtggtcagacgggatgtggagaagtggggccccttcgatctggtgtacggcagcacccaacccctgggcagctcttgtgaccggtgccctggctggtacatgtttcagttccaccggatcctgcagtacgccctgccgagacaggagtcccagcggccattcttttggattttcatggacaacttgctgctgaccgaggatgaccaggaaactaccactcggttcctgcagaccgaagccgtgaccctgcaggacgtgagaggccgggactaccagaacgccatgcgggtgtggtccaacatccctggactgaaaagcaagcacgcacctctgacccctaaagaagaggagtacctgcaggcccaggtgcggagcagaagcaagctggacgcccctaaggtggatctgctggtgaagaattgcctcctgcccctgagagagtacttcaagtatttcagccagaatagtctgcccctgggaggcagcggcggcggcgccctggtgacatttgaggacgtcgccgtgcggttcacccaggaggaatgggctctgctggatccttctcagaaaatcctgtaccgggacgtgatgagagagacataccggaatctgacctccgtgggcatcaactgggaatgttgggaccttgaagcctgcttcagaagcctgggaagaaacctgagagtgcaggtggtgaagagaaagtgcgagctgaccaacagcggcccctgcgccgagggcggcccaagcagcggcgcccctcctcccagcggcggcagcccagccggctccccaacctctaccgaggagggcacctctgagtccgccacccccgagagcggccctggcacctccaccgagcccagcgagggcagcgcacccggcagccctgccggcagccccacctccacagaggagggaaccagcaccgagcccagcgaaggcagcgccccaggcaccagcaccgagcctagtgagcaggagattaaacggatcaacaagatcagaagaagacttgtgaaagacagcaacaccaagaaggccggcaagacaggccccatgaaaaccctgctggttagagtgatgacacccgatctgagagagcggctggaaaacctgagaaagaagcctgaaaatatcccccagcccatcagcaatacatctagagccaacctgaataagctgctgaccgattacaccgaaatgaagaaggcgatcctgcatgtgtactgggaagagttccagaaggaccctgtgggcctgatgagccgggtggcccagcctgccagcaagaagatcgatcagaacaagctgaaacctgagatggacgagaagggcaacctgaccaccgccggctttgcctgctctcagtgtggccagcccctgttcgtgtacaagctggagcaggtgtctgagaagggcaaggcttacaccaactacttcggacggtgcaatgtggccgagcacgaaaagctgatcctgctggcccagctgaagcccgagaaggatagcgacgaagccgtgacatatagcctgggaaagtttgggcagagggccctggatttctacagcattcatgtgaccaaggagtccacccaccccgtgaagcccctggcccagatcgccggaaacagatacgcctccggacctgtgggaaaggccctgagcgacgcatgtatgggcacaatcgcctccttcctgtctaagtaccaggacatcatcatcgaacaccagaaggtggtgaagggcaaccagaagagactggagagcctgcgggagctggccggcaaggaaaacctggaataccctagcgtgaccctgccacctcagcctcacaccaaggagggcgttgatgcctacaacgaagtgatcgcccgggtgcgaatgtgggtgaacctgaacctgtggcagaagctgaagctaagcagagatgatgccaagcctctgctgagactgaagggattcccttcctttcctctggtcgagagacaggccaacgaagtggactggtgggacatggtgtgtaacgtgaagaagctgatcaacgagaaaaaggaggatggcaaggtgttttggcagaatctggctggctacaagagacaggaagccctgagaccatacctgagcagcgaggaagatcggaagaagggaaagaaattcgctcggtaccagctgggcgacctgctgctgcacctggaaaagaagcacggcgaggactggggaaaggtgtacgacgaggcctgggagcggattgacaagaaagtggaaggcctgagcaagcacatcaagctggaagaggaacggagaagcgaggacgcccagagcaaggccgccctgaccgactggctgcgggctaaggccagcttcgtgatcgagggcctgaaggaggccgacaaggacgagttctgcagatgcgagctgaagctgcagaagtggtacggggacctgcggggaaagcccttcgccatcgaagccgagaacagcatcctggacatcagcggcttcagcaagcagtacaactgtgccttcatctggcagaaggacggcgtgaagaagctgaacctgtacctgatcatcaactacttcaagggcggcaagctgcggttcaagaagatcaaacctgaagccttcgaagccaacagattctacaccgtgatcaacaaaaagagcggcgagatcgtgcccatggaggtgaacttcaacttcgacgaccccaacctgatcatcctgcctctggcctttggcaagagacagggcagagaattcatctggaacgacctgctgtccctggaaaccggcagcctgaagctggccaacggaagagtgatcgagaagacactgtacaacagaagaacccggcaggatgagcctgccctgttcgtggccctgaccttcgagcggcgggaggtcctggactcctccaatatcaaaccaatgaacctgatcggcgtggcaagaggcgaaaacatccccgccgtgatcgccctgaccgaccccgagggctgcccactgagccggtttaaggatagcctgggaaacccaacccacatcctgagaatcggcgagagctataaggagaagcagcggaccatccaggccaagaaggaggtggagcagcggagagccggcggctacagccggaagtacgccagcaaagccaagaatctggcagacgatatggtgagaaacaccgctagagatctgctgtactacgccgtgacccaggatgccatgctgatcttcgccaacctgagccggggcttcggccggcagggcaagcggaccttcatggccgagagacagtacacacggatggaggactggctgaccgccaagctggcctacgagggcctgagcaagacctacctgtccaagacactggcccagtacacctccaagacatgcagcaactgtgggtttaccatcaccagcgccgactacgacagggtgctggagaagctgaagaagacagcaacaggctggatgaccacaattaacggcaaggagctgaaggtggagggccagattacctactacaacagatacaagagacagaacgtagtcaaggacctgtccgtcgagctggatagactgagcgaagaatctgtgaacaacgacatctcctcctggacaaagggcagaagcggagaagctctgagcctcctgaagaaaagattctcccatagacccgtgcaggagaagttcgtgtgcctgaactgcggcttcgagacacacgcagccgagcaagccgccctgaacatcgccagatcctggctgttcctgcggagccaggagtacaagaaataccagacaaacaagacaaccggcaacaccgataagagagccttcgtcgagacctggcagtccttttaccggaagaagcttaaggaggtgtggaaacctgccgtgcggtctggcggatctggcggaggctccaagcccggcgtgctgaccttcgccgacgtggccgtgtacttcagcagcgaggagtggggctgcctgaggcccgcccagagggccctgtacagggacgtgatgagggagacctacggccacctgggcgccctgggctgcgccggccccaagcccgccctgatcagctggctggagaggaacaccgacgactgggagcccgccgccctggacccccaggagtgccccaagagggtgaccgtgcagggcggcccaagcagcggcgcccctcctcccagcggcggcagcccagccggctccccaacctctaccgaggagggcacctctgagtccgccacccccgagagcggccctggcacctccaccgagcccagcgagggcagcgcacccggcagccctgccggcagccccacctccacagaggagggaaccagcaccgagcccagcgaaggcagcgccccaggcaccagcaccgagcctagtgagcaggagattaaacggatcaacaagatcagaagaagacttgtgaaagacagcaacaccaagaaggccggcaagacaggccccatgaaaaccctgctggttagagtgatgacacccgatctgagagagcggctggaaaacctgagaaagaagcctgaaaatatcccccagcccatcagcaatacatctagagccaacctgaataagctgctgaccgattacaccgaaatgaagaaggcgatcctgcatgtgtactgggaagagttccagaaggaccctgtgggcctgatgagccgggtggcccagcctgccagcaagaagatcgatcagaacaagctgaaacctgagatggacgagaagggcaacctgaccaccgccggctttgcctgctctcagtgtggccagcccctgttcgtgtacaagctggagcaggtgtctgagaagggcaaggcttacaccaactacttcggacggtgcaatgtggccgagcacgaaaagctgatcctgctggcccagctgaagcccgagaaggatagcgacgaagccgtgacatatagcctgggaaagtttgggcagagggccctggatttctacagcattcatgtgaccaaggagtccacccaccccgtgaagcccctggcccagatcgccggaaacagatacgcctccggacctgtgggaaaggccctgagcgacgcatgtatgggcacaatcgcctccttcctgtctaagtaccaggacatcatcatcgaacaccagaaggtggtgaagggcaaccagaagagactggagagcctgcgggagctggccggcaaggaaaacctggaataccctagcgtgaccctgccacctcagcctcacaccaaggagggcgttgatgcctacaacgaagtgatcgcccgggtgcgaatgtgggtgaacctgaacctgtggcagaagctgaagctaagcagagatgatgccaagcctctgctgagactgaagggattcccttcctttcctctggtcgagagacaggccaacgaagtggactggtgggacatggtgtgtaacgtgaagaagctgatcaacgagaaaaaggaggatggcaaggtgttttggcagaatctggctggctacaagagacaggaagccctgagaccatacctgagcagcgaggaagatcggaagaagggaaagaaattcgctcggtaccagctgggcgacctgctgctgcacctggaaaagaagcacggcgaggactggggaaaggtgtacgacgaggcctgggagcggattgacaagaaagtggaaggcctgagcaagcacatcaagctggaagaggaacggagaagcgaggacgcccagagcaaggccgccctgaccgactggctgcgggctaaggccagcttcgtgatcgagggcctgaaggaggccgacaaggacgagttctgcagatgcgagctgaagctgcagaagtggtacggggacctgcggggaaagcccttcgccatcgaagccgagaacagcatcctggacatcagcggcttcagcaagcagtacaactgtgccttcatctggcagaaggacggcgtgaagaagctgaacctgtacctgatcatcaactacttcaagggcggcaagctgcggttcaagaagatcaaacctgaagccttcgaagccaacagattctacaccgtgatcaacaaaaagagcggcgagatcgtgcccatggaggtgaacttcaacttcgacgaccccaacctgatcatcctgcctctggcctttggcaagagacagggcagagaattcatctggaacgacctgctgtccctggaaaccggcagcctgaagctggccaacggaagagtgatcgagaagacactgtacaacagaagaacccggcaggatgagcctgccctgttcgtggccctgaccttcgagcggcgggaggtcctggactcctccaatatcaaaccaatgaacctgatcggcgtggcaagaggcgaaaacatccccgccgtgatcgccctgaccgaccccgagggctgcccactgagccggtttaaggatagcctgggaaacccaacccacatcctgagaatcggcgagagctataaggagaagcagcggaccatccaggccaagaaggaggtggagcagcggagagccggcggctacagccggaagtacgccagcaaagccaagaatctggcagacgatatggtgagaaacaccgctagagatctgctgtactacgccgtgacccaggatgccatgctgatcttcgccaacctgagccggggcttcggccggcagggcaagcggaccttcatggccgagagacagtacacacggatggaggactggctgaccgccaagctggcctacgagggcctgagcaagacctacctgtccaagacactggcccagtacacctccaagacatgcagcaactgtgggtttaccatcaccagcgccgactacgacagggtgctggagaagctgaagaagacagcaacaggctggatgaccacaattaacggcaaggagctgaaggtggagggccagattacctactacaacagatacaagagacagaacgtagtcaaggacctgtccgtcgagctggatagactgagcgaagaatctgtgaacaacgacatctcctcctggacaaagggcagaagcggagaagctctgagcctcctgaagaaaagattctcccatagacccgtgcaggagaagttcgtgtgcctgaactgcggcttcgagacacacgcagccgagcaagccgccctgaacatcgccagatcctggctgttcctgcggagccaggagtacaagaaataccagacaaacaagacaaccggcaacaccgataagagagccttcgtcgagacctggcagtccttttaccggaagaagcttaaggaggtgtggaaacctgccgtgcggtctggcggatctggcggaggctcctaagcccggcgtgctgaccttcgccgacgtggccgtgtacttcagcagcgaggagtggggctgcctgaggcccgcccagagggccctgtacagggacgtgatgagggagacctacggccacctgggcgccctgggctgcgccggccccaagcccgccctgatcagctggctggagaggaacaccgacgactgggagcccgccgccctggacccccaggagtgccccaagagggtgaccgtgcagggatctggctccggcagcggccccaagaaaaagagaaaagtctaagctgccttctgcggggcttgccttctggccatgcccttcttctctcccttgcacctgtacctcttggtctttgaataaagcctgagtaggaaggctagcaaaaaaaaaaaaaaaaaaaaaaaaaaaaaaaaaaaaaaaaaaaaaaaaaaaaaaaaaaaaaaaaaaaaaaaaaaaaaaaa

SEQ ID NO: 15719 - RNA, 9485 nt, synthetic construct
  source 1..9485: mol_type = other RNA
aggaaataagagagaaaagaagagtaagaagaaatataagagccaccatggcccctaagaagaagcgtaaagtgagccggatggaacgcctcgtctacgaggtgcggcagaagtgcagaaacatcgaggacatctgcatctcctgcggatctctgaacgtgaccctggagcacccactgttcatcggcggcatgtgccagaactgtaaaaactgttttctggagtgtgcctatcaatacgacgatgacggctaccagagctactgcaccatctgttgcggcggaagagaggtgctgatgtgtggaaataacaactgctgccggtgcttctgcgtggaatgcgtggacctgctggtgggccccggcgccgcccaggccgctattaaggaagatccttggaactgctacatgtgcggccacaagggcacatacggcctgctgagacggagagaggactggcctagcagactgcagatgttcttcgccaataaccacgaccaggagttcgacccccctaaggtgtaccctcccgtccccgccgagaagagaaagcccatccgggtcctgagcctgttcgatggcatcgccaccggtctgctggtgctgaaggacctgggcatccaggtggataggtacattgcctccgaggtgtgcgaggactccatcaccgtgggaatggtgcgtcatcagggcaagatcatgtacgtgggcgacgtgcggagcgtgacacagaagcatatccaggagtggggccctttcgacctggtgatcggcggcagcccttgcaatgacctgagcatcgtgaacccagcccggaagggcctgtacgagggaaccggcagactgttcttcgagttttacagactgctgcacgacgcccggcctaaggaaggcgacgaccggcccttcttttggctgttcgagaatgtggtggccatgggagtcagcgacaagcgggatattagccggttcctggagagcaaccccgtgatgatcgatgccaaggaagtgagcgccgcccaccgggccagatacttctggggcaatctgcctggcatgaacagacccctggccagcaccgtgaacgacaagctggagctgcaggagtgcctggagcacggccggatcgccaagttcagcaaggtgagaaccatcaccacccgaagcaacagcatcaaacaaggcaaggaccagcactttcctgtgttcatgaacgagaaggaggacatcctgtggtgtaccgagatggagagagtgttcgggttcccagtccactacacagatgtcagcaacatgtctagactggccagacagagactgctgggaagaagctggtccgtccctgtgatcagacacctgttcgcccctctgaaggagtacttcgcctgcgtgagcagcggcaacagcaacgccaacagccggggccccagcttctctagcggcctggtgccactgtccctgagagggagccacatgggccccatggagatctacaaaaccgtgagcgcctggaagcggcagcctgtgcgcgtgctgagcctgtttcggaatatcgataaagtcctgaaaagcctgggattcctggagagcggctctggctccggcggtggcaccctgaagtacgtggaggatgtgacaaacgtggtcagacgggatgtggagaagtggggccccttcgatctggtgtacggcagcacccaacccctgggcagctcttgtgaccggtgccctggctggtacatgtttcagttccaccggatcctgcagtacgccctgccgagacaggagtcccagcggccattcttttggattttcatggacaacttgctgctgaccgaggatgaccaggaaactaccactcggttcctgcagaccgaagccgtgaccctgcaggacgtgagaggccgggactaccagaacgccatgcgggtgtggtccaacatccctggactgaaaagcaagcacgcacctctgacccctaaagaagaggagtacctgcaggcccaggtgcggagcagaagcaagctggacgcccctaaggtggatctgctggtgaagaattgcctcctgcccctgagagagtacttcaagtatttcagccagaatagtctgcccctgggaggcagcggcggcggcgccctggtgacatttgaggacgtcgccgtgcggttcacccaggaggaatgggctctgctggatccttctcagaaaatcctgtaccgggacgtgatgagagagacataccggaatctgacctccgtgggcatcaactgggaatgttgggaccttgaagcctgcttcagaagcctgggaagaaacctgagagtgcaggtggtgaagagaaagtgcgagctgaccaacagcggcccctgcgccgagggcggcccaagcagcggcgcccctcctcccagcggcggcagcccagccggctccccaacctctaccgaggagggcacctctgagtccgccacccccgagagcggccctggcacctccaccgagcccagcgagggcagcgcacccggcagccctgccggcagccccacctccacagaggagggaaccagcaccgagcccagcgaaggcagcgccccaggcaccagcaccgagcctagtgagcaggagattaaacggatcaacaagatcagaagaagacttgtgaaagacagcaacaccaagaaggccggcaagacaggccccatgaaaaccctgctggttagagtgatgacacccgatctgagagagcggctggaaaacctgagaaagaagcctgaaaatatcccccagcccatcagcaatacatctagagccaacctgaataagctgctgaccgattacaccgaaatgaagaaggcgatcctgcatgtgtactgggaagagttccagaaggaccctgtgggcctgatgagccgggtggcccagcctgccagcaagaagatcgatcagaacaagctgaaacctgagatggacgagaagggcaacctgaccaccgccggctttgcctgctctcagtgtggccagcccctgttcgtgtacaagctggagcaggtgtctgagaagggcaaggcttacaccaactacttcggacggtgcaatgtggccgagcacgaaaagctgatcctgctggcccagctgaagcccgagaaggatagcgacgaagccgtgacatatagcctgggaaagtttgggcagagggccctggatttctacagcattcatgtgaccaaggagtccacccaccccgtgaagcccctggcccagatcgccggaaacagatacgcctccggacctgtgggaaaggccctgagcgacgcatgtatgggcacaatcgcctccttcctgtctaagtaccaggacatcatcatcgaacaccagaaggtggtgaagggcaaccagaagagactggagagcctgcgggagctggccggcaaggaaaacctggaataccctagcgtgaccctgccacctcagcctcacaccaaggagggcgttgatgcctacaacgaagtgatcgcccgggtgcgaatgtgggtgaacctgaacctgtggcagaagctgaagctaagcagagatgatgccaagcctctgctgagactgaagggattcccttcctttcctctggtcgagagacaggccaacgaagtggactggtgggacatggtgtgtaacgtgaagaagctgatcaacgagaaaaaggaggatggcaaggtgttttggcagaatctggctggctacaagagacaggaagccctgagaccatacctgagcagcgaggaagatcggaagaagggaaagaaattcgctcggtaccagctgggcgacctgctgctgcacctggaaaagaagcacggcgaggactggggaaaggtgtacgacgaggcctgggagcggattgacaagaaagtggaaggcctgagcaagcacatcaagctggaagaggaacggagaagcgaggacgcccagagcaaggccgccctgaccgactggctgcgggctaaggccagcttcgtgatcgagggcctgaaggaggccgacaaggacgagttctgcagatgcgagctgaagctgcagaagtggtacggggacctgcggggaaagcccttcgccatcgaagccgagaacagcatcctggacatcagcggcttcagcaagcagtacaactgtgccttcatctggcagaaggacggcgtgaagaagctgaacctgtacctgatcatcaactacttcaagggcggcaagctgcggttcaagaagatcaaacctgaagccttcgaagccaacagattctacaccgtgatcaacaaaaagagcggcgagatcgtgcccatggaggtgaacttcaacttcgacgaccccaacctgatcatcctgcctctggcctttggcaagagacagggcagagaattcatctggaacgacctgctgtccctggaaaccggcagcctgaagctggccaacggaagagtgatcgagaagacactgtacaacagaagaacccggcaggatgagcctgccctgttcgtggccctgaccttcgagcggcgggaggtcctggactcctccaatatcaaaccaatgaacctgatcggcgtggcaagaggcgaaaacatccccgccgtgatcgccctgaccgaccccgagggctgcccactgagccggtttaaggatagcctgggaaacccaacccacatcctgagaatcggcgagagctataaggagaagcagcggaccatccaggccaagaaggaggtggagcagcggagagccggcggctacagccggaagtacgccagcaaagccaagaatctggcagacgatatggtgagaaacaccgctagagatctgctgtactacgccgtgacccaggatgccatgctgatcttcgccaacctgagccggggcttcggccggcagggcaagcggaccttcatggccgagagacagtacacacggatggaggactggctgaccgccaagctggcctacgagggcctgagcaagacctacctgtccaagacactggcccagtacacctccaagacatgcagcaactgtgggtttaccatcaccagcgccgactacgacagggtgctggagaagctgaagaagacagcaacaggctggatgaccacaattaacggcaaggagctgaaggtggagggccagattacctactacaacagatacaagagacagaacgtagtcaaggacctgtccgtcgagctggatagactgagcgaagaatctgtgaacaacgacatctcctcctggacaaagggcagaagcggagaagctctgagcctcctgaagaaaagattctcccatagacccgtgcaggagaagttcgtgtgcctgaactgcggcttcgagacacacgcagccgagcaagccgccctgaacatcgccagatcctggctgttcctgcggagccaggagtacaagaaataccagacaaacaagacaaccggcaacaccgataagagagccttcgtcgagacctggcagtccttttaccggaagaagcttaaggaggtgtggaaacctgccgtgcggtctggcggatctggcggaggctcccagccccaggaggccgtgaccttcaaggacgtggaggtgaccttcagccaggacgagtggggctggctggacgccagccagaggaacctgtacagggacgtgatgctggagaactacggcaacgtgaccagcctggtgggccccttcaccaagcccgccctgatcagctggctggaggccagggagccctggggcctgaacgtgcagggcgcccaccccaagggcagccccagcgccgcccccggcggcccaagcagcggcgcccctcctcccagcggcggcagcccagccggctccccaacctctaccgaggagggcacctctgagtccgccacccccgagagcggccctggcacctccaccgagcccagcgagggcagcgcacccggcagccctgccggcagccccacctccacagaggagggaaccagcaccgagcccagcgaaggcagcgccccaggcaccagcaccgagcctagtgagcaggagattaaacggatcaacaagatcagaagaagacttgtgaaagacagcaacaccaagaaggccggcaagacaggccccatgaaaaccctgctggttagagtgatgacacccgatctgagagagcggctggaaaacctgagaaagaagcctgaaaatatcccccagcccatcagcaatacatctagagccaacctgaataagctgctgaccgattacaccgaaatgaagaaggcgatcctgcatgtgtactgggaagagttccagaaggaccctgtgggcctgatgagccgggtggcccagcctgccagcaagaagatcgatcagaacaagctgaaacctgagatggacgagaagggcaacctgaccaccgccggctttgcctgctctcagtgtggccagcccctgttcgtgtacaagctggagcaggtgtctgagaagggcaaggcttacaccaactacttcggacggtgcaatgtggccgagcacgaaaagctgatcctgctggcccagctgaagcccgagaaggatagcgacgaagccgtgacatatagcctgggaaagtttgggcagagggccctggatttctacagcattcatgtgaccaaggagtccacccaccccgtgaagcccctggcccagatcgccggaaacagatacgcctccggacctgtgggaaaggccctgagcgacgcatgtatgggcacaatcgcctccttcctgtctaagtaccaggacatcatcatcgaacaccagaaggtggtgaagggcaaccagaagagactggagagcctgcgggagctggccggcaaggaaaacctggaataccctagcgtgaccctgccacctcagcctcacaccaaggagggcgttgatgcctacaacgaagtgatcgcccgggtgcgaatgtgggtgaacctgaacctgtggcagaagctgaagctaagcagagatgatgccaagcctctgctgagactgaagggattcccttcctttcctctggtcgagagacaggccaacgaagtggactggtgggacatggtgtgtaacgtgaagaagctgatcaacgagaaaaaggaggatggcaaggtgttttggcagaatctggctggctacaagagacaggaagccctgagaccatacctgagcagcgaggaagatcggaagaagggaaagaaattcgctcggtaccagctgggcgacctgctgctgcacctggaaaagaagcacggcgaggactggggaaaggtgtacgacgaggcctgggagcggattgacaagaaagtggaaggcctgagcaagcacatcaagctggaagaggaacggagaagcgaggacgcccagagcaaggccgccctgaccgactggctgcgggctaaggccagcttcgtgatcgagggcctgaaggaggccgacaaggacgagttctgcagatgcgagctgaagctgcagaagtggtacggggacctgcggggaaagcccttcgccatcgaagccgagaacagcatcctggacatcagcggcttcagcaagcagtacaactgtgccttcatctggcagaaggacggcgtgaagaagctgaacctgtacctgatcatcaactacttcaagggcggcaagctgcggttcaagaagatcaaacctgaagccttcgaagccaacagattctacaccgtgatcaacaaaaagagcggcgagatcgtgcccatggaggtgaacttcaacttcgacgaccccaacctgatcatcctgcctctggcctttggcaagagacagggcagagaattcatctggaacgacctgctgtccctggaaaccggcagcctgaagctggccaacggaagagtgatcgagaagacactgtacaacagaagaacccggcaggatgagcctgccctgttcgtggccctgaccttcgagcggcgggaggtcctggactcctccaatatcaaaccaatgaacctgatcggcgtggcaagaggcgaaaacatccccgccgtgatcgccctgaccgaccccgagggctgcccactgagccggtttaaggatagcctgggaaacccaacccacatcctgagaatcggcgagagctataaggagaagcagcggaccatccaggccaagaaggaggtggagcagcggagagccggcggctacagccggaagtacgccagcaaagccaagaatctggcagacgatatggtgagaaacaccgctagagatctgctgtactacgccgtgacccaggatgccatgctgatcttcgccaacctgagccggggcttcggccggcagggcaagcggaccttcatggccgagagacagtacacacggatggaggactggctgaccgccaagctggcctacgagggcctgagcaagacctacctgtccaagacactggcccagtacacctccaagacatgcagcaactgtgggtttaccatcaccagcgccgactacgacagggtgctggagaagctgaagaagacagcaacaggctggatgaccacaattaacggcaaggagctgaaggtggagggccagattacctactacaacagatacaagagacagaacgtagtcaaggacctgtccgtcgagctggatagactgagcgaagaatctgtgaacaacgacatctcctcctggacaaagggcagaagcggagaagctctgagcctcctgaagaaaagattctcccatagacccgtgcaggagaagttcgtgtgcctgaactgcggcttcgagacacacgcagccgagcaagccgccctgaacatcgccagatcctggctgttcctgcggagccaggagtacaagaaataccagacaaacaagacaaccggcaacaccgataagagagccttcgtcgagacctggcagtccttttaccggaagaagcttaaggaggtgtggaaacctgccgtgcggtctggcggatctggcggaggctcctcagccccaggaggccgtgaccttcaaggacgtggaggtgaccttcagccaggacgagtggggctggctggacgccagccagaggaacctgtacagggacgtgatgctggagaactacggcaacgtgaccagcctggtgggccccttcaccaagcccgccctgatcagctggctggaggccagggagccctggggcctgaacgtgcagggcgcccaccccaagggcagccccagcgccgcccccggatctggctccggcagcggccccaagaaaaagagaaaagtctaagctgccttctgcggggcttgccttctggccatgcccttcttctctcccttgcacctgtacctcttggtctttgaataaagcctgagtaggaaggctagcaaaaaaaaaaaaaaaaaaaaaaaaaaaaaaaaaaaaaaaaaaaaaaaaaaaaaaaaaaaaaaaaaaaaaaaaaaaaaaaa

SEQ ID NO: 15720 - RNA, 9485 nt, synthetic construct
  source 1..9485: mol_type = other RNA
aggaaataagagagaaaagaagagtaagaagaaatataagagccaccatggcccctaagaagaagcgtaaagtgagccggatggaacgcctcgtctacgaggtgcggcagaagtgcagaaacatcgaggacatctgcatctcctgcggatctctgaacgtgaccctggagcacccactgttcatcggcggcatgtgccagaactgtaaaaactgttttctggagtgtgcctatcaatacgacgatgacggctaccagagctactgcaccatctgttgcggcggaagagaggtgctgatgtgtggaaataacaactgctgccggtgcttctgcgtggaatgcgtggacctgctggtgggccccggcgccgcccaggccgctattaaggaagatccttggaactgctacatgtgcggccacaagggcacatacggcctgctgagacggagagaggactggcctagcagactgcagatgttcttcgccaataaccacgaccaggagttcgacccccctaaggtgtaccctcccgtccccgccgagaagagaaagcccatccgggtcctgagcctgttcgatggcatcgccaccggtctgctggtgctgaaggacctgggcatccaggtggataggtacattgcctccgaggtgtgcgaggactccatcaccgtgggaatggtgcgtcatcagggcaagatcatgtacgtgggcgacgtgcggagcgtgacacagaagcatatccaggagtggggccctttcgacctggtgatcggcggcagcccttgcaatgacctgagcatcgtgaacccagcccggaagggcctgtacgagggaaccggcagactgttcttcgagttttacagactgctgcacgacgcccggcctaaggaaggcgacgaccggcccttcttttggctgttcgagaatgtggtggccatgggagtcagcgacaagcgggatattagccggttcctggagagcaaccccgtgatgatcgatgccaaggaagtgagcgccgcccaccgggccagatacttctggggcaatctgcctggcatgaacagacccctggccagcaccgtgaacgacaagctggagctgcaggagtgcctggagcacggccggatcgccaagttcagcaaggtgagaaccatcaccacccgaagcaacagcatcaaacaaggcaaggaccagcactttcctgtgttcatgaacgagaaggaggacatcctgtggtgtaccgagatggagagagtgttcgggttcccagtccactacacagatgtcagcaacatgtctagactggccagacagagactgctgggaagaagctggtccgtccctgtgatcagacacctgttcgcccctctgaaggagtacttcgcctgcgtgagcagcggcaacagcaacgccaacagccggggccccagcttctctagcggcctggtgccactgtccctgagagggagccacatgggccccatggagatctacaaaaccgtgagcgcctggaagcggcagcctgtgcgcgtgctgagcctgtttcggaatatcgataaagtcctgaaaagcctgggattcctggagagcggctctggctccggcggtggcaccctgaagtacgtggaggatgtgacaaacgtggtcagacgggatgtggagaagtggggccccttcgatctggtgtacggcagcacccaacccctgggcagctcttgtgaccggtgccctggctggtacatgtttcagttccaccggatcctgcagtacgccctgccgagacaggagtcccagcggccattcttttggattttcatggacaacttgctgctgaccgaggatgaccaggaaactaccactcggttcctgcagaccgaagccgtgaccctgcaggacgtgagaggccgggactaccagaacgccatgcgggtgtggtccaacatccctggactgaaaagcaagcacgcacctctgacccctaaagaagaggagtacctgcaggcccaggtgcggagcagaagcaagctggacgcccctaaggtggatctgctggtgaagaattgcctcctgcccctgagagagtacttcaagtatttcagccagaatagtctgcccctgggaggcagcggcggcggcgccctggtgacatttgaggacgtcgccgtgcggttcacccaggaggaatgggctctgctggatccttctcagaaaatcctgtaccgggacgtgatgagagagacataccggaatctgacctccgtgggcatcaactgggaatgttgggaccttgaagcctgcttcagaagcctgggaagaaacctgagagtgcaggtggtgaagagaaagtgcgagctgaccaacagcggcccctgcgccgagggcggcccaagcagcggcgcccctcctcccagcggcggcagcccagccggctccccaacctctaccgaggagggcacctctgagtccgccacccccgagagcggccctggcacctccaccgagcccagcgagggcagcgcacccggcagccctgccggcagccccacctccacagaggagggaaccagcaccgagcccagcgaaggcagcgccccaggcaccagcaccgagcctagtgagcaggagattaaacggatcaacaagatcagaagaagacttgtgaaagacagcaacaccaagaaggccggcaagacaggccccatgaaaaccctgctggttagagtgatgacacccgatctgagagagcggctggaaaacctgagaaagaagcctgaaaatatcccccagcccatcagcaatacatctagagccaacctgaataagctgctgaccgattacaccgaaatgaagaaggcgatcctgcatgtgtactgggaagagttccagaaggaccctgtgggcctgatgagccgggtggcccagcctgccagcaagaagatcgatcagaacaagctgaaacctgagatggacgagaagggcaacctgaccaccgccggctttgcctgctctcagtgtggccagcccctgttcgtgtacaagctggagcaggtgtctgagaagggcaaggcttacaccaactacttcggacggtgcaatgtggccgagcacgaaaagctgatcctgctggcccagctgaagcccgagaaggatagcgacgaagccgtgacatatagcctgggaaagtttgggcagagggccctggatttctacagcattcatgtgaccaaggagtccacccaccccgtgaagcccctggcccagatcgccggaaacagatacgcctccggacctgtgggaaaggccctgagcgacgcatgtatgggcacaatcgcctccttcctgtctaagtaccaggacatcatcatcgaacaccagaaggtggtgaagggcaaccagaagagactggagagcctgcgggagctggccggcaaggaaaacctggaataccctagcgtgaccctgccacctcagcctcacaccaaggagggcgttgatgcctacaacgaagtgatcgcccgggtgcgaatgtgggtgaacctgaacctgtggcagaagctgaagctaagcagagatgatgccaagcctctgctgagactgaagggattcccttcctttcctctggtcgagagacaggccaacgaagtggactggtgggacatggtgtgtaacgtgaagaagctgatcaacgagaaaaaggaggatggcaaggtgttttggcagaatctggctggctacaagagacaggaagccctgagaccatacctgagcagcgaggaagatcggaagaagggaaagaaattcgctcggtaccagctgggcgacctgctgctgcacctggaaaagaagcacggcgaggactggggaaaggtgtacgacgaggcctgggagcggattgacaagaaagtggaaggcctgagcaagcacatcaagctggaagaggaacggagaagcgaggacgcccagagcaaggccgccctgaccgactggctgcgggctaaggccagcttcgtgatcgagggcctgaaggaggccgacaaggacgagttctgcagatgcgagctgaagctgcagaagtggtacggggacctgcggggaaagcccttcgccatcgaagccgagaacagcatcctggacatcagcggcttcagcaagcagtacaactgtgccttcatctggcagaaggacggcgtgaagaagctgaacctgtacctgatcatcaactacttcaagggcggcaagctgcggttcaagaagatcaaacctgaagccttcgaagccaacagattctacaccgtgatcaacaaaaagagcggcgagatcgtgcccatggaggtgaacttcaacttcgacgaccccaacctgatcatcctgcctctggcctttggcaagagacagggcagagaattcatctggaacgacctgctgtccctggaaaccggcagcctgaagctggccaacggaagagtgatcgagaagacactgtacaacagaagaacccggcaggatgagcctgccctgttcgtggccctgaccttcgagcggcgggaggtcctggactcctccaatatcaaaccaatgaacctgatcggcgtggcaagaggcgaaaacatccccgccgtgatcgccctgaccgaccccgagggctgcccactgagccggtttaaggatagcctgggaaacccaacccacatcctgagaatcggcgagagctataaggagaagcagcggaccatccaggccaagaaggaggtggagcagcggagagccggcggctacagccggaagtacgccagcaaagccaagaatctggcagacgatatggtgagaaacaccgctagagatctgctgtactacgccgtgacccaggatgccatgctgatcttcgccaacctgagccggggcttcggccggcagggcaagcggaccttcatggccgagagacagtacacacggatggaggactggctgaccgccaagctggcctacgagggcctgagcaagacctacctgtccaagacactggcccagtacacctccaagacatgcagcaactgtgggtttaccatcaccagcgccgactacgacagggtgctggagaagctgaagaagacagcaacaggctggatgaccacaattaacggcaaggagctgaaggtggagggccagattacctactacaacagatacaagagacagaacgtagtcaaggacctgtccgtcgagctggatagactgagcgaagaatctgtgaacaacgacatctcctcctggacaaagggcagaagcggagaagctctgagcctcctgaagaaaagattctcccatagacccgtgcaggagaagttcgtgtgcctgaactgcggcttcgagacacacgcagccgagcaagccgccctgaacatcgccagatcctggctgttcctgcggagccaggagtacaagaaataccagacaaacaagacaaccggcaacaccgataagagagccttcgtcgagacctggcagtccttttaccggaagaagcttaaggaggtgtggaaacctgccgtgcggtctggcggatctggcggaggctccagccaggagcccgtgaccttcgaggacgtggccgtgtacttcacccagaaccagtgggccagcctggaccccatgcagagggccctgtacctggaggtgatgctggagaactacgccaacatcaccagcctggccctgcccttccccaagcccgacctgatcctgcagctggagcagggcgaggccccctggggcctggacccctggacccccctggacggcgaggccctgggcggcgtgcacggcggcccaagcagcggcgcccctcctcccagcggcggcagcccagccggctccccaacctctaccgaggagggcacctctgagtccgccacccccgagagcggccctggcacctccaccgagcccagcgagggcagcgcacccggcagccctgccggcagccccacctccacagaggagggaaccagcaccgagcccagcgaaggcagcgccccaggcaccagcaccgagcctagtgagcaggagattaaacggatcaacaagatcagaagaagacttgtgaaagacagcaacaccaagaaggccggcaagacaggccccatgaaaaccctgctggttagagtgatgacacccgatctgagagagcggctggaaaacctgagaaagaagcctgaaaatatcccccagcccatcagcaatacatctagagccaacctgaataagctgctgaccgattacaccgaaatgaagaaggcgatcctgcatgtgtactgggaagagttccagaaggaccctgtgggcctgatgagccgggtggcccagcctgccagcaagaagatcgatcagaacaagctgaaacctgagatggacgagaagggcaacctgaccaccgccggctttgcctgctctcagtgtggccagcccctgttcgtgtacaagctggagcaggtgtctgagaagggcaaggcttacaccaactacttcggacggtgcaatgtggccgagcacgaaaagctgatcctgctggcccagctgaagcccgagaaggatagcgacgaagccgtgacatatagcctgggaaagtttgggcagagggccctggatttctacagcattcatgtgaccaaggagtccacccaccccgtgaagcccctggcccagatcgccggaaacagatacgcctccggacctgtgggaaaggccctgagcgacgcatgtatgggcacaatcgcctccttcctgtctaagtaccaggacatcatcatcgaacaccagaaggtggtgaagggcaaccagaagagactggagagcctgcgggagctggccggcaaggaaaacctggaataccctagcgtgaccctgccacctcagcctcacaccaaggagggcgttgatgcctacaacgaagtgatcgcccgggtgcgaatgtgggtgaacctgaacctgtggcagaagctgaagctaagcagagatgatgccaagcctctgctgagactgaagggattcccttcctttcctctggtcgagagacaggccaacgaagtggactggtgggacatggtgtgtaacgtgaagaagctgatcaacgagaaaaaggaggatggcaaggtgttttggcagaatctggctggctacaagagacaggaagccctgagaccatacctgagcagcgaggaagatcggaagaagggaaagaaattcgctcggtaccagctgggcgacctgctgctgcacctggaaaagaagcacggcgaggactggggaaaggtgtacgacgaggcctgggagcggattgacaagaaagtggaaggcctgagcaagcacatcaagctggaagaggaacggagaagcgaggacgcccagagcaaggccgccctgaccgactggctgcgggctaaggccagcttcgtgatcgagggcctgaaggaggccgacaaggacgagttctgcagatgcgagctgaagctgcagaagtggtacggggacctgcggggaaagcccttcgccatcgaagccgagaacagcatcctggacatcagcggcttcagcaagcagtacaactgtgccttcatctggcagaaggacggcgtgaagaagctgaacctgtacctgatcatcaactacttcaagggcggcaagctgcggttcaagaagatcaaacctgaagccttcgaagccaacagattctacaccgtgatcaacaaaaagagcggcgagatcgtgcccatggaggtgaacttcaacttcgacgaccccaacctgatcatcctgcctctggcctttggcaagagacagggcagagaattcatctggaacgacctgctgtccctggaaaccggcagcctgaagctggccaacggaagagtgatcgagaagacactgtacaacagaagaacccggcaggatgagcctgccctgttcgtggccctgaccttcgagcggcgggaggtcctggactcctccaatatcaaaccaatgaacctgatcggcgtggcaagaggcgaaaacatccccgccgtgatcgccctgaccgaccccgagggctgcccactgagccggtttaaggatagcctgggaaacccaacccacatcctgagaatcggcgagagctataaggagaagcagcggaccatccaggccaagaaggaggtggagcagcggagagccggcggctacagccggaagtacgccagcaaagccaagaatctggcagacgatatggtgagaaacaccgctagagatctgctgtactacgccgtgacccaggatgccatgctgatcttcgccaacctgagccggggcttcggccggcagggcaagcggaccttcatggccgagagacagtacacacggatggaggactggctgaccgccaagctggcctacgagggcctgagcaagacctacctgtccaagacactggcccagtacacctccaagacatgcagcaactgtgggtttaccatcaccagcgccgactacgacagggtgctggagaagctgaagaagacagcaacaggctggatgaccacaattaacggcaaggagctgaaggtggagggccagattacctactacaacagatacaagagacagaacgtagtcaaggacctgtccgtcgagctggatagactgagcgaagaatctgtgaacaacgacatctcctcctggacaaagggcagaagcggagaagctctgagcctcctgaagaaaagattctcccatagacccgtgcaggagaagttcgtgtgcctgaactgcggcttcgagacacacgcagccgagcaagccgccctgaacatcgccagatcctggctgttcctgcggagccaggagtacaagaaataccagacaaacaagacaaccggcaacaccgataagagagccttcgtcgagacctggcagtccttttaccggaagaagcttaaggaggtgtggaaacctgccgtgcggtctggcggatctggcggaggctcctagccaggagcccgtgaccttcgaggacgtggccgtgtacttcacccagaaccagtgggccagcctggaccccatgcagagggccctgtacctggaggtgatgctggagaactacgccaacatcaccagcctggccctgcccttccccaagcccgacctgatcctgcagctggagcagggcgaggccccctggggcctggacccctggacccccctggacggcgaggccctgggcggcgtgcacggatctggctccggcagcggccccaagaaaaagagaaaagtctaagctgccttctgcggggcttgccttctggccatgcccttcttctctcccttgcacctgtacctcttggtctttgaataaagcctgagtaggaaggctagcaaaaaaaaaaaaaaaaaaaaaaaaaaaaaaaaaaaaaaaaaaaaaaaaaaaaaaaaaaaaaaaaaaaaaaaaaaaaaaaa

SEQ ID NO: 15721 - RNA, 9485 nt, synthetic construct
  source 1..9485: mol_type = other RNA
aggaaataagagagaaaagaagagtaagaagaaatataagagccaccatggcccctaagaagaagcgtaaagtgagccggatggaacgcctcgtctacgaggtgcggcagaagtgcagaaacatcgaggacatctgcatctcctgcggatctctgaacgtgaccctggagcacccactgttcatcggcggcatgtgccagaactgtaaaaactgttttctggagtgtgcctatcaatacgacgatgacggctaccagagctactgcaccatctgttgcggcggaagagaggtgctgatgtgtggaaataacaactgctgccggtgcttctgcgtggaatgcgtggacctgctggtgggccccggcgccgcccaggccgctattaaggaagatccttggaactgctacatgtgcggccacaagggcacatacggcctgctgagacggagagaggactggcctagcagactgcagatgttcttcgccaataaccacgaccaggagttcgacccccctaaggtgtaccctcccgtccccgccgagaagagaaagcccatccgggtcctgagcctgttcgatggcatcgccaccggtctgctggtgctgaaggacctgggcatccaggtggataggtacattgcctccgaggtgtgcgaggactccatcaccgtgggaatggtgcgtcatcagggcaagatcatgtacgtgggcgacgtgcggagcgtgacacagaagcatatccaggagtggggccctttcgacctggtgatcggcggcagcccttgcaatgacctgagcatcgtgaacccagcccggaagggcctgtacgagggaaccggcagactgttcttcgagttttacagactgctgcacgacgcccggcctaaggaaggcgacgaccggcccttcttttggctgttcgagaatgtggtggccatgggagtcagcgacaagcgggatattagccggttcctggagagcaaccccgtgatgatcgatgccaaggaagtgagcgccgcccaccgggccagatacttctggggcaatctgcctggcatgaacagacccctggccagcaccgtgaacgacaagctggagctgcaggagtgcctggagcacggccggatcgccaagttcagcaaggtgagaaccatcaccacccgaagcaacagcatcaaacaaggcaaggaccagcactttcctgtgttcatgaacgagaaggaggacatcctgtggtgtaccgagatggagagagtgttcgggttcccagtccactacacagatgtcagcaacatgtctagactggccagacagagactgctgggaagaagctggtccgtccctgtgatcagacacctgttcgcccctctgaaggagtacttcgcctgcgtgagcagcggcaacagcaacgccaacagccggggccccagcttctctagcggcctggtgccactgtccctgagagggagccacatgggccccatggagatctacaaaaccgtgagcgcctggaagcggcagcctgtgcgcgtgctgagcctgtttcggaatatcgataaagtcctgaaaagcctgggattcctggagagcggctctggctccggcggtggcaccctgaagtacgtggaggatgtgacaaacgtggtcagacgggatgtggagaagtggggccccttcgatctggtgtacggcagcacccaacccctgggcagctcttgtgaccggtgccctggctggtacatgtttcagttccaccggatcctgcagtacgccctgccgagacaggagtcccagcggccattcttttggattttcatggacaacttgctgctgaccgaggatgaccaggaaactaccactcggttcctgcagaccgaagccgtgaccctgcaggacgtgagaggccgggactaccagaacgccatgcgggtgtggtccaacatccctggactgaaaagcaagcacgcacctctgacccctaaagaagaggagtacctgcaggcccaggtgcggagcagaagcaagctggacgcccctaaggtggatctgctggtgaagaattgcctcctgcccctgagagagtacttcaagtatttcagccagaatagtctgcccctgggaggcagcggcggcggcgccctggtgacatttgaggacgtcgccgtgcggttcacccaggaggaatgggctctgctggatccttctcagaaaatcctgtaccgggacgtgatgagagagacataccggaatctgacctccgtgggcatcaactgggaatgttgggaccttgaagcctgcttcagaagcctgggaagaaacctgagagtgcaggtggtgaagagaaagtgcgagctgaccaacagcggcccctgcgccgagggcggcccaagcagcggcgcccctcctcccagcggcggcagcccagccggctccccaacctctaccgaggagggcacctctgagtccgccacccccgagagcggccctggcacctccaccgagcccagcgagggcagcgcacccggcagccctgccggcagccccacctccacagaggagggaaccagcaccgagcccagcgaaggcagcgccccaggcaccagcaccgagcctagtgagcaggagattaaacggatcaacaagatcagaagaagacttgtgaaagacagcaacaccaagaaggccggcaagacaggccccatgaaaaccctgctggttagagtgatgacacccgatctgagagagcggctggaaaacctgagaaagaagcctgaaaatatcccccagcccatcagcaatacatctagagccaacctgaataagctgctgaccgattacaccgaaatgaagaaggcgatcctgcatgtgtactgggaagagttccagaaggaccctgtgggcctgatgagccgggtggcccagcctgccagcaagaagatcgatcagaacaagctgaaacctgagatggacgagaagggcaacctgaccaccgccggctttgcctgctctcagtgtggccagcccctgttcgtgtacaagctggagcaggtgtctgagaagggcaaggcttacaccaactacttcggacggtgcaatgtggccgagcacgaaaagctgatcctgctggcccagctgaagcccgagaaggatagcgacgaagccgtgacatatagcctgggaaagtttgggcagagggccctggatttctacagcattcatgtgaccaaggagtccacccaccccgtgaagcccctggcccagatcgccggaaacagatacgcctccggacctgtgggaaaggccctgagcgacgcatgtatgggcacaatcgcctccttcctgtctaagtaccaggacatcatcatcgaacaccagaaggtggtgaagggcaaccagaagagactggagagcctgcgggagctggccggcaaggaaaacctggaataccctagcgtgaccctgccacctcagcctcacaccaaggagggcgttgatgcctacaacgaagtgatcgcccgggtgcgaatgtgggtgaacctgaacctgtggcagaagctgaagctaagcagagatgatgccaagcctctgctgagactgaagggattcccttcctttcctctggtcgagagacaggccaacgaagtggactggtgggacatggtgtgtaacgtgaagaagctgatcaacgagaaaaaggaggatggcaaggtgttttggcagaatctggctggctacaagagacaggaagccctgagaccatacctgagcagcgaggaagatcggaagaagggaaagaaattcgctcggtaccagctgggcgacctgctgctgcacctggaaaagaagcacggcgaggactggggaaaggtgtacgacgaggcctgggagcggattgacaagaaagtggaaggcctgagcaagcacatcaagctggaagaggaacggagaagcgaggacgcccagagcaaggccgccctgaccgactggctgcgggctaaggccagcttcgtgatcgagggcctgaaggaggccgacaaggacgagttctgcagatgcgagctgaagctgcagaagtggtacggggacctgcggggaaagcccttcgccatcgaagccgagaacagcatcctggacatcagcggcttcagcaagcagtacaactgtgccttcatctggcagaaggacggcgtgaagaagctgaacctgtacctgatcatcaactacttcaagggcggcaagctgcggttcaagaagatcaaacctgaagccttcgaagccaacagattctacaccgtgatcaacaaaaagagcggcgagatcgtgcccatggaggtgaacttcaacttcgacgaccccaacctgatcatcctgcctctggcctttggcaagagacagggcagagaattcatctggaacgacctgctgtccctggaaaccggcagcctgaagctggccaacggaagagtgatcgagaagacactgtacaacagaagaacccggcaggatgagcctgccctgttcgtggccctgaccttcgagcggcgggaggtcctggactcctccaatatcaaaccaatgaacctgatcggcgtggcaagaggcgaaaacatccccgccgtgatcgccctgaccgaccccgagggctgcccactgagccggtttaaggatagcctgggaaacccaacccacatcctgagaatcggcgagagctataaggagaagcagcggaccatccaggccaagaaggaggtggagcagcggagagccggcggctacagccggaagtacgccagcaaagccaagaatctggcagacgatatggtgagaaacaccgctagagatctgctgtactacgccgtgacccaggatgccatgctgatcttcgccaacctgagccggggcttcggccggcagggcaagcggaccttcatggccgagagacagtacacacggatggaggactggctgaccgccaagctggcctacgagggcctgagcaagacctacctgtccaagacactggcccagtacacctccaagacatgcagcaactgtgggtttaccatcaccagcgccgactacgacagggtgctggagaagctgaagaagacagcaacaggctggatgaccacaattaacggcaaggagctgaaggtggagggccagattacctactacaacagatacaagagacagaacgtagtcaaggacctgtccgtcgagctggatagactgagcgaagaatctgtgaacaacgacatctcctcctggacaaagggcagaagcggagaagctctgagcctcctgaagaaaagattctcccatagacccgtgcaggagaagttcgtgtgcctgaactgcggcttcgagacacacgcagccgagcaagccgccctgaacatcgccagatcctggctgttcctgcggagccaggagtacaagaaataccagacaaacaagacaaccggcaacaccgataagagagccttcgtcgagacctggcagtccttttaccggaagaagcttaaggaggtgtggaaacctgccgtgcggtctggcggatctggcggaggctccgcccagatgctggtgaccttcaaggacgtggccgtgaccttcacccaggaggagtggaggcagctggacctgacccagaggaccctgtacagggaggtgatgctggagacctgcggcctgctggtgagcctgggccacagggtgcccaagcccgagctggtgcacctgctggagcacggccaggagctgtggaccgtgaagaccggcctgagccagcccacctgcgccggcgacaggacccagggcggcccaagcagcggcgcccctcctcccagcggcggcagcccagccggctccccaacctctaccgaggagggcacctctgagtccgccacccccgagagcggccctggcacctccaccgagcccagcgagggcagcgcacccggcagccctgccggcagccccacctccacagaggagggaaccagcaccgagcccagcgaaggcagcgccccaggcaccagcaccgagcctagtgagcaggagattaaacggatcaacaagatcagaagaagacttgtgaaagacagcaacaccaagaaggccggcaagacaggccccatgaaaaccctgctggttagagtgatgacacccgatctgagagagcggctggaaaacctgagaaagaagcctgaaaatatcccccagcccatcagcaatacatctagagccaacctgaataagctgctgaccgattacaccgaaatgaagaaggcgatcctgcatgtgtactgggaagagttccagaaggaccctgtgggcctgatgagccgggtggcccagcctgccagcaagaagatcgatcagaacaagctgaaacctgagatggacgagaagggcaacctgaccaccgccggctttgcctgctctcagtgtggccagcccctgttcgtgtacaagctggagcaggtgtctgagaagggcaaggcttacaccaactacttcggacggtgcaatgtggccgagcacgaaaagctgatcctgctggcccagctgaagcccgagaaggatagcgacgaagccgtgacatatagcctgggaaagtttgggcagagggccctggatttctacagcattcatgtgaccaaggagtccacccaccccgtgaagcccctggcccagatcgccggaaacagatacgcctccggacctgtgggaaaggccctgagcgacgcatgtatgggcacaatcgcctccttcctgtctaagtaccaggacatcatcatcgaacaccagaaggtggtgaagggcaaccagaagagactggagagcctgcgggagctggccggcaaggaaaacctggaataccctagcgtgaccctgccacctcagcctcacaccaaggagggcgttgatgcctacaacgaagtgatcgcccgggtgcgaatgtgggtgaacctgaacctgtggcagaagctgaagctaagcagagatgatgccaagcctctgctgagactgaagggattcccttcctttcctctggtcgagagacaggccaacgaagtggactggtgggacatggtgtgtaacgtgaagaagctgatcaacgagaaaaaggaggatggcaaggtgttttggcagaatctggctggctacaagagacaggaagccctgagaccatacctgagcagcgaggaagatcggaagaagggaaagaaattcgctcggtaccagctgggcgacctgctgctgcacctggaaaagaagcacggcgaggactggggaaaggtgtacgacgaggcctgggagcggattgacaagaaagtggaaggcctgagcaagcacatcaagctggaagaggaacggagaagcgaggacgcccagagcaaggccgccctgaccgactggctgcgggctaaggccagcttcgtgatcgagggcctgaaggaggccgacaaggacgagttctgcagatgcgagctgaagctgcagaagtggtacggggacctgcggggaaagcccttcgccatcgaagccgagaacagcatcctggacatcagcggcttcagcaagcagtacaactgtgccttcatctggcagaaggacggcgtgaagaagctgaacctgtacctgatcatcaactacttcaagggcggcaagctgcggttcaagaagatcaaacctgaagccttcgaagccaacagattctacaccgtgatcaacaaaaagagcggcgagatcgtgcccatggaggtgaacttcaacttcgacgaccccaacctgatcatcctgcctctggcctttggcaagagacagggcagagaattcatctggaacgacctgctgtccctggaaaccggcagcctgaagctggccaacggaagagtgatcgagaagacactgtacaacagaagaacccggcaggatgagcctgccctgttcgtggccctgaccttcgagcggcgggaggtcctggactcctccaatatcaaaccaatgaacctgatcggcgtggcaagaggcgaaaacatccccgccgtgatcgccctgaccgaccccgagggctgcccactgagccggtttaaggatagcctgggaaacccaacccacatcctgagaatcggcgagagctataaggagaagcagcggaccatccaggccaagaaggaggtggagcagcggagagccggcggctacagccggaagtacgccagcaaagccaagaatctggcagacgatatggtgagaaacaccgctagagatctgctgtactacgccgtgacccaggatgccatgctgatcttcgccaacctgagccggggcttcggccggcagggcaagcggaccttcatggccgagagacagtacacacggatggaggactggctgaccgccaagctggcctacgagggcctgagcaagacctacctgtccaagacactggcccagtacacctccaagacatgcagcaactgtgggtttaccatcaccagcgccgactacgacagggtgctggagaagctgaagaagacagcaacaggctggatgaccacaattaacggcaaggagctgaaggtggagggccagattacctactacaacagatacaagagacagaacgtagtcaaggacctgtccgtcgagctggatagactgagcgaagaatctgtgaacaacgacatctcctcctggacaaagggcagaagcggagaagctctgagcctcctgaagaaaagattctcccatagacccgtgcaggagaagttcgtgtgcctgaactgcggcttcgagacacacgcagccgagcaagccgccctgaacatcgccagatcctggctgttcctgcggagccaggagtacaagaaataccagacaaacaagacaaccggcaacaccgataagagagccttcgtcgagacctggcagtccttttaccggaagaagcttaaggaggtgtggaaacctgccgtgcggtctggcggatctggcggaggctcctgcccagatgctggtgaccttcaaggacgtggccgtgaccttcacccaggaggagtggaggcagctggacctgacccagaggaccctgtacagggaggtgatgctggagacctgcggcctgctggtgagcctgggccacagggtgcccaagcccgagctggtgcacctgctggagcacggccaggagctgtggaccgtgaagaccggcctgagccagcccacctgcgccggcgacaggacccagggatctggctccggcagcggccccaagaaaaagagaaaagtctaagctgccttctgcggggcttgccttctggccatgcccttcttctctcccttgcacctgtacctcttggtctttgaataaagcctgagtaggaaggctagcaaaaaaaaaaaaaaaaaaaaaaaaaaaaaaaaaaaaaaaaaaaaaaaaaaaaaaaaaaaaaaaaaaaaaaaaaaaaaaaa

SEQ ID NO: 15722 - RNA, 9485 nt, synthetic construct
  source 1..9485: mol_type = other RNA
aggaaataagagagaaaagaagagtaagaagaaatataagagccaccatggcccctaagaagaagcgtaaagtgagccggatggaacgcctcgtctacgaggtgcggcagaagtgcagaaacatcgaggacatctgcatctcctgcggatctctgaacgtgaccctggagcacccactgttcatcggcggcatgtgccagaactgtaaaaactgttttctggagtgtgcctatcaatacgacgatgacggctaccagagctactgcaccatctgttgcggcggaagagaggtgctgatgtgtggaaataacaactgctgccggtgcttctgcgtggaatgcgtggacctgctggtgggccccggcgccgcccaggccgctattaaggaagatccttggaactgctacatgtgcggccacaagggcacatacggcctgctgagacggagagaggactggcctagcagactgcagatgttcttcgccaataaccacgaccaggagttcgacccccctaaggtgtaccctcccgtccccgccgagaagagaaagcccatccgggtcctgagcctgttcgatggcatcgccaccggtctgctggtgctgaaggacctgggcatccaggtggataggtacattgcctccgaggtgtgcgaggactccatcaccgtgggaatggtgcgtcatcagggcaagatcatgtacgtgggcgacgtgcggagcgtgacacagaagcatatccaggagtggggccctttcgacctggtgatcggcggcagcccttgcaatgacctgagcatcgtgaacccagcccggaagggcctgtacgagggaaccggcagactgttcttcgagttttacagactgctgcacgacgcccggcctaaggaaggcgacgaccggcccttcttttggctgttcgagaatgtggtggccatgggagtcagcgacaagcgggatattagccggttcctggagagcaaccccgtgatgatcgatgccaaggaagtgagcgccgcccaccgggccagatacttctggggcaatctgcctggcatgaacagacccctggccagcaccgtgaacgacaagctggagctgcaggagtgcctggagcacggccggatcgccaagttcagcaaggtgagaaccatcaccacccgaagcaacagcatcaaacaaggcaaggaccagcactttcctgtgttcatgaacgagaaggaggacatcctgtggtgtaccgagatggagagagtgttcgggttcccagtccactacacagatgtcagcaacatgtctagactggccagacagagactgctgggaagaagctggtccgtccctgtgatcagacacctgttcgcccctctgaaggagtacttcgcctgcgtgagcagcggcaacagcaacgccaacagccggggccccagcttctctagcggcctggtgccactgtccctgagagggagccacatgggccccatggagatctacaaaaccgtgagcgcctggaagcggcagcctgtgcgcgtgctgagcctgtttcggaatatcgataaagtcctgaaaagcctgggattcctggagagcggctctggctccggcggtggcaccctgaagtacgtggaggatgtgacaaacgtggtcagacgggatgtggagaagtggggccccttcgatctggtgtacggcagcacccaacccctgggcagctcttgtgaccggtgccctggctggtacatgtttcagttccaccggatcctgcagtacgccctgccgagacaggagtcccagcggccattcttttggattttcatggacaacttgctgctgaccgaggatgaccaggaaactaccactcggttcctgcagaccgaagccgtgaccctgcaggacgtgagaggccgggactaccagaacgccatgcgggtgtggtccaacatccctggactgaaaagcaagcacgcacctctgacccctaaagaagaggagtacctgcaggcccaggtgcggagcagaagcaagctggacgcccctaaggtggatctgctggtgaagaattgcctcctgcccctgagagagtacttcaagtatttcagccagaatagtctgcccctgggaggcagcggcggcggcgccctggtgacatttgaggacgtcgccgtgcggttcacccaggaggaatgggctctgctggatccttctcagaaaatcctgtaccgggacgtgatgagagagacataccggaatctgacctccgtgggcatcaactgggaatgttgggaccttgaagcctgcttcagaagcctgggaagaaacctgagagtgcaggtggtgaagagaaagtgcgagctgaccaacagcggcccctgcgccgagggcggcccaagcagcggcgcccctcctcccagcggcggcagcccagccggctccccaacctctaccgaggagggcacctctgagtccgccacccccgagagcggccctggcacctccaccgagcccagcgagggcagcgcacccggcagccctgccggcagccccacctccacagaggagggaaccagcaccgagcccagcgaaggcagcgccccaggcaccagcaccgagcctagtgagcaggagattaaacggatcaacaagatcagaagaagacttgtgaaagacagcaacaccaagaaggccggcaagacaggccccatgaaaaccctgctggttagagtgatgacacccgatctgagagagcggctggaaaacctgagaaagaagcctgaaaatatcccccagcccatcagcaatacatctagagccaacctgaataagctgctgaccgattacaccgaaatgaagaaggcgatcctgcatgtgtactgggaagagttccagaaggaccctgtgggcctgatgagccgggtggcccagcctgccagcaagaagatcgatcagaacaagctgaaacctgagatggacgagaagggcaacctgaccaccgccggctttgcctgctctcagtgtggccagcccctgttcgtgtacaagctggagcaggtgtctgagaagggcaaggcttacaccaactacttcggacggtgcaatgtggccgagcacgaaaagctgatcctgctggcccagctgaagcccgagaaggatagcgacgaagccgtgacatatagcctgggaaagtttgggcagagggccctggatttctacagcattcatgtgaccaaggagtccacccaccccgtgaagcccctggcccagatcgccggaaacagatacgcctccggacctgtgggaaaggccctgagcgacgcatgtatgggcacaatcgcctccttcctgtctaagtaccaggacatcatcatcgaacaccagaaggtggtgaagggcaaccagaagagactggagagcctgcgggagctggccggcaaggaaaacctggaataccctagcgtgaccctgccacctcagcctcacaccaaggagggcgttgatgcctacaacgaagtgatcgcccgggtgcgaatgtgggtgaacctgaacctgtggcagaagctgaagctaagcagagatgatgccaagcctctgctgagactgaagggattcccttcctttcctctggtcgagagacaggccaacgaagtggactggtgggacatggtgtgtaacgtgaagaagctgatcaacgagaaaaaggaggatggcaaggtgttttggcagaatctggctggctacaagagacaggaagccctgagaccatacctgagcagcgaggaagatcggaagaagggaaagaaattcgctcggtaccagctgggcgacctgctgctgcacctggaaaagaagcacggcgaggactggggaaaggtgtacgacgaggcctgggagcggattgacaagaaagtggaaggcctgagcaagcacatcaagctggaagaggaacggagaagcgaggacgcccagagcaaggccgccctgaccgactggctgcgggctaaggccagcttcgtgatcgagggcctgaaggaggccgacaaggacgagttctgcagatgcgagctgaagctgcagaagtggtacggggacctgcggggaaagcccttcgccatcgaagccgagaacagcatcctggacatcagcggcttcagcaagcagtacaactgtgccttcatctggcagaaggacggcgtgaagaagctgaacctgtacctgatcatcaactacttcaagggcggcaagctgcggttcaagaagatcaaacctgaagccttcgaagccaacagattctacaccgtgatcaacaaaaagagcggcgagatcgtgcccatggaggtgaacttcaacttcgacgaccccaacctgatcatcctgcctctggcctttggcaagagacagggcagagaattcatctggaacgacctgctgtccctggaaaccggcagcctgaagctggccaacggaagagtgatcgagaagacactgtacaacagaagaacccggcaggatgagcctgccctgttcgtggccctgaccttcgagcggcgggaggtcctggactcctccaatatcaaaccaatgaacctgatcggcgtggcaagaggcgaaaacatccccgccgtgatcgccctgaccgaccccgagggctgcccactgagccggtttaaggatagcctgggaaacccaacccacatcctgagaatcggcgagagctataaggagaagcagcggaccatccaggccaagaaggaggtggagcagcggagagccggcggctacagccggaagtacgccagcaaagccaagaatctggcagacgatatggtgagaaacaccgctagagatctgctgtactacgccgtgacccaggatgccatgctgatcttcgccaacctgagccggggcttcggccggcagggcaagcggaccttcatggccgagagacagtacacacggatggaggactggctgaccgccaagctggcctacgagggcctgagcaagacctacctgtccaagacactggcccagtacacctccaagacatgcagcaactgtgggtttaccatcaccagcgccgactacgacagggtgctggagaagctgaagaagacagcaacaggctggatgaccacaattaacggcaaggagctgaaggtggagggccagattacctactacaacagatacaagagacagaacgtagtcaaggacctgtccgtcgagctggatagactgagcgaagaatctgtgaacaacgacatctcctcctggacaaagggcagaagcggagaagctctgagcctcctgaagaaaagattctcccatagacccgtgcaggagaagttcgtgtgcctgaactgcggcttcgagacacacgcagccgagcaagccgccctgaacatcgccagatcctggctgttcctgcggagccaggagtacaagaaataccagacaaacaagacaaccggcaacaccgataagagagccttcgtcgagacctggcagtccttttaccggaagaagcttaaggaggtgtggaaacctgccgtgcggtctggcggatctggcggaggctccagcggcagccaggacgccgtgacctacgaggacgtgcacgtgaacttcacccccgaggagtgggccctgctggacagcagccagaagagcctgtacaaggaggtgatgctggagacctacaggaacctgaccagcatcggctacaagtgggaggacctgaacatcgaggagcactgccagagcagcaggaggctgaagaggtacatcatcggccacagcaggtacaagccctgcgacagggagggcggcccaagcagcggcgcccctcctcccagcggcggcagcccagccggctccccaacctctaccgaggagggcacctctgagtccgccacccccgagagcggccctggcacctccaccgagcccagcgagggcagcgcacccggcagccctgccggcagccccacctccacagaggagggaaccagcaccgagcccagcgaaggcagcgccccaggcaccagcaccgagcctagtgagcaggagattaaacggatcaacaagatcagaagaagacttgtgaaagacagcaacaccaagaaggccggcaagacaggccccatgaaaaccctgctggttagagtgatgacacccgatctgagagagcggctggaaaacctgagaaagaagcctgaaaatatcccccagcccatcagcaatacatctagagccaacctgaataagctgctgaccgattacaccgaaatgaagaaggcgatcctgcatgtgtactgggaagagttccagaaggaccctgtgggcctgatgagccgggtggcccagcctgccagcaagaagatcgatcagaacaagctgaaacctgagatggacgagaagggcaacctgaccaccgccggctttgcctgctctcagtgtggccagcccctgttcgtgtacaagctggagcaggtgtctgagaagggcaaggcttacaccaactacttcggacggtgcaatgtggccgagcacgaaaagctgatcctgctggcccagctgaagcccgagaaggatagcgacgaagccgtgacatatagcctgggaaagtttgggcagagggccctggatttctacagcattcatgtgaccaaggagtccacccaccccgtgaagcccctggcccagatcgccggaaacagatacgcctccggacctgtgggaaaggccctgagcgacgcatgtatgggcacaatcgcctccttcctgtctaagtaccaggacatcatcatcgaacaccagaaggtggtgaagggcaaccagaagagactggagagcctgcgggagctggccggcaaggaaaacctggaataccctagcgtgaccctgccacctcagcctcacaccaaggagggcgttgatgcctacaacgaagtgatcgcccgggtgcgaatgtgggtgaacctgaacctgtggcagaagctgaagctaagcagagatgatgccaagcctctgctgagactgaagggattcccttcctttcctctggtcgagagacaggccaacgaagtggactggtgggacatggtgtgtaacgtgaagaagctgatcaacgagaaaaaggaggatggcaaggtgttttggcagaatctggctggctacaagagacaggaagccctgagaccatacctgagcagcgaggaagatcggaagaagggaaagaaattcgctcggtaccagctgggcgacctgctgctgcacctggaaaagaagcacggcgaggactggggaaaggtgtacgacgaggcctgggagcggattgacaagaaagtggaaggcctgagcaagcacatcaagctggaagaggaacggagaagcgaggacgcccagagcaaggccgccctgaccgactggctgcgggctaaggccagcttcgtgatcgagggcctgaaggaggccgacaaggacgagttctgcagatgcgagctgaagctgcagaagtggtacggggacctgcggggaaagcccttcgccatcgaagccgagaacagcatcctggacatcagcggcttcagcaagcagtacaactgtgccttcatctggcagaaggacggcgtgaagaagctgaacctgtacctgatcatcaactacttcaagggcggcaagctgcggttcaagaagatcaaacctgaagccttcgaagccaacagattctacaccgtgatcaacaaaaagagcggcgagatcgtgcccatggaggtgaacttcaacttcgacgaccccaacctgatcatcctgcctctggcctttggcaagagacagggcagagaattcatctggaacgacctgctgtccctggaaaccggcagcctgaagctggccaacggaagagtgatcgagaagacactgtacaacagaagaacccggcaggatgagcctgccctgttcgtggccctgaccttcgagcggcgggaggtcctggactcctccaatatcaaaccaatgaacctgatcggcgtggcaagaggcgaaaacatccccgccgtgatcgccctgaccgaccccgagggctgcccactgagccggtttaaggatagcctgggaaacccaacccacatcctgagaatcggcgagagctataaggagaagcagcggaccatccaggccaagaaggaggtggagcagcggagagccggcggctacagccggaagtacgccagcaaagccaagaatctggcagacgatatggtgagaaacaccgctagagatctgctgtactacgccgtgacccaggatgccatgctgatcttcgccaacctgagccggggcttcggccggcagggcaagcggaccttcatggccgagagacagtacacacggatggaggactggctgaccgccaagctggcctacgagggcctgagcaagacctacctgtccaagacactggcccagtacacctccaagacatgcagcaactgtgggtttaccatcaccagcgccgactacgacagggtgctggagaagctgaagaagacagcaacaggctggatgaccacaattaacggcaaggagctgaaggtggagggccagattacctactacaacagatacaagagacagaacgtagtcaaggacctgtccgtcgagctggatagactgagcgaagaatctgtgaacaacgacatctcctcctggacaaagggcagaagcggagaagctctgagcctcctgaagaaaagattctcccatagacccgtgcaggagaagttcgtgtgcctgaactgcggcttcgagacacacgcagccgagcaagccgccctgaacatcgccagatcctggctgttcctgcggagccaggagtacaagaaataccagacaaacaagacaaccggcaacaccgataagagagccttcgtcgagacctggcagtccttttaccggaagaagcttaaggaggtgtggaaacctgccgtgcggtctggcggatctggcggaggctcctagcggcagccaggacgccgtgacctacgaggacgtgcacgtgaacttcacccccgaggagtgggccctgctggacagcagccagaagagcctgtacaaggaggtgatgctggagacctacaggaacctgaccagcatcggctacaagtgggaggacctgaacatcgaggagcactgccagagcagcaggaggctgaagaggtacatcatcggccacagcaggtacaagccctgcgacagggagggatctggctccggcagcggccccaagaaaaagagaaaagtctaagctgccttctgcggggcttgccttctggccatgcccttcttctctcccttgcacctgtacctcttggtctttgaataaagcctgagtaggaaggctagcaaaaaaaaaaaaaaaaaaaaaaaaaaaaaaaaaaaaaaaaaaaaaaaaaaaaaaaaaaaaaaaaaaaaaaaaaaaaaaaa

SEQ ID NO: 15723 - RNA, 9485 nt, synthetic construct
  source 1..9485: mol_type = other RNA
aggaaataagagagaaaagaagagtaagaagaaatataagagccaccatggcccctaagaagaagcgtaaagtgagccggatggaacgcctcgtctacgaggtgcggcagaagtgcagaaacatcgaggacatctgcatctcctgcggatctctgaacgtgaccctggagcacccactgttcatcggcggcatgtgccagaactgtaaaaactgttttctggagtgtgcctatcaatacgacgatgacggctaccagagctactgcaccatctgttgcggcggaagagaggtgctgatgtgtggaaataacaactgctgccggtgcttctgcgtggaatgcgtggacctgctggtgggccccggcgccgcccaggccgctattaaggaagatccttggaactgctacatgtgcggccacaagggcacatacggcctgctgagacggagagaggactggcctagcagactgcagatgttcttcgccaataaccacgaccaggagttcgacccccctaaggtgtaccctcccgtccccgccgagaagagaaagcccatccgggtcctgagcctgttcgatggcatcgccaccggtctgctggtgctgaaggacctgggcatccaggtggataggtacattgcctccgaggtgtgcgaggactccatcaccgtgggaatggtgcgtcatcagggcaagatcatgtacgtgggcgacgtgcggagcgtgacacagaagcatatccaggagtggggccctttcgacctggtgatcggcggcagcccttgcaatgacctgagcatcgtgaacccagcccggaagggcctgtacgagggaaccggcagactgttcttcgagttttacagactgctgcacgacgcccggcctaaggaaggcgacgaccggcccttcttttggctgttcgagaatgtggtggccatgggagtcagcgacaagcgggatattagccggttcctggagagcaaccccgtgatgatcgatgccaaggaagtgagcgccgcccaccgggccagatacttctggggcaatctgcctggcatgaacagacccctggccagcaccgtgaacgacaagctggagctgcaggagtgcctggagcacggccggatcgccaagttcagcaaggtgagaaccatcaccacccgaagcaacagcatcaaacaaggcaaggaccagcactttcctgtgttcatgaacgagaaggaggacatcctgtggtgtaccgagatggagagagtgttcgggttcccagtccactacacagatgtcagcaacatgtctagactggccagacagagactgctgggaagaagctggtccgtccctgtgatcagacacctgttcgcccctctgaaggagtacttcgcctgcgtgagcagcggcaacagcaacgccaacagccggggccccagcttctctagcggcctggtgccactgtccctgagagggagccacatgggccccatggagatctacaaaaccgtgagcgcctggaagcggcagcctgtgcgcgtgctgagcctgtttcggaatatcgataaagtcctgaaaagcctgggattcctggagagcggctctggctccggcggtggcaccctgaagtacgtggaggatgtgacaaacgtggtcagacgggatgtggagaagtggggccccttcgatctggtgtacggcagcacccaacccctgggcagctcttgtgaccggtgccctggctggtacatgtttcagttccaccggatcctgcagtacgccctgccgagacaggagtcccagcggccattcttttggattttcatggacaacttgctgctgaccgaggatgaccaggaaactaccactcggttcctgcagaccgaagccgtgaccctgcaggacgtgagaggccgggactaccagaacgccatgcgggtgtggtccaacatccctggactgaaaagcaagcacgcacctctgacccctaaagaagaggagtacctgcaggcccaggtgcggagcagaagcaagctggacgcccctaaggtggatctgctggtgaagaattgcctcctgcccctgagagagtacttcaagtatttcagccagaatagtctgcccctgggaggcagcggcggcggcgccctggtgacatttgaggacgtcgccgtgcggttcacccaggaggaatgggctctgctggatccttctcagaaaatcctgtaccgggacgtgatgagagagacataccggaatctgacctccgtgggcatcaactgggaatgttgggaccttgaagcctgcttcagaagcctgggaagaaacctgagagtgcaggtggtgaagagaaagtgcgagctgaccaacagcggcccctgcgccgagggcggcccaagcagcggcgcccctcctcccagcggcggcagcccagccggctccccaacctctaccgaggagggcacctctgagtccgccacccccgagagcggccctggcacctccaccgagcccagcgagggcagcgcacccggcagccctgccggcagccccacctccacagaggagggaaccagcaccgagcccagcgaaggcagcgccccaggcaccagcaccgagcctagtgagcaggagattaaacggatcaacaagatcagaagaagacttgtgaaagacagcaacaccaagaaggccggcaagacaggccccatgaaaaccctgctggttagagtgatgacacccgatctgagagagcggctggaaaacctgagaaagaagcctgaaaatatcccccagcccatcagcaatacatctagagccaacctgaataagctgctgaccgattacaccgaaatgaagaaggcgatcctgcatgtgtactgggaagagttccagaaggaccctgtgggcctgatgagccgggtggcccagcctgccagcaagaagatcgatcagaacaagctgaaacctgagatggacgagaagggcaacctgaccaccgccggctttgcctgctctcagtgtggccagcccctgttcgtgtacaagctggagcaggtgtctgagaagggcaaggcttacaccaactacttcggacggtgcaatgtggccgagcacgaaaagctgatcctgctggcccagctgaagcccgagaaggatagcgacgaagccgtgacatatagcctgggaaagtttgggcagagggccctggatttctacagcattcatgtgaccaaggagtccacccaccccgtgaagcccctggcccagatcgccggaaacagatacgcctccggacctgtgggaaaggccctgagcgacgcatgtatgggcacaatcgcctccttcctgtctaagtaccaggacatcatcatcgaacaccagaaggtggtgaagggcaaccagaagagactggagagcctgcgggagctggccggcaaggaaaacctggaataccctagcgtgaccctgccacctcagcctcacaccaaggagggcgttgatgcctacaacgaagtgatcgcccgggtgcgaatgtgggtgaacctgaacctgtggcagaagctgaagctaagcagagatgatgccaagcctctgctgagactgaagggattcccttcctttcctctggtcgagagacaggccaacgaagtggactggtgggacatggtgtgtaacgtgaagaagctgatcaacgagaaaaaggaggatggcaaggtgttttggcagaatctggctggctacaagagacaggaagccctgagaccatacctgagcagcgaggaagatcggaagaagggaaagaaattcgctcggtaccagctgggcgacctgctgctgcacctggaaaagaagcacggcgaggactggggaaaggtgtacgacgaggcctgggagcggattgacaagaaagtggaaggcctgagcaagcacatcaagctggaagaggaacggagaagcgaggacgcccagagcaaggccgccctgaccgactggctgcgggctaaggccagcttcgtgatcgagggcctgaaggaggccgacaaggacgagttctgcagatgcgagctgaagctgcagaagtggtacggggacctgcggggaaagcccttcgccatcgaagccgagaacagcatcctggacatcagcggcttcagcaagcagtacaactgtgccttcatctggcagaaggacggcgtgaagaagctgaacctgtacctgatcatcaactacttcaagggcggcaagctgcggttcaagaagatcaaacctgaagccttcgaagccaacagattctacaccgtgatcaacaaaaagagcggcgagatcgtgcccatggaggtgaacttcaacttcgacgaccccaacctgatcatcctgcctctggcctttggcaagagacagggcagagaattcatctggaacgacctgctgtccctggaaaccggcagcctgaagctggccaacggaagagtgatcgagaagacactgtacaacagaagaacccggcaggatgagcctgccctgttcgtggccctgaccttcgagcggcgggaggtcctggactcctccaatatcaaaccaatgaacctgatcggcgtggcaagaggcgaaaacatccccgccgtgatcgccctgaccgaccccgagggctgcccactgagccggtttaaggatagcctgggaaacccaacccacatcctgagaatcggcgagagctataaggagaagcagcggaccatccaggccaagaaggaggtggagcagcggagagccggcggctacagccggaagtacgccagcaaagccaagaatctggcagacgatatggtgagaaacaccgctagagatctgctgtactacgccgtgacccaggatgccatgctgatcttcgccaacctgagccggggcttcggccggcagggcaagcggaccttcatggccgagagacagtacacacggatggaggactggctgaccgccaagctggcctacgagggcctgagcaagacctacctgtccaagacactggcccagtacacctccaagacatgcagcaactgtgggtttaccatcaccagcgccgactacgacagggtgctggagaagctgaagaagacagcaacaggctggatgaccacaattaacggcaaggagctgaaggtggagggccagattacctactacaacagatacaagagacagaacgtagtcaaggacctgtccgtcgagctggatagactgagcgaagaatctgtgaacaacgacatctcctcctggacaaagggcagaagcggagaagctctgagcctcctgaagaaaagattctcccatagacccgtgcaggagaagttcgtgtgcctgaactgcggcttcgagacacacgcagccgagcaagccgccctgaacatcgccagatcctggctgttcctgcggagccaggagtacaagaaataccagacaaacaagacaaccggcaacaccgataagagagccttcgtcgagacctggcagtccttttaccggaagaagcttaaggaggtgtggaaacctgccgtgcggtctggcggatctggcggaggctccccccaggagagcgtggccttcgacgacgtggccgtgtacttcaccaagaaggagtgggccatcatggtgcccgaccagagggccctgtacagggacgtgatgctggagaactacgaggccgtggccttcgtggtgccccccaccagcaagcccgccctgatcagccacctggagcagggcaaggagccctgcttcacccagccccagggcgtgctgagcaggagggactggagggccggcttcggcggcccaagcagcggcgcccctcctcccagcggcggcagcccagccggctccccaacctctaccgaggagggcacctctgagtccgccacccccgagagcggccctggcacctccaccgagcccagcgagggcagcgcacccggcagccctgccggcagccccacctccacagaggagggaaccagcaccgagcccagcgaaggcagcgccccaggcaccagcaccgagcctagtgagcaggagattaaacggatcaacaagatcagaagaagacttgtgaaagacagcaacaccaagaaggccggcaagacaggccccatgaaaaccctgctggttagagtgatgacacccgatctgagagagcggctggaaaacctgagaaagaagcctgaaaatatcccccagcccatcagcaatacatctagagccaacctgaataagctgctgaccgattacaccgaaatgaagaaggcgatcctgcatgtgtactgggaagagttccagaaggaccctgtgggcctgatgagccgggtggcccagcctgccagcaagaagatcgatcagaacaagctgaaacctgagatggacgagaagggcaacctgaccaccgccggctttgcctgctctcagtgtggccagcccctgttcgtgtacaagctggagcaggtgtctgagaagggcaaggcttacaccaactacttcggacggtgcaatgtggccgagcacgaaaagctgatcctgctggcccagctgaagcccgagaaggatagcgacgaagccgtgacatatagcctgggaaagtttgggcagagggccctggatttctacagcattcatgtgaccaaggagtccacccaccccgtgaagcccctggcccagatcgccggaaacagatacgcctccggacctgtgggaaaggccctgagcgacgcatgtatgggcacaatcgcctccttcctgtctaagtaccaggacatcatcatcgaacaccagaaggtggtgaagggcaaccagaagagactggagagcctgcgggagctggccggcaaggaaaacctggaataccctagcgtgaccctgccacctcagcctcacaccaaggagggcgttgatgcctacaacgaagtgatcgcccgggtgcgaatgtgggtgaacctgaacctgtggcagaagctgaagctaagcagagatgatgccaagcctctgctgagactgaagggattcccttcctttcctctggtcgagagacaggccaacgaagtggactggtgggacatggtgtgtaacgtgaagaagctgatcaacgagaaaaaggaggatggcaaggtgttttggcagaatctggctggctacaagagacaggaagccctgagaccatacctgagcagcgaggaagatcggaagaagggaaagaaattcgctcggtaccagctgggcgacctgctgctgcacctggaaaagaagcacggcgaggactggggaaaggtgtacgacgaggcctgggagcggattgacaagaaagtggaaggcctgagcaagcacatcaagctggaagaggaacggagaagcgaggacgcccagagcaaggccgccctgaccgactggctgcgggctaaggccagcttcgtgatcgagggcctgaaggaggccgacaaggacgagttctgcagatgcgagctgaagctgcagaagtggtacggggacctgcggggaaagcccttcgccatcgaagccgagaacagcatcctggacatcagcggcttcagcaagcagtacaactgtgccttcatctggcagaaggacggcgtgaagaagctgaacctgtacctgatcatcaactacttcaagggcggcaagctgcggttcaagaagatcaaacctgaagccttcgaagccaacagattctacaccgtgatcaacaaaaagagcggcgagatcgtgcccatggaggtgaacttcaacttcgacgaccccaacctgatcatcctgcctctggcctttggcaagagacagggcagagaattcatctggaacgacctgctgtccctggaaaccggcagcctgaagctggccaacggaagagtgatcgagaagacactgtacaacagaagaacccggcaggatgagcctgccctgttcgtggccctgaccttcgagcggcgggaggtcctggactcctccaatatcaaaccaatgaacctgatcggcgtggcaagaggcgaaaacatccccgccgtgatcgccctgaccgaccccgagggctgcccactgagccggtttaaggatagcctgggaaacccaacccacatcctgagaatcggcgagagctataaggagaagcagcggaccatccaggccaagaaggaggtggagcagcggagagccggcggctacagccggaagtacgccagcaaagccaagaatctggcagacgatatggtgagaaacaccgctagagatctgctgtactacgccgtgacccaggatgccatgctgatcttcgccaacctgagccggggcttcggccggcagggcaagcggaccttcatggccgagagacagtacacacggatggaggactggctgaccgccaagctggcctacgagggcctgagcaagacctacctgtccaagacactggcccagtacacctccaagacatgcagcaactgtgggtttaccatcaccagcgccgactacgacagggtgctggagaagctgaagaagacagcaacaggctggatgaccacaattaacggcaaggagctgaaggtggagggccagattacctactacaacagatacaagagacagaacgtagtcaaggacctgtccgtcgagctggatagactgagcgaagaatctgtgaacaacgacatctcctcctggacaaagggcagaagcggagaagctctgagcctcctgaagaaaagattctcccatagacccgtgcaggagaagttcgtgtgcctgaactgcggcttcgagacacacgcagccgagcaagccgccctgaacatcgccagatcctggctgttcctgcggagccaggagtacaagaaataccagacaaacaagacaaccggcaacaccgataagagagccttcgtcgagacctggcagtccttttaccggaagaagcttaaggaggtgtggaaacctgccgtgcggtctggcggatctggcggaggctcctccccaggagagcgtggccttcgacgacgtggccgtgtacttcaccaagaaggagtgggccatcatggtgcccgaccagagggccctgtacagggacgtgatgctggagaactacgaggccgtggccttcgtggtgccccccaccagcaagcccgccctgatcagccacctggagcagggcaaggagccctgcttcacccagccccagggcgtgctgagcaggagggactggagggccggcttcggatctggctccggcagcggccccaagaaaaagagaaaagtctaagctgccttctgcggggcttgccttctggccatgcccttcttctctcccttgcacctgtacctcttggtctttgaataaagcctgagtaggaaggctagcaaaaaaaaaaaaaaaaaaaaaaaaaaaaaaaaaaaaaaaaaaaaaaaaaaaaaaaaaaaaaaaaaaaaaaaaaaaaaaaa

SEQ ID NO: 15724 - RNA, 9485 nt, synthetic construct
  source 1..9485: mol_type = other RNA
aggaaataagagagaaaagaagagtaagaagaaatataagagccaccatggcccctaagaagaagcgtaaagtgagccggatggaacgcctcgtctacgaggtgcggcagaagtgcagaaacatcgaggacatctgcatctcctgcggatctctgaacgtgaccctggagcacccactgttcatcggcggcatgtgccagaactgtaaaaactgttttctggagtgtgcctatcaatacgacgatgacggctaccagagctactgcaccatctgttgcggcggaagagaggtgctgatgtgtggaaataacaactgctgccggtgcttctgcgtggaatgcgtggacctgctggtgggccccggcgccgcccaggccgctattaaggaagatccttggaactgctacatgtgcggccacaagggcacatacggcctgctgagacggagagaggactggcctagcagactgcagatgttcttcgccaataaccacgaccaggagttcgacccccctaaggtgtaccctcccgtccccgccgagaagagaaagcccatccgggtcctgagcctgttcgatggcatcgccaccggtctgctggtgctgaaggacctgggcatccaggtggataggtacattgcctccgaggtgtgcgaggactccatcaccgtgggaatggtgcgtcatcagggcaagatcatgtacgtgggcgacgtgcggagcgtgacacagaagcatatccaggagtggggccctttcgacctggtgatcggcggcagcccttgcaatgacctgagcatcgtgaacccagcccggaagggcctgtacgagggaaccggcagactgttcttcgagttttacagactgctgcacgacgcccggcctaaggaaggcgacgaccggcccttcttttggctgttcgagaatgtggtggccatgggagtcagcgacaagcgggatattagccggttcctggagagcaaccccgtgatgatcgatgccaaggaagtgagcgccgcccaccgggccagatacttctggggcaatctgcctggcatgaacagacccctggccagcaccgtgaacgacaagctggagctgcaggagtgcctggagcacggccggatcgccaagttcagcaaggtgagaaccatcaccacccgaagcaacagcatcaaacaaggcaaggaccagcactttcctgtgttcatgaacgagaaggaggacatcctgtggtgtaccgagatggagagagtgttcgggttcccagtccactacacagatgtcagcaacatgtctagactggccagacagagactgctgggaagaagctggtccgtccctgtgatcagacacctgttcgcccctctgaaggagtacttcgcctgcgtgagcagcggcaacagcaacgccaacagccggggccccagcttctctagcggcctggtgccactgtccctgagagggagccacatgggccccatggagatctacaaaaccgtgagcgcctggaagcggcagcctgtgcgcgtgctgagcctgtttcggaatatcgataaagtcctgaaaagcctgggattcctggagagcggctctggctccggcggtggcaccctgaagtacgtggaggatgtgacaaacgtggtcagacgggatgtggagaagtggggccccttcgatctggtgtacggcagcacccaacccctgggcagctcttgtgaccggtgccctggctggtacatgtttcagttccaccggatcctgcagtacgccctgccgagacaggagtcccagcggccattcttttggattttcatggacaacttgctgctgaccgaggatgaccaggaaactaccactcggttcctgcagaccgaagccgtgaccctgcaggacgtgagaggccgggactaccagaacgccatgcgggtgtggtccaacatccctggactgaaaagcaagcacgcacctctgacccctaaagaagaggagtacctgcaggcccaggtgcggagcagaagcaagctggacgcccctaaggtggatctgctggtgaagaattgcctcctgcccctgagagagtacttcaagtatttcagccagaatagtctgcccctgggaggcagcggcggcggcgccctggtgacatttgaggacgtcgccgtgcggttcacccaggaggaatgggctctgctggatccttctcagaaaatcctgtaccgggacgtgatgagagagacataccggaatctgacctccgtgggcatcaactgggaatgttgggaccttgaagcctgcttcagaagcctgggaagaaacctgagagtgcaggtggtgaagagaaagtgcgagctgaccaacagcggcccctgcgccgagggcggcccaagcagcggcgcccctcctcccagcggcggcagcccagccggctccccaacctctaccgaggagggcacctctgagtccgccacccccgagagcggccctggcacctccaccgagcccagcgagggcagcgcacccggcagccctgccggcagccccacctccacagaggagggaaccagcaccgagcccagcgaaggcagcgccccaggcaccagcaccgagcctagtgagcaggagattaaacggatcaacaagatcagaagaagacttgtgaaagacagcaacaccaagaaggccggcaagacaggccccatgaaaaccctgctggttagagtgatgacacccgatctgagagagcggctggaaaacctgagaaagaagcctgaaaatatcccccagcccatcagcaatacatctagagccaacctgaataagctgctgaccgattacaccgaaatgaagaaggcgatcctgcatgtgtactgggaagagttccagaaggaccctgtgggcctgatgagccgggtggcccagcctgccagcaagaagatcgatcagaacaagctgaaacctgagatggacgagaagggcaacctgaccaccgccggctttgcctgctctcagtgtggccagcccctgttcgtgtacaagctggagcaggtgtctgagaagggcaaggcttacaccaactacttcggacggtgcaatgtggccgagcacgaaaagctgatcctgctggcccagctgaagcccgagaaggatagcgacgaagccgtgacatatagcctgggaaagtttgggcagagggccctggatttctacagcattcatgtgaccaaggagtccacccaccccgtgaagcccctggcccagatcgccggaaacagatacgcctccggacctgtgggaaaggccctgagcgacgcatgtatgggcacaatcgcctccttcctgtctaagtaccaggacatcatcatcgaacaccagaaggtggtgaagggcaaccagaagagactggagagcctgcgggagctggccggcaaggaaaacctggaataccctagcgtgaccctgccacctcagcctcacaccaaggagggcgttgatgcctacaacgaagtgatcgcccgggtgcgaatgtgggtgaacctgaacctgtggcagaagctgaagctaagcagagatgatgccaagcctctgctgagactgaagggattcccttcctttcctctggtcgagagacaggccaacgaagtggactggtgggacatggtgtgtaacgtgaagaagctgatcaacgagaaaaaggaggatggcaaggtgttttggcagaatctggctggctacaagagacaggaagccctgagaccatacctgagcagcgaggaagatcggaagaagggaaagaaattcgctcggtaccagctgggcgacctgctgctgcacctggaaaagaagcacggcgaggactggggaaaggtgtacgacgaggcctgggagcggattgacaagaaagtggaaggcctgagcaagcacatcaagctggaagaggaacggagaagcgaggacgcccagagcaaggccgccctgaccgactggctgcgggctaaggccagcttcgtgatcgagggcctgaaggaggccgacaaggacgagttctgcagatgcgagctgaagctgcagaagtggtacggggacctgcggggaaagcccttcgccatcgaagccgagaacagcatcctggacatcagcggcttcagcaagcagtacaactgtgccttcatctggcagaaggacggcgtgaagaagctgaacctgtacctgatcatcaactacttcaagggcggcaagctgcggttcaagaagatcaaacctgaagccttcgaagccaacagattctacaccgtgatcaacaaaaagagcggcgagatcgtgcccatggaggtgaacttcaacttcgacgaccccaacctgatcatcctgcctctggcctttggcaagagacagggcagagaattcatctggaacgacctgctgtccctggaaaccggcagcctgaagctggccaacggaagagtgatcgagaagacactgtacaacagaagaacccggcaggatgagcctgccctgttcgtggccctgaccttcgagcggcgggaggtcctggactcctccaatatcaaaccaatgaacctgatcggcgtggcaagaggcgaaaacatccccgccgtgatcgccctgaccgaccccgagggctgcccactgagccggtttaaggatagcctgggaaacccaacccacatcctgagaatcggcgagagctataaggagaagcagcggaccatccaggccaagaaggaggtggagcagcggagagccggcggctacagccggaagtacgccagcaaagccaagaatctggcagacgatatggtgagaaacaccgctagagatctgctgtactacgccgtgacccaggatgccatgctgatcttcgccaacctgagccggggcttcggccggcagggcaagcggaccttcatggccgagagacagtacacacggatggaggactggctgaccgccaagctggcctacgagggcctgagcaagacctacctgtccaagacactggcccagtacacctccaagacatgcagcaactgtgggtttaccatcaccagcgccgactacgacagggtgctggagaagctgaagaagacagcaacaggctggatgaccacaattaacggcaaggagctgaaggtggagggccagattacctactacaacagatacaagagacagaacgtagtcaaggacctgtccgtcgagctggatagactgagcgaagaatctgtgaacaacgacatctcctcctggacaaagggcagaagcggagaagctctgagcctcctgaagaaaagattctcccatagacccgtgcaggagaagttcgtgtgcctgaactgcggcttcgagacacacgcagccgagcaagccgccctgaacatcgccagatcctggctgttcctgcggagccaggagtacaagaaataccagacaaacaagacaaccggcaacaccgataagagagccttcgtcgagacctggcagtccttttaccggaagaagcttaaggaggtgtggaaacctgccgtgcggtctggcggatctggcggaggctccgagatgggcctgctgaccttcagggacatcgccatcgagttcagcctggccgagtggcagtgcctggaccacgcccagaggaacctgtacagggacgtgatgctggagaactacaggaacctggtgagcctgggcgtggccgtgagcaagcccgacctgatcacctgcctggagcacaacaaggagcccaggaacatcaagaggaacgagatggtgagcaagcaccccgtgacctgcagccacggcggcccaagcagcggcgcccctcctcccagcggcggcagcccagccggctccccaacctctaccgaggagggcacctctgagtccgccacccccgagagcggccctggcacctccaccgagcccagcgagggcagcgcacccggcagccctgccggcagccccacctccacagaggagggaaccagcaccgagcccagcgaaggcagcgccccaggcaccagcaccgagcctagtgagcaggagattaaacggatcaacaagatcagaagaagacttgtgaaagacagcaacaccaagaaggccggcaagacaggccccatgaaaaccctgctggttagagtgatgacacccgatctgagagagcggctggaaaacctgagaaagaagcctgaaaatatcccccagcccatcagcaatacatctagagccaacctgaataagctgctgaccgattacaccgaaatgaagaaggcgatcctgcatgtgtactgggaagagttccagaaggaccctgtgggcctgatgagccgggtggcccagcctgccagcaagaagatcgatcagaacaagctgaaacctgagatggacgagaagggcaacctgaccaccgccggctttgcctgctctcagtgtggccagcccctgttcgtgtacaagctggagcaggtgtctgagaagggcaaggcttacaccaactacttcggacggtgcaatgtggccgagcacgaaaagctgatcctgctggcccagctgaagcccgagaaggatagcgacgaagccgtgacatatagcctgggaaagtttgggcagagggccctggatttctacagcattcatgtgaccaaggagtccacccaccccgtgaagcccctggcccagatcgccggaaacagatacgcctccggacctgtgggaaaggccctgagcgacgcatgtatgggcacaatcgcctccttcctgtctaagtaccaggacatcatcatcgaacaccagaaggtggtgaagggcaaccagaagagactggagagcctgcgggagctggccggcaaggaaaacctggaataccctagcgtgaccctgccacctcagcctcacaccaaggagggcgttgatgcctacaacgaagtgatcgcccgggtgcgaatgtgggtgaacctgaacctgtggcagaagctgaagctaagcagagatgatgccaagcctctgctgagactgaagggattcccttcctttcctctggtcgagagacaggccaacgaagtggactggtgggacatggtgtgtaacgtgaagaagctgatcaacgagaaaaaggaggatggcaaggtgttttggcagaatctggctggctacaagagacaggaagccctgagaccatacctgagcagcgaggaagatcggaagaagggaaagaaattcgctcggtaccagctgggcgacctgctgctgcacctggaaaagaagcacggcgaggactggggaaaggtgtacgacgaggcctgggagcggattgacaagaaagtggaaggcctgagcaagcacatcaagctggaagaggaacggagaagcgaggacgcccagagcaaggccgccctgaccgactggctgcgggctaaggccagcttcgtgatcgagggcctgaaggaggccgacaaggacgagttctgcagatgcgagctgaagctgcagaagtggtacggggacctgcggggaaagcccttcgccatcgaagccgagaacagcatcctggacatcagcggcttcagcaagcagtacaactgtgccttcatctggcagaaggacggcgtgaagaagctgaacctgtacctgatcatcaactacttcaagggcggcaagctgcggttcaagaagatcaaacctgaagccttcgaagccaacagattctacaccgtgatcaacaaaaagagcggcgagatcgtgcccatggaggtgaacttcaacttcgacgaccccaacctgatcatcctgcctctggcctttggcaagagacagggcagagaattcatctggaacgacctgctgtccctggaaaccggcagcctgaagctggccaacggaagagtgatcgagaagacactgtacaacagaagaacccggcaggatgagcctgccctgttcgtggccctgaccttcgagcggcgggaggtcctggactcctccaatatcaaaccaatgaacctgatcggcgtggcaagaggcgaaaacatccccgccgtgatcgccctgaccgaccccgagggctgcccactgagccggtttaaggatagcctgggaaacccaacccacatcctgagaatcggcgagagctataaggagaagcagcggaccatccaggccaagaaggaggtggagcagcggagagccggcggctacagccggaagtacgccagcaaagccaagaatctggcagacgatatggtgagaaacaccgctagagatctgctgtactacgccgtgacccaggatgccatgctgatcttcgccaacctgagccggggcttcggccggcagggcaagcggaccttcatggccgagagacagtacacacggatggaggactggctgaccgccaagctggcctacgagggcctgagcaagacctacctgtccaagacactggcccagtacacctccaagacatgcagcaactgtgggtttaccatcaccagcgccgactacgacagggtgctggagaagctgaagaagacagcaacaggctggatgaccacaattaacggcaaggagctgaaggtggagggccagattacctactacaacagatacaagagacagaacgtagtcaaggacctgtccgtcgagctggatagactgagcgaagaatctgtgaacaacgacatctcctcctggacaaagggcagaagcggagaagctctgagcctcctgaagaaaagattctcccatagacccgtgcaggagaagttcgtgtgcctgaactgcggcttcgagacacacgcagccgagcaagccgccctgaacatcgccagatcctggctgttcctgcggagccaggagtacaagaaataccagacaaacaagacaaccggcaacaccgataagagagccttcgtcgagacctggcagtccttttaccggaagaagcttaaggaggtgtggaaacctgccgtgcggtctggcggatctggcggaggctcctgagatgggcctgctgaccttcagggacatcgccatcgagttcagcctggccgagtggcagtgcctggaccacgcccagaggaacctgtacagggacgtgatgctggagaactacaggaacctggtgagcctgggcgtggccgtgagcaagcccgacctgatcacctgcctggagcacaacaaggagcccaggaacatcaagaggaacgagatggtgagcaagcaccccgtgacctgcagccacggatctggctccggcagcggccccaagaaaaagagaaaagtctaagctgccttctgcggggcttgccttctggccatgcccttcttctctcccttgcacctgtacctcttggtctttgaataaagcctgagtaggaaggctagcaaaaaaaaaaaaaaaaaaaaaaaaaaaaaaaaaaaaaaaaaaaaaaaaaaaaaaaaaaaaaaaaaaaaaaaaaaaaaaaa

SEQ ID NO: 15725 - RNA, 9485 nt, synthetic construct
  source 1..9485: mol_type = other RNA
aggaaataagagagaaaagaagagtaagaagaaatataagagccaccatggcccctaagaagaagcgtaaagtgagccggatggaacgcctcgtctacgaggtgcggcagaagtgcagaaacatcgaggacatctgcatctcctgcggatctctgaacgtgaccctggagcacccactgttcatcggcggcatgtgccagaactgtaaaaactgttttctggagtgtgcctatcaatacgacgatgacggctaccagagctactgcaccatctgttgcggcggaagagaggtgctgatgtgtggaaataacaactgctgccggtgcttctgcgtggaatgcgtggacctgctggtgggccccggcgccgcccaggccgctattaaggaagatccttggaactgctacatgtgcggccacaagggcacatacggcctgctgagacggagagaggactggcctagcagactgcagatgttcttcgccaataaccacgaccaggagttcgacccccctaaggtgtaccctcccgtccccgccgagaagagaaagcccatccgggtcctgagcctgttcgatggcatcgccaccggtctgctggtgctgaaggacctgggcatccaggtggataggtacattgcctccgaggtgtgcgaggactccatcaccgtgggaatggtgcgtcatcagggcaagatcatgtacgtgggcgacgtgcggagcgtgacacagaagcatatccaggagtggggccctttcgacctggtgatcggcggcagcccttgcaatgacctgagcatcgtgaacccagcccggaagggcctgtacgagggaaccggcagactgttcttcgagttttacagactgctgcacgacgcccggcctaaggaaggcgacgaccggcccttcttttggctgttcgagaatgtggtggccatgggagtcagcgacaagcgggatattagccggttcctggagagcaaccccgtgatgatcgatgccaaggaagtgagcgccgcccaccgggccagatacttctggggcaatctgcctggcatgaacagacccctggccagcaccgtgaacgacaagctggagctgcaggagtgcctggagcacggccggatcgccaagttcagcaaggtgagaaccatcaccacccgaagcaacagcatcaaacaaggcaaggaccagcactttcctgtgttcatgaacgagaaggaggacatcctgtggtgtaccgagatggagagagtgttcgggttcccagtccactacacagatgtcagcaacatgtctagactggccagacagagactgctgggaagaagctggtccgtccctgtgatcagacacctgttcgcccctctgaaggagtacttcgcctgcgtgagcagcggcaacagcaacgccaacagccggggccccagcttctctagcggcctggtgccactgtccctgagagggagccacatgggccccatggagatctacaaaaccgtgagcgcctggaagcggcagcctgtgcgcgtgctgagcctgtttcggaatatcgataaagtcctgaaaagcctgggattcctggagagcggctctggctccggcggtggcaccctgaagtacgtggaggatgtgacaaacgtggtcagacgggatgtggagaagtggggccccttcgatctggtgtacggcagcacccaacccctgggcagctcttgtgaccggtgccctggctggtacatgtttcagttccaccggatcctgcagtacgccctgccgagacaggagtcccagcggccattcttttggattttcatggacaacttgctgctgaccgaggatgaccaggaaactaccactcggttcctgcagaccgaagccgtgaccctgcaggacgtgagaggccgggactaccagaacgccatgcgggtgtggtccaacatccctggactgaaaagcaagcacgcacctctgacccctaaagaagaggagtacctgcaggcccaggtgcggagcagaagcaagctggacgcccctaaggtggatctgctggtgaagaattgcctcctgcccctgagagagtacttcaagtatttcagccagaatagtctgcccctgggaggcagcggcggcggcgccctggtgacatttgaggacgtcgccgtgcggttcacccaggaggaatgggctctgctggatccttctcagaaaatcctgtaccgggacgtgatgagagagacataccggaatctgacctccgtgggcatcaactgggaatgttgggaccttgaagcctgcttcagaagcctgggaagaaacctgagagtgcaggtggtgaagagaaagtgcgagctgaccaacagcggcccctgcgccgagggcggcccaagcagcggcgcccctcctcccagcggcggcagcccagccggctccccaacctctaccgaggagggcacctctgagtccgccacccccgagagcggccctggcacctccaccgagcccagcgagggcagcgcacccggcagccctgccggcagccccacctccacagaggagggaaccagcaccgagcccagcgaaggcagcgccccaggcaccagcaccgagcctagtgagcaggagattaaacggatcaacaagatcagaagaagacttgtgaaagacagcaacaccaagaaggccggcaagacaggccccatgaaaaccctgctggttagagtgatgacacccgatctgagagagcggctggaaaacctgagaaagaagcctgaaaatatcccccagcccatcagcaatacatctagagccaacctgaataagctgctgaccgattacaccgaaatgaagaaggcgatcctgcatgtgtactgggaagagttccagaaggaccctgtgggcctgatgagccgggtggcccagcctgccagcaagaagatcgatcagaacaagctgaaacctgagatggacgagaagggcaacctgaccaccgccggctttgcctgctctcagtgtggccagcccctgttcgtgtacaagctggagcaggtgtctgagaagggcaaggcttacaccaactacttcggacggtgcaatgtggccgagcacgaaaagctgatcctgctggcccagctgaagcccgagaaggatagcgacgaagccgtgacatatagcctgggaaagtttgggcagagggccctggatttctacagcattcatgtgaccaaggagtccacccaccccgtgaagcccctggcccagatcgccggaaacagatacgcctccggacctgtgggaaaggccctgagcgacgcatgtatgggcacaatcgcctccttcctgtctaagtaccaggacatcatcatcgaacaccagaaggtggtgaagggcaaccagaagagactggagagcctgcgggagctggccggcaaggaaaacctggaataccctagcgtgaccctgccacctcagcctcacaccaaggagggcgttgatgcctacaacgaagtgatcgcccgggtgcgaatgtgggtgaacctgaacctgtggcagaagctgaagctaagcagagatgatgccaagcctctgctgagactgaagggattcccttcctttcctctggtcgagagacaggccaacgaagtggactggtgggacatggtgtgtaacgtgaagaagctgatcaacgagaaaaaggaggatggcaaggtgttttggcagaatctggctggctacaagagacaggaagccctgagaccatacctgagcagcgaggaagatcggaagaagggaaagaaattcgctcggtaccagctgggcgacctgctgctgcacctggaaaagaagcacggcgaggactggggaaaggtgtacgacgaggcctgggagcggattgacaagaaagtggaaggcctgagcaagcacatcaagctggaagaggaacggagaagcgaggacgcccagagcaaggccgccctgaccgactggctgcgggctaaggccagcttcgtgatcgagggcctgaaggaggccgacaaggacgagttctgcagatgcgagctgaagctgcagaagtggtacggggacctgcggggaaagcccttcgccatcgaagccgagaacagcatcctggacatcagcggcttcagcaagcagtacaactgtgccttcatctggcagaaggacggcgtgaagaagctgaacctgtacctgatcatcaactacttcaagggcggcaagctgcggttcaagaagatcaaacctgaagccttcgaagccaacagattctacaccgtgatcaacaaaaagagcggcgagatcgtgcccatggaggtgaacttcaacttcgacgaccccaacctgatcatcctgcctctggcctttggcaagagacagggcagagaattcatctggaacgacctgctgtccctggaaaccggcagcctgaagctggccaacggaagagtgatcgagaagacactgtacaacagaagaacccggcaggatgagcctgccctgttcgtggccctgaccttcgagcggcgggaggtcctggactcctccaatatcaaaccaatgaacctgatcggcgtggcaagaggcgaaaacatccccgccgtgatcgccctgaccgaccccgagggctgcccactgagccggtttaaggatagcctgggaaacccaacccacatcctgagaatcggcgagagctataaggagaagcagcggaccatccaggccaagaaggaggtggagcagcggagagccggcggctacagccggaagtacgccagcaaagccaagaatctggcagacgatatggtgagaaacaccgctagagatctgctgtactacgccgtgacccaggatgccatgctgatcttcgccaacctgagccggggcttcggccggcagggcaagcggaccttcatggccgagagacagtacacacggatggaggactggctgaccgccaagctggcctacgagggcctgagcaagacctacctgtccaagacactggcccagtacacctccaagacatgcagcaactgtgggtttaccatcaccagcgccgactacgacagggtgctggagaagctgaagaagacagcaacaggctggatgaccacaattaacggcaaggagctgaaggtggagggccagattacctactacaacagatacaagagacagaacgtagtcaaggacctgtccgtcgagctggatagactgagcgaagaatctgtgaacaacgacatctcctcctggacaaagggcagaagcggagaagctctgagcctcctgaagaaaagattctcccatagacccgtgcaggagaagttcgtgtgcctgaactgcggcttcgagacacacgcagccgagcaagccgccctgaacatcgccagatcctggctgttcctgcggagccaggagtacaagaaataccagacaaacaagacaaccggcaacaccgataagagagccttcgtcgagacctggcagtccttttaccggaagaagcttaaggaggtgtggaaacctgccgtgcggtctggcggatctggcggaggctccatggccgacctggtgatgttcagggacgtgaccgtggacttcagccaggaggagtgggagtgcctgaacagcaaccagaggaacctgtacagggacgtgatcctggagaactacagcaacctggtgagcctgggcggctgcagcatcagcaagcccgacgtgatcaccctgctggagcagggcaaggagccctggatggtggtgagggacgagaagaggaggtggaggctggacctggagagcggcggcccaagcagcggcgcccctcctcccagcggcggcagcccagccggctccccaacctctaccgaggagggcacctctgagtccgccacccccgagagcggccctggcacctccaccgagcccagcgagggcagcgcacccggcagccctgccggcagccccacctccacagaggagggaaccagcaccgagcccagcgaaggcagcgccccaggcaccagcaccgagcctagtgagcaggagattaaacggatcaacaagatcagaagaagacttgtgaaagacagcaacaccaagaaggccggcaagacaggccccatgaaaaccctgctggttagagtgatgacacccgatctgagagagcggctggaaaacctgagaaagaagcctgaaaatatcccccagcccatcagcaatacatctagagccaacctgaataagctgctgaccgattacaccgaaatgaagaaggcgatcctgcatgtgtactgggaagagttccagaaggaccctgtgggcctgatgagccgggtggcccagcctgccagcaagaagatcgatcagaacaagctgaaacctgagatggacgagaagggcaacctgaccaccgccggctttgcctgctctcagtgtggccagcccctgttcgtgtacaagctggagcaggtgtctgagaagggcaaggcttacaccaactacttcggacggtgcaatgtggccgagcacgaaaagctgatcctgctggcccagctgaagcccgagaaggatagcgacgaagccgtgacatatagcctgggaaagtttgggcagagggccctggatttctacagcattcatgtgaccaaggagtccacccaccccgtgaagcccctggcccagatcgccggaaacagatacgcctccggacctgtgggaaaggccctgagcgacgcatgtatgggcacaatcgcctccttcctgtctaagtaccaggacatcatcatcgaacaccagaaggtggtgaagggcaaccagaagagactggagagcctgcgggagctggccggcaaggaaaacctggaataccctagcgtgaccctgccacctcagcctcacaccaaggagggcgttgatgcctacaacgaagtgatcgcccgggtgcgaatgtgggtgaacctgaacctgtggcagaagctgaagctaagcagagatgatgccaagcctctgctgagactgaagggattcccttcctttcctctggtcgagagacaggccaacgaagtggactggtgggacatggtgtgtaacgtgaagaagctgatcaacgagaaaaaggaggatggcaaggtgttttggcagaatctggctggctacaagagacaggaagccctgagaccatacctgagcagcgaggaagatcggaagaagggaaagaaattcgctcggtaccagctgggcgacctgctgctgcacctggaaaagaagcacggcgaggactggggaaaggtgtacgacgaggcctgggagcggattgacaagaaagtggaaggcctgagcaagcacatcaagctggaagaggaacggagaagcgaggacgcccagagcaaggccgccctgaccgactggctgcgggctaaggccagcttcgtgatcgagggcctgaaggaggccgacaaggacgagttctgcagatgcgagctgaagctgcagaagtggtacggggacctgcggggaaagcccttcgccatcgaagccgagaacagcatcctggacatcagcggcttcagcaagcagtacaactgtgccttcatctggcagaaggacggcgtgaagaagctgaacctgtacctgatcatcaactacttcaagggcggcaagctgcggttcaagaagatcaaacctgaagccttcgaagccaacagattctacaccgtgatcaacaaaaagagcggcgagatcgtgcccatggaggtgaacttcaacttcgacgaccccaacctgatcatcctgcctctggcctttggcaagagacagggcagagaattcatctggaacgacctgctgtccctggaaaccggcagcctgaagctggccaacggaagagtgatcgagaagacactgtacaacagaagaacccggcaggatgagcctgccctgttcgtggccctgaccttcgagcggcgggaggtcctggactcctccaatatcaaaccaatgaacctgatcggcgtggcaagaggcgaaaacatccccgccgtgatcgccctgaccgaccccgagggctgcccactgagccggtttaaggatagcctgggaaacccaacccacatcctgagaatcggcgagagctataaggagaagcagcggaccatccaggccaagaaggaggtggagcagcggagagccggcggctacagccggaagtacgccagcaaagccaagaatctggcagacgatatggtgagaaacaccgctagagatctgctgtactacgccgtgacccaggatgccatgctgatcttcgccaacctgagccggggcttcggccggcagggcaagcggaccttcatggccgagagacagtacacacggatggaggactggctgaccgccaagctggcctacgagggcctgagcaagacctacctgtccaagacactggcccagtacacctccaagacatgcagcaactgtgggtttaccatcaccagcgccgactacgacagggtgctggagaagctgaagaagacagcaacaggctggatgaccacaattaacggcaaggagctgaaggtggagggccagattacctactacaacagatacaagagacagaacgtagtcaaggacctgtccgtcgagctggatagactgagcgaagaatctgtgaacaacgacatctcctcctggacaaagggcagaagcggagaagctctgagcctcctgaagaaaagattctcccatagacccgtgcaggagaagttcgtgtgcctgaactgcggcttcgagacacacgcagccgagcaagccgccctgaacatcgccagatcctggctgttcctgcggagccaggagtacaagaaataccagacaaacaagacaaccggcaacaccgataagagagccttcgtcgagacctggcagtccttttaccggaagaagcttaaggaggtgtggaaacctgccgtgcggtctggcggatctggcggaggctcctatggccgacctggtgatgttcagggacgtgaccgtggacttcagccaggaggagtgggagtgcctgaacagcaaccagaggaacctgtacagggacgtgatcctggagaactacagcaacctggtgagcctgggcggctgcagcatcagcaagcccgacgtgatcaccctgctggagcagggcaaggagccctggatggtggtgagggacgagaagaggaggtggaggctggacctggagagcggatctggctccggcagcggccccaagaaaaagagaaaagtctaagctgccttctgcggggcttgccttctggccatgcccttcttctctcccttgcacctgtacctcttggtctttgaataaagcctgagtaggaaggctagcaaaaaaaaaaaaaaaaaaaaaaaaaaaaaaaaaaaaaaaaaaaaaaaaaaaaaaaaaaaaaaaaaaaaaaaaaaaaaaaa

SEQ ID NO: 15726 - RNA, 9485 nt, synthetic construct
  source 1..9485: mol_type = other RNA
aggaaataagagagaaaagaagagtaagaagaaatataagagccaccatggcccctaagaagaagcgtaaagtgagccggatggaacgcctcgtctacgaggtgcggcagaagtgcagaaacatcgaggacatctgcatctcctgcggatctctgaacgtgaccctggagcacccactgttcatcggcggcatgtgccagaactgtaaaaactgttttctggagtgtgcctatcaatacgacgatgacggctaccagagctactgcaccatctgttgcggcggaagagaggtgctgatgtgtggaaataacaactgctgccggtgcttctgcgtggaatgcgtggacctgctggtgggccccggcgccgcccaggccgctattaaggaagatccttggaactgctacatgtgcggccacaagggcacatacggcctgctgagacggagagaggactggcctagcagactgcagatgttcttcgccaataaccacgaccaggagttcgacccccctaaggtgtaccctcccgtccccgccgagaagagaaagcccatccgggtcctgagcctgttcgatggcatcgccaccggtctgctggtgctgaaggacctgggcatccaggtggataggtacattgcctccgaggtgtgcgaggactccatcaccgtgggaatggtgcgtcatcagggcaagatcatgtacgtgggcgacgtgcggagcgtgacacagaagcatatccaggagtggggccctttcgacctggtgatcggcggcagcccttgcaatgacctgagcatcgtgaacccagcccggaagggcctgtacgagggaaccggcagactgttcttcgagttttacagactgctgcacgacgcccggcctaaggaaggcgacgaccggcccttcttttggctgttcgagaatgtggtggccatgggagtcagcgacaagcgggatattagccggttcctggagagcaaccccgtgatgatcgatgccaaggaagtgagcgccgcccaccgggccagatacttctggggcaatctgcctggcatgaacagacccctggccagcaccgtgaacgacaagctggagctgcaggagtgcctggagcacggccggatcgccaagttcagcaaggtgagaaccatcaccacccgaagcaacagcatcaaacaaggcaaggaccagcactttcctgtgttcatgaacgagaaggaggacatcctgtggtgtaccgagatggagagagtgttcgggttcccagtccactacacagatgtcagcaacatgtctagactggccagacagagactgctgggaagaagctggtccgtccctgtgatcagacacctgttcgcccctctgaaggagtacttcgcctgcgtgagcagcggcaacagcaacgccaacagccggggccccagcttctctagcggcctggtgccactgtccctgagagggagccacatgggccccatggagatctacaaaaccgtgagcgcctggaagcggcagcctgtgcgcgtgctgagcctgtttcggaatatcgataaagtcctgaaaagcctgggattcctggagagcggctctggctccggcggtggcaccctgaagtacgtggaggatgtgacaaacgtggtcagacgggatgtggagaagtggggccccttcgatctggtgtacggcagcacccaacccctgggcagctcttgtgaccggtgccctggctggtacatgtttcagttccaccggatcctgcagtacgccctgccgagacaggagtcccagcggccattcttttggattttcatggacaacttgctgctgaccgaggatgaccaggaaactaccactcggttcctgcagaccgaagccgtgaccctgcaggacgtgagaggccgggactaccagaacgccatgcgggtgtggtccaacatccctggactgaaaagcaagcacgcacctctgacccctaaagaagaggagtacctgcaggcccaggtgcggagcagaagcaagctggacgcccctaaggtggatctgctggtgaagaattgcctcctgcccctgagagagtacttcaagtatttcagccagaatagtctgcccctgggaggcagcggcggcggcgccctggtgacatttgaggacgtcgccgtgcggttcacccaggaggaatgggctctgctggatccttctcagaaaatcctgtaccgggacgtgatgagagagacataccggaatctgacctccgtgggcatcaactgggaatgttgggaccttgaagcctgcttcagaagcctgggaagaaacctgagagtgcaggtggtgaagagaaagtgcgagctgaccaacagcggcccctgcgccgagggcggcccaagcagcggcgcccctcctcccagcggcggcagcccagccggctccccaacctctaccgaggagggcacctctgagtccgccacccccgagagcggccctggcacctccaccgagcccagcgagggcagcgcacccggcagccctgccggcagccccacctccacagaggagggaaccagcaccgagcccagcgaaggcagcgccccaggcaccagcaccgagcctagtgagcaggagattaaacggatcaacaagatcagaagaagacttgtgaaagacagcaacaccaagaaggccggcaagacaggccccatgaaaaccctgctggttagagtgatgacacccgatctgagagagcggctggaaaacctgagaaagaagcctgaaaatatcccccagcccatcagcaatacatctagagccaacctgaataagctgctgaccgattacaccgaaatgaagaaggcgatcctgcatgtgtactgggaagagttccagaaggaccctgtgggcctgatgagccgggtggcccagcctgccagcaagaagatcgatcagaacaagctgaaacctgagatggacgagaagggcaacctgaccaccgccggctttgcctgctctcagtgtggccagcccctgttcgtgtacaagctggagcaggtgtctgagaagggcaaggcttacaccaactacttcggacggtgcaatgtggccgagcacgaaaagctgatcctgctggcccagctgaagcccgagaaggatagcgacgaagccgtgacatatagcctgggaaagtttgggcagagggccctggatttctacagcattcatgtgaccaaggagtccacccaccccgtgaagcccctggcccagatcgccggaaacagatacgcctccggacctgtgggaaaggccctgagcgacgcatgtatgggcacaatcgcctccttcctgtctaagtaccaggacatcatcatcgaacaccagaaggtggtgaagggcaaccagaagagactggagagcctgcgggagctggccggcaaggaaaacctggaataccctagcgtgaccctgccacctcagcctcacaccaaggagggcgttgatgcctacaacgaagtgatcgcccgggtgcgaatgtgggtgaacctgaacctgtggcagaagctgaagctaagcagagatgatgccaagcctctgctgagactgaagggattcccttcctttcctctggtcgagagacaggccaacgaagtggactggtgggacatggtgtgtaacgtgaagaagctgatcaacgagaaaaaggaggatggcaaggtgttttggcagaatctggctggctacaagagacaggaagccctgagaccatacctgagcagcgaggaagatcggaagaagggaaagaaattcgctcggtaccagctgggcgacctgctgctgcacctggaaaagaagcacggcgaggactggggaaaggtgtacgacgaggcctgggagcggattgacaagaaagtggaaggcctgagcaagcacatcaagctggaagaggaacggagaagcgaggacgcccagagcaaggccgccctgaccgactggctgcgggctaaggccagcttcgtgatcgagggcctgaaggaggccgacaaggacgagttctgcagatgcgagctgaagctgcagaagtggtacggggacctgcggggaaagcccttcgccatcgaagccgagaacagcatcctggacatcagcggcttcagcaagcagtacaactgtgccttcatctggcagaaggacggcgtgaagaagctgaacctgtacctgatcatcaactacttcaagggcggcaagctgcggttcaagaagatcaaacctgaagccttcgaagccaacagattctacaccgtgatcaacaaaaagagcggcgagatcgtgcccatggaggtgaacttcaacttcgacgaccccaacctgatcatcctgcctctggcctttggcaagagacagggcagagaattcatctggaacgacctgctgtccctggaaaccggcagcctgaagctggccaacggaagagtgatcgagaagacactgtacaacagaagaacccggcaggatgagcctgccctgttcgtggccctgaccttcgagcggcgggaggtcctggactcctccaatatcaaaccaatgaacctgatcggcgtggcaagaggcgaaaacatccccgccgtgatcgccctgaccgaccccgagggctgcccactgagccggtttaaggatagcctgggaaacccaacccacatcctgagaatcggcgagagctataaggagaagcagcggaccatccaggccaagaaggaggtggagcagcggagagccggcggctacagccggaagtacgccagcaaagccaagaatctggcagacgatatggtgagaaacaccgctagagatctgctgtactacgccgtgacccaggatgccatgctgatcttcgccaacctgagccggggcttcggccggcagggcaagcggaccttcatggccgagagacagtacacacggatggaggactggctgaccgccaagctggcctacgagggcctgagcaagacctacctgtccaagacactggcccagtacacctccaagacatgcagcaactgtgggtttaccatcaccagcgccgactacgacagggtgctggagaagctgaagaagacagcaacaggctggatgaccacaattaacggcaaggagctgaaggtggagggccagattacctactacaacagatacaagagacagaacgtagtcaaggacctgtccgtcgagctggatagactgagcgaagaatctgtgaacaacgacatctcctcctggacaaagggcagaagcggagaagctctgagcctcctgaagaaaagattctcccatagacccgtgcaggagaagttcgtgtgcctgaactgcggcttcgagacacacgcagccgagcaagccgccctgaacatcgccagatcctggctgttcctgcggagccaggagtacaagaaataccagacaaacaagacaaccggcaacaccgataagagagccttcgtcgagacctggcagtccttttaccggaagaagcttaaggaggtgtggaaacctgccgtgcggtctggcggatctggcggaggctccagcgacgaggccttcagcttcgaggacctgagcgtggacttcacccagaaggagtggcagctgctgaaccccggccagaaggacctgtacaaggacgtgatgctggagaactacagcagcctggtgagcctgggctacgagatcatgaagcccgacgtgatcttcaagctggagcagggcgaggagccctggatcggcgacggcgaggtgcccagcagcggctgccccgccgacatgagctacggcggcccaagcagcggcgcccctcctcccagcggcggcagcccagccggctccccaacctctaccgaggagggcacctctgagtccgccacccccgagagcggccctggcacctccaccgagcccagcgagggcagcgcacccggcagccctgccggcagccccacctccacagaggagggaaccagcaccgagcccagcgaaggcagcgccccaggcaccagcaccgagcctagtgagcaggagattaaacggatcaacaagatcagaagaagacttgtgaaagacagcaacaccaagaaggccggcaagacaggccccatgaaaaccctgctggttagagtgatgacacccgatctgagagagcggctggaaaacctgagaaagaagcctgaaaatatcccccagcccatcagcaatacatctagagccaacctgaataagctgctgaccgattacaccgaaatgaagaaggcgatcctgcatgtgtactgggaagagttccagaaggaccctgtgggcctgatgagccgggtggcccagcctgccagcaagaagatcgatcagaacaagctgaaacctgagatggacgagaagggcaacctgaccaccgccggctttgcctgctctcagtgtggccagcccctgttcgtgtacaagctggagcaggtgtctgagaagggcaaggcttacaccaactacttcggacggtgcaatgtggccgagcacgaaaagctgatcctgctggcccagctgaagcccgagaaggatagcgacgaagccgtgacatatagcctgggaaagtttgggcagagggccctggatttctacagcattcatgtgaccaaggagtccacccaccccgtgaagcccctggcccagatcgccggaaacagatacgcctccggacctgtgggaaaggccctgagcgacgcatgtatgggcacaatcgcctccttcctgtctaagtaccaggacatcatcatcgaacaccagaaggtggtgaagggcaaccagaagagactggagagcctgcgggagctggccggcaaggaaaacctggaataccctagcgtgaccctgccacctcagcctcacaccaaggagggcgttgatgcctacaacgaagtgatcgcccgggtgcgaatgtgggtgaacctgaacctgtggcagaagctgaagctaagcagagatgatgccaagcctctgctgagactgaagggattcccttcctttcctctggtcgagagacaggccaacgaagtggactggtgggacatggtgtgtaacgtgaagaagctgatcaacgagaaaaaggaggatggcaaggtgttttggcagaatctggctggctacaagagacaggaagccctgagaccatacctgagcagcgaggaagatcggaagaagggaaagaaattcgctcggtaccagctgggcgacctgctgctgcacctggaaaagaagcacggcgaggactggggaaaggtgtacgacgaggcctgggagcggattgacaagaaagtggaaggcctgagcaagcacatcaagctggaagaggaacggagaagcgaggacgcccagagcaaggccgccctgaccgactggctgcgggctaaggccagcttcgtgatcgagggcctgaaggaggccgacaaggacgagttctgcagatgcgagctgaagctgcagaagtggtacggggacctgcggggaaagcccttcgccatcgaagccgagaacagcatcctggacatcagcggcttcagcaagcagtacaactgtgccttcatctggcagaaggacggcgtgaagaagctgaacctgtacctgatcatcaactacttcaagggcggcaagctgcggttcaagaagatcaaacctgaagccttcgaagccaacagattctacaccgtgatcaacaaaaagagcggcgagatcgtgcccatggaggtgaacttcaacttcgacgaccccaacctgatcatcctgcctctggcctttggcaagagacagggcagagaattcatctggaacgacctgctgtccctggaaaccggcagcctgaagctggccaacggaagagtgatcgagaagacactgtacaacagaagaacccggcaggatgagcctgccctgttcgtggccctgaccttcgagcggcgggaggtcctggactcctccaatatcaaaccaatgaacctgatcggcgtggcaagaggcgaaaacatccccgccgtgatcgccctgaccgaccccgagggctgcccactgagccggtttaaggatagcctgggaaacccaacccacatcctgagaatcggcgagagctataaggagaagcagcggaccatccaggccaagaaggaggtggagcagcggagagccggcggctacagccggaagtacgccagcaaagccaagaatctggcagacgatatggtgagaaacaccgctagagatctgctgtactacgccgtgacccaggatgccatgctgatcttcgccaacctgagccggggcttcggccggcagggcaagcggaccttcatggccgagagacagtacacacggatggaggactggctgaccgccaagctggcctacgagggcctgagcaagacctacctgtccaagacactggcccagtacacctccaagacatgcagcaactgtgggtttaccatcaccagcgccgactacgacagggtgctggagaagctgaagaagacagcaacaggctggatgaccacaattaacggcaaggagctgaaggtggagggccagattacctactacaacagatacaagagacagaacgtagtcaaggacctgtccgtcgagctggatagactgagcgaagaatctgtgaacaacgacatctcctcctggacaaagggcagaagcggagaagctctgagcctcctgaagaaaagattctcccatagacccgtgcaggagaagttcgtgtgcctgaactgcggcttcgagacacacgcagccgagcaagccgccctgaacatcgccagatcctggctgttcctgcggagccaggagtacaagaaataccagacaaacaagacaaccggcaacaccgataagagagccttcgtcgagacctggcagtccttttaccggaagaagcttaaggaggtgtggaaacctgccgtgcggtctggcggatctggcggaggctcctagcgacgaggccttcagcttcgaggacctgagcgtggacttcacccagaaggagtggcagctgctgaaccccggccagaaggacctgtacaaggacgtgatgctggagaactacagcagcctggtgagcctgggctacgagatcatgaagcccgacgtgatcttcaagctggagcagggcgaggagccctggatcggcgacggcgaggtgcccagcagcggctgccccgccgacatgagctacggatctggctccggcagcggccccaagaaaaagagaaaagtctaagctgccttctgcggggcttgccttctggccatgcccttcttctctcccttgcacctgtacctcttggtctttgaataaagcctgagtaggaaggctagcaaaaaaaaaaaaaaaaaaaaaaaaaaaaaaaaaaaaaaaaaaaaaaaaaaaaaaaaaaaaaaaaaaaaaaaaaaaaaaaa

SEQ ID NO: 15727 - RNA, 9485 nt, synthetic construct
  source 1..9485: mol_type = other RNA
aggaaataagagagaaaagaagagtaagaagaaatataagagccaccatggcccctaagaagaagcgtaaagtgagccggatggaacgcctcgtctacgaggtgcggcagaagtgcagaaacatcgaggacatctgcatctcctgcggatctctgaacgtgaccctggagcacccactgttcatcggcggcatgtgccagaactgtaaaaactgttttctggagtgtgcctatcaatacgacgatgacggctaccagagctactgcaccatctgttgcggcggaagagaggtgctgatgtgtggaaataacaactgctgccggtgcttctgcgtggaatgcgtggacctgctggtgggccccggcgccgcccaggccgctattaaggaagatccttggaactgctacatgtgcggccacaagggcacatacggcctgctgagacggagagaggactggcctagcagactgcagatgttcttcgccaataaccacgaccaggagttcgacccccctaaggtgtaccctcccgtccccgccgagaagagaaagcccatccgggtcctgagcctgttcgatggcatcgccaccggtctgctggtgctgaaggacctgggcatccaggtggataggtacattgcctccgaggtgtgcgaggactccatcaccgtgggaatggtgcgtcatcagggcaagatcatgtacgtgggcgacgtgcggagcgtgacacagaagcatatccaggagtggggccctttcgacctggtgatcggcggcagcccttgcaatgacctgagcatcgtgaacccagcccggaagggcctgtacgagggaaccggcagactgttcttcgagttttacagactgctgcacgacgcccggcctaaggaaggcgacgaccggcccttcttttggctgttcgagaatgtggtggccatgggagtcagcgacaagcgggatattagccggttcctggagagcaaccccgtgatgatcgatgccaaggaagtgagcgccgcccaccgggccagatacttctggggcaatctgcctggcatgaacagacccctggccagcaccgtgaacgacaagctggagctgcaggagtgcctggagcacggccggatcgccaagttcagcaaggtgagaaccatcaccacccgaagcaacagcatcaaacaaggcaaggaccagcactttcctgtgttcatgaacgagaaggaggacatcctgtggtgtaccgagatggagagagtgttcgggttcccagtccactacacagatgtcagcaacatgtctagactggccagacagagactgctgggaagaagctggtccgtccctgtgatcagacacctgttcgcccctctgaaggagtacttcgcctgcgtgagcagcggcaacagcaacgccaacagccggggccccagcttctctagcggcctggtgccactgtccctgagagggagccacatgggccccatggagatctacaaaaccgtgagcgcctggaagcggcagcctgtgcgcgtgctgagcctgtttcggaatatcgataaagtcctgaaaagcctgggattcctggagagcggctctggctccggcggtggcaccctgaagtacgtggaggatgtgacaaacgtggtcagacgggatgtggagaagtggggccccttcgatctggtgtacggcagcacccaacccctgggcagctcttgtgaccggtgccctggctggtacatgtttcagttccaccggatcctgcagtacgccctgccgagacaggagtcccagcggccattcttttggattttcatggacaacttgctgctgaccgaggatgaccaggaaactaccactcggttcctgcagaccgaagccgtgaccctgcaggacgtgagaggccgggactaccagaacgccatgcgggtgtggtccaacatccctggactgaaaagcaagcacgcacctctgacccctaaagaagaggagtacctgcaggcccaggtgcggagcagaagcaagctggacgcccctaaggtggatctgctggtgaagaattgcctcctgcccctgagagagtacttcaagtatttcagccagaatagtctgcccctgggaggcagcggcggcggcgccctggtgacatttgaggacgtcgccgtgcggttcacccaggaggaatgggctctgctggatccttctcagaaaatcctgtaccgggacgtgatgagagagacataccggaatctgacctccgtgggcatcaactgggaatgttgggaccttgaagcctgcttcagaagcctgggaagaaacctgagagtgcaggtggtgaagagaaagtgcgagctgaccaacagcggcccctgcgccgagggcggcccaagcagcggcgcccctcctcccagcggcggcagcccagccggctccccaacctctaccgaggagggcacctctgagtccgccacccccgagagcggccctggcacctccaccgagcccagcgagggcagcgcacccggcagccctgccggcagccccacctccacagaggagggaaccagcaccgagcccagcgaaggcagcgccccaggcaccagcaccgagcctagtgagcaggagattaaacggatcaacaagatcagaagaagacttgtgaaagacagcaacaccaagaaggccggcaagacaggccccatgaaaaccctgctggttagagtgatgacacccgatctgagagagcggctggaaaacctgagaaagaagcctgaaaatatcccccagcccatcagcaatacatctagagccaacctgaataagctgctgaccgattacaccgaaatgaagaaggcgatcctgcatgtgtactgggaagagttccagaaggaccctgtgggcctgatgagccgggtggcccagcctgccagcaagaagatcgatcagaacaagctgaaacctgagatggacgagaagggcaacctgaccaccgccggctttgcctgctctcagtgtggccagcccctgttcgtgtacaagctggagcaggtgtctgagaagggcaaggcttacaccaactacttcggacggtgcaatgtggccgagcacgaaaagctgatcctgctggcccagctgaagcccgagaaggatagcgacgaagccgtgacatatagcctgggaaagtttgggcagagggccctggatttctacagcattcatgtgaccaaggagtccacccaccccgtgaagcccctggcccagatcgccggaaacagatacgcctccggacctgtgggaaaggccctgagcgacgcatgtatgggcacaatcgcctccttcctgtctaagtaccaggacatcatcatcgaacaccagaaggtggtgaagggcaaccagaagagactggagagcctgcgggagctggccggcaaggaaaacctggaataccctagcgtgaccctgccacctcagcctcacaccaaggagggcgttgatgcctacaacgaagtgatcgcccgggtgcgaatgtgggtgaacctgaacctgtggcagaagctgaagctaagcagagatgatgccaagcctctgctgagactgaagggattcccttcctttcctctggtcgagagacaggccaacgaagtggactggtgggacatggtgtgtaacgtgaagaagctgatcaacgagaaaaaggaggatggcaaggtgttttggcagaatctggctggctacaagagacaggaagccctgagaccatacctgagcagcgaggaagatcggaagaagggaaagaaattcgctcggtaccagctgggcgacctgctgctgcacctggaaaagaagcacggcgaggactggggaaaggtgtacgacgaggcctgggagcggattgacaagaaagtggaaggcctgagcaagcacatcaagctggaagaggaacggagaagcgaggacgcccagagcaaggccgccctgaccgactggctgcgggctaaggccagcttcgtgatcgagggcctgaaggaggccgacaaggacgagttctgcagatgcgagctgaagctgcagaagtggtacggggacctgcggggaaagcccttcgccatcgaagccgagaacagcatcctggacatcagcggcttcagcaagcagtacaactgtgccttcatctggcagaaggacggcgtgaagaagctgaacctgtacctgatcatcaactacttcaagggcggcaagctgcggttcaagaagatcaaacctgaagccttcgaagccaacagattctacaccgtgatcaacaaaaagagcggcgagatcgtgcccatggaggtgaacttcaacttcgacgaccccaacctgatcatcctgcctctggcctttggcaagagacagggcagagaattcatctggaacgacctgctgtccctggaaaccggcagcctgaagctggccaacggaagagtgatcgagaagacactgtacaacagaagaacccggcaggatgagcctgccctgttcgtggccctgaccttcgagcggcgggaggtcctggactcctccaatatcaaaccaatgaacctgatcggcgtggcaagaggcgaaaacatccccgccgtgatcgccctgaccgaccccgagggctgcccactgagccggtttaaggatagcctgggaaacccaacccacatcctgagaatcggcgagagctataaggagaagcagcggaccatccaggccaagaaggaggtggagcagcggagagccggcggctacagccggaagtacgccagcaaagccaagaatctggcagacgatatggtgagaaacaccgctagagatctgctgtactacgccgtgacccaggatgccatgctgatcttcgccaacctgagccggggcttcggccggcagggcaagcggaccttcatggccgagagacagtacacacggatggaggactggctgaccgccaagctggcctacgagggcctgagcaagacctacctgtccaagacactggcccagtacacctccaagacatgcagcaactgtgggtttaccatcaccagcgccgactacgacagggtgctggagaagctgaagaagacagcaacaggctggatgaccacaattaacggcaaggagctgaaggtggagggccagattacctactacaacagatacaagagacagaacgtagtcaaggacctgtccgtcgagctggatagactgagcgaagaatctgtgaacaacgacatctcctcctggacaaagggcagaagcggagaagctctgagcctcctgaagaaaagattctcccatagacccgtgcaggagaagttcgtgtgcctgaactgcggcttcgagacacacgcagccgagcaagccgccctgaacatcgccagatcctggctgttcctgcggagccaggagtacaagaaataccagacaaacaagacaaccggcaacaccgataagagagccttcgtcgagacctggcagtccttttaccggaagaagcttaaggaggtgtggaaacctgccgtgcggtctggcggatctggcggaggctccagccagggcagggtgaccttcgaggacgtgaccgtgaacttcacccagggcgagtggcagaggctgaaccccgagcagaggaacctgtacagggacgtgatgctggagaactacagcaacctggtgagcgtgggccagggcgagaccaccaagcccgacgtgatcctgaggctggagcagggcaaggagccctggctggaggaggaggaggtgctgggcagcggcagggccgagaagaacggcggcggcccaagcagcggcgcccctcctcccagcggcggcagcccagccggctccccaacctctaccgaggagggcacctctgagtccgccacccccgagagcggccctggcacctccaccgagcccagcgagggcagcgcacccggcagccctgccggcagccccacctccacagaggagggaaccagcaccgagcccagcgaaggcagcgccccaggcaccagcaccgagcctagtgagcaggagattaaacggatcaacaagatcagaagaagacttgtgaaagacagcaacaccaagaaggccggcaagacaggccccatgaaaaccctgctggttagagtgatgacacccgatctgagagagcggctggaaaacctgagaaagaagcctgaaaatatcccccagcccatcagcaatacatctagagccaacctgaataagctgctgaccgattacaccgaaatgaagaaggcgatcctgcatgtgtactgggaagagttccagaaggaccctgtgggcctgatgagccgggtggcccagcctgccagcaagaagatcgatcagaacaagctgaaacctgagatggacgagaagggcaacctgaccaccgccggctttgcctgctctcagtgtggccagcccctgttcgtgtacaagctggagcaggtgtctgagaagggcaaggcttacaccaactacttcggacggtgcaatgtggccgagcacgaaaagctgatcctgctggcccagctgaagcccgagaaggatagcgacgaagccgtgacatatagcctgggaaagtttgggcagagggccctggatttctacagcattcatgtgaccaaggagtccacccaccccgtgaagcccctggcccagatcgccggaaacagatacgcctccggacctgtgggaaaggccctgagcgacgcatgtatgggcacaatcgcctccttcctgtctaagtaccaggacatcatcatcgaacaccagaaggtggtgaagggcaaccagaagagactggagagcctgcgggagctggccggcaaggaaaacctggaataccctagcgtgaccctgccacctcagcctcacaccaaggagggcgttgatgcctacaacgaagtgatcgcccgggtgcgaatgtgggtgaacctgaacctgtggcagaagctgaagctaagcagagatgatgccaagcctctgctgagactgaagggattcccttcctttcctctggtcgagagacaggccaacgaagtggactggtgggacatggtgtgtaacgtgaagaagctgatcaacgagaaaaaggaggatggcaaggtgttttggcagaatctggctggctacaagagacaggaagccctgagaccatacctgagcagcgaggaagatcggaagaagggaaagaaattcgctcggtaccagctgggcgacctgctgctgcacctggaaaagaagcacggcgaggactggggaaaggtgtacgacgaggcctgggagcggattgacaagaaagtggaaggcctgagcaagcacatcaagctggaagaggaacggagaagcgaggacgcccagagcaaggccgccctgaccgactggctgcgggctaaggccagcttcgtgatcgagggcctgaaggaggccgacaaggacgagttctgcagatgcgagctgaagctgcagaagtggtacggggacctgcggggaaagcccttcgccatcgaagccgagaacagcatcctggacatcagcggcttcagcaagcagtacaactgtgccttcatctggcagaaggacggcgtgaagaagctgaacctgtacctgatcatcaactacttcaagggcggcaagctgcggttcaagaagatcaaacctgaagccttcgaagccaacagattctacaccgtgatcaacaaaaagagcggcgagatcgtgcccatggaggtgaacttcaacttcgacgaccccaacctgatcatcctgcctctggcctttggcaagagacagggcagagaattcatctggaacgacctgctgtccctggaaaccggcagcctgaagctggccaacggaagagtgatcgagaagacactgtacaacagaagaacccggcaggatgagcctgccctgttcgtggccctgaccttcgagcggcgggaggtcctggactcctccaatatcaaaccaatgaacctgatcggcgtggcaagaggcgaaaacatccccgccgtgatcgccctgaccgaccccgagggctgcccactgagccggtttaaggatagcctgggaaacccaacccacatcctgagaatcggcgagagctataaggagaagcagcggaccatccaggccaagaaggaggtggagcagcggagagccggcggctacagccggaagtacgccagcaaagccaagaatctggcagacgatatggtgagaaacaccgctagagatctgctgtactacgccgtgacccaggatgccatgctgatcttcgccaacctgagccggggcttcggccggcagggcaagcggaccttcatggccgagagacagtacacacggatggaggactggctgaccgccaagctggcctacgagggcctgagcaagacctacctgtccaagacactggcccagtacacctccaagacatgcagcaactgtgggtttaccatcaccagcgccgactacgacagggtgctggagaagctgaagaagacagcaacaggctggatgaccacaattaacggcaaggagctgaaggtggagggccagattacctactacaacagatacaagagacagaacgtagtcaaggacctgtccgtcgagctggatagactgagcgaagaatctgtgaacaacgacatctcctcctggacaaagggcagaagcggagaagctctgagcctcctgaagaaaagattctcccatagacccgtgcaggagaagttcgtgtgcctgaactgcggcttcgagacacacgcagccgagcaagccgccctgaacatcgccagatcctggctgttcctgcggagccaggagtacaagaaataccagacaaacaagacaaccggcaacaccgataagagagccttcgtcgagacctggcagtccttttaccggaagaagcttaaggaggtgtggaaacctgccgtgcggtctggcggatctggcggaggctcctagccagggcagggtgaccttcgaggacgtgaccgtgaacttcacccagggcgagtggcagaggctgaaccccgagcagaggaacctgtacagggacgtgatgctggagaactacagcaacctggtgagcgtgggccagggcgagaccaccaagcccgacgtgatcctgaggctggagcagggcaaggagccctggctggaggaggaggaggtgctgggcagcggcagggccgagaagaacggcggatctggctccggcagcggccccaagaaaaagagaaaagtctaagctgccttctgcggggcttgccttctggccatgcccttcttctctcccttgcacctgtacctcttggtctttgaataaagcctgagtaggaaggctagcaaaaaaaaaaaaaaaaaaaaaaaaaaaaaaaaaaaaaaaaaaaaaaaaaaaaaaaaaaaaaaaaaaaaaaaaaaaaaaaa

SEQ ID NO: 15728 - RNA, 9485 nt, synthetic construct
  source 1..9485: mol_type = other RNA
aggaaataagagagaaaagaagagtaagaagaaatataagagccaccatggcccctaagaagaagcgtaaagtgagccggatggaacgcctcgtctacgaggtgcggcagaagtgcagaaacatcgaggacatctgcatctcctgcggatctctgaacgtgaccctggagcacccactgttcatcggcggcatgtgccagaactgtaaaaactgttttctggagtgtgcctatcaatacgacgatgacggctaccagagctactgcaccatctgttgcggcggaagagaggtgctgatgtgtggaaataacaactgctgccggtgcttctgcgtggaatgcgtggacctgctggtgggccccggcgccgcccaggccgctattaaggaagatccttggaactgctacatgtgcggccacaagggcacatacggcctgctgagacggagagaggactggcctagcagactgcagatgttcttcgccaataaccacgaccaggagttcgacccccctaaggtgtaccctcccgtccccgccgagaagagaaagcccatccgggtcctgagcctgttcgatggcatcgccaccggtctgctggtgctgaaggacctgggcatccaggtggataggtacattgcctccgaggtgtgcgaggactccatcaccgtgggaatggtgcgtcatcagggcaagatcatgtacgtgggcgacgtgcggagcgtgacacagaagcatatccaggagtggggccctttcgacctggtgatcggcggcagcccttgcaatgacctgagcatcgtgaacccagcccggaagggcctgtacgagggaaccggcagactgttcttcgagttttacagactgctgcacgacgcccggcctaaggaaggcgacgaccggcccttcttttggctgttcgagaatgtggtggccatgggagtcagcgacaagcgggatattagccggttcctggagagcaaccccgtgatgatcgatgccaaggaagtgagcgccgcccaccgggccagatacttctggggcaatctgcctggcatgaacagacccctggccagcaccgtgaacgacaagctggagctgcaggagtgcctggagcacggccggatcgccaagttcagcaaggtgagaaccatcaccacccgaagcaacagcatcaaacaaggcaaggaccagcactttcctgtgttcatgaacgagaaggaggacatcctgtggtgtaccgagatggagagagtgttcgggttcccagtccactacacagatgtcagcaacatgtctagactggccagacagagactgctgggaagaagctggtccgtccctgtgatcagacacctgttcgcccctctgaaggagtacttcgcctgcgtgagcagcggcaacagcaacgccaacagccggggccccagcttctctagcggcctggtgccactgtccctgagagggagccacatgggccccatggagatctacaaaaccgtgagcgcctggaagcggcagcctgtgcgcgtgctgagcctgtttcggaatatcgataaagtcctgaaaagcctgggattcctggagagcggctctggctccggcggtggcaccctgaagtacgtggaggatgtgacaaacgtggtcagacgggatgtggagaagtggggccccttcgatctggtgtacggcagcacccaacccctgggcagctcttgtgaccggtgccctggctggtacatgtttcagttccaccggatcctgcagtacgccctgccgagacaggagtcccagcggccattcttttggattttcatggacaacttgctgctgaccgaggatgaccaggaaactaccactcggttcctgcagaccgaagccgtgaccctgcaggacgtgagaggccgggactaccagaacgccatgcgggtgtggtccaacatccctggactgaaaagcaagcacgcacctctgacccctaaagaagaggagtacctgcaggcccaggtgcggagcagaagcaagctggacgcccctaaggtggatctgctggtgaagaattgcctcctgcccctgagagagtacttcaagtatttcagccagaatagtctgcccctgggaggcagcggcggcggcgccctggtgacatttgaggacgtcgccgtgcggttcacccaggaggaatgggctctgctggatccttctcagaaaatcctgtaccgggacgtgatgagagagacataccggaatctgacctccgtgggcatcaactgggaatgttgggaccttgaagcctgcttcagaagcctgggaagaaacctgagagtgcaggtggtgaagagaaagtgcgagctgaccaacagcggcccctgcgccgagggcggcccaagcagcggcgcccctcctcccagcggcggcagcccagccggctccccaacctctaccgaggagggcacctctgagtccgccacccccgagagcggccctggcacctccaccgagcccagcgagggcagcgcacccggcagccctgccggcagccccacctccacagaggagggaaccagcaccgagcccagcgaaggcagcgccccaggcaccagcaccgagcctagtgagcaggagattaaacggatcaacaagatcagaagaagacttgtgaaagacagcaacaccaagaaggccggcaagacaggccccatgaaaaccctgctggttagagtgatgacacccgatctgagagagcggctggaaaacctgagaaagaagcctgaaaatatcccccagcccatcagcaatacatctagagccaacctgaataagctgctgaccgattacaccgaaatgaagaaggcgatcctgcatgtgtactgggaagagttccagaaggaccctgtgggcctgatgagccgggtggcccagcctgccagcaagaagatcgatcagaacaagctgaaacctgagatggacgagaagggcaacctgaccaccgccggctttgcctgctctcagtgtggccagcccctgttcgtgtacaagctggagcaggtgtctgagaagggcaaggcttacaccaactacttcggacggtgcaatgtggccgagcacgaaaagctgatcctgctggcccagctgaagcccgagaaggatagcgacgaagccgtgacatatagcctgggaaagtttgggcagagggccctggatttctacagcattcatgtgaccaaggagtccacccaccccgtgaagcccctggcccagatcgccggaaacagatacgcctccggacctgtgggaaaggccctgagcgacgcatgtatgggcacaatcgcctccttcctgtctaagtaccaggacatcatcatcgaacaccagaaggtggtgaagggcaaccagaagagactggagagcctgcgggagctggccggcaaggaaaacctggaataccctagcgtgaccctgccacctcagcctcacaccaaggagggcgttgatgcctacaacgaagtgatcgcccgggtgcgaatgtgggtgaacctgaacctgtggcagaagctgaagctaagcagagatgatgccaagcctctgctgagactgaagggattcccttcctttcctctggtcgagagacaggccaacgaagtggactggtgggacatggtgtgtaacgtgaagaagctgatcaacgagaaaaaggaggatggcaaggtgttttggcagaatctggctggctacaagagacaggaagccctgagaccatacctgagcagcgaggaagatcggaagaagggaaagaaattcgctcggtaccagctgggcgacctgctgctgcacctggaaaagaagcacggcgaggactggggaaaggtgtacgacgaggcctgggagcggattgacaagaaagtggaaggcctgagcaagcacatcaagctggaagaggaacggagaagcgaggacgcccagagcaaggccgccctgaccgactggctgcgggctaaggccagcttcgtgatcgagggcctgaaggaggccgacaaggacgagttctgcagatgcgagctgaagctgcagaagtggtacggggacctgcggggaaagcccttcgccatcgaagccgagaacagcatcctggacatcagcggcttcagcaagcagtacaactgtgccttcatctggcagaaggacggcgtgaagaagctgaacctgtacctgatcatcaactacttcaagggcggcaagctgcggttcaagaagatcaaacctgaagccttcgaagccaacagattctacaccgtgatcaacaaaaagagcggcgagatcgtgcccatggaggtgaacttcaacttcgacgaccccaacctgatcatcctgcctctggcctttggcaagagacagggcagagaattcatctggaacgacctgctgtccctggaaaccggcagcctgaagctggccaacggaagagtgatcgagaagacactgtacaacagaagaacccggcaggatgagcctgccctgttcgtggccctgaccttcgagcggcgggaggtcctggactcctccaatatcaaaccaatgaacctgatcggcgtggcaagaggcgaaaacatccccgccgtgatcgccctgaccgaccccgagggctgcccactgagccggtttaaggatagcctgggaaacccaacccacatcctgagaatcggcgagagctataaggagaagcagcggaccatccaggccaagaaggaggtggagcagcggagagccggcggctacagccggaagtacgccagcaaagccaagaatctggcagacgatatggtgagaaacaccgctagagatctgctgtactacgccgtgacccaggatgccatgctgatcttcgccaacctgagccggggcttcggccggcagggcaagcggaccttcatggccgagagacagtacacacggatggaggactggctgaccgccaagctggcctacgagggcctgagcaagacctacctgtccaagacactggcccagtacacctccaagacatgcagcaactgtgggtttaccatcaccagcgccgactacgacagggtgctggagaagctgaagaagacagcaacaggctggatgaccacaattaacggcaaggagctgaaggtggagggccagattacctactacaacagatacaagagacagaacgtagtcaaggacctgtccgtcgagctggatagactgagcgaagaatctgtgaacaacgacatctcctcctggacaaagggcagaagcggagaagctctgagcctcctgaagaaaagattctcccatagacccgtgcaggagaagttcgtgtgcctgaactgcggcttcgagacacacgcagccgagcaagccgccctgaacatcgccagatcctggctgttcctgcggagccaggagtacaagaaataccagacaaacaagacaaccggcaacaccgataagagagccttcgtcgagacctggcagtccttttaccggaagaagcttaaggaggtgtggaaacctgccgtgcggtctggcggatctggcggaggctccatggccctgaggagcgtgatgttcagcgacgtgagcatcgacttcagccccgaggagtgggagtacctggacctggagcagaaggacctgtacagggacgtgatgctggagaactacagcaacctggtgagcctggccggctgcttcatcagcaagcccgacgtgatcagcagcctggagcagggcaaggagccctggaaggtggtgaggaagggcaggaggcagtaccccgacctggagaccggcggcccaagcagcggcgcccctcctcccagcggcggcagcccagccggctccccaacctctaccgaggagggcacctctgagtccgccacccccgagagcggccctggcacctccaccgagcccagcgagggcagcgcacccggcagccctgccggcagccccacctccacagaggagggaaccagcaccgagcccagcgaaggcagcgccccaggcaccagcaccgagcctagtgagcaggagattaaacggatcaacaagatcagaagaagacttgtgaaagacagcaacaccaagaaggccggcaagacaggccccatgaaaaccctgctggttagagtgatgacacccgatctgagagagcggctggaaaacctgagaaagaagcctgaaaatatcccccagcccatcagcaatacatctagagccaacctgaataagctgctgaccgattacaccgaaatgaagaaggcgatcctgcatgtgtactgggaagagttccagaaggaccctgtgggcctgatgagccgggtggcccagcctgccagcaagaagatcgatcagaacaagctgaaacctgagatggacgagaagggcaacctgaccaccgccggctttgcctgctctcagtgtggccagcccctgttcgtgtacaagctggagcaggtgtctgagaagggcaaggcttacaccaactacttcggacggtgcaatgtggccgagcacgaaaagctgatcctgctggcccagctgaagcccgagaaggatagcgacgaagccgtgacatatagcctgggaaagtttgggcagagggccctggatttctacagcattcatgtgaccaaggagtccacccaccccgtgaagcccctggcccagatcgccggaaacagatacgcctccggacctgtgggaaaggccctgagcgacgcatgtatgggcacaatcgcctccttcctgtctaagtaccaggacatcatcatcgaacaccagaaggtggtgaagggcaaccagaagagactggagagcctgcgggagctggccggcaaggaaaacctggaataccctagcgtgaccctgccacctcagcctcacaccaaggagggcgttgatgcctacaacgaagtgatcgcccgggtgcgaatgtgggtgaacctgaacctgtggcagaagctgaagctaagcagagatgatgccaagcctctgctgagactgaagggattcccttcctttcctctggtcgagagacaggccaacgaagtggactggtgggacatggtgtgtaacgtgaagaagctgatcaacgagaaaaaggaggatggcaaggtgttttggcagaatctggctggctacaagagacaggaagccctgagaccatacctgagcagcgaggaagatcggaagaagggaaagaaattcgctcggtaccagctgggcgacctgctgctgcacctggaaaagaagcacggcgaggactggggaaaggtgtacgacgaggcctgggagcggattgacaagaaagtggaaggcctgagcaagcacatcaagctggaagaggaacggagaagcgaggacgcccagagcaaggccgccctgaccgactggctgcgggctaaggccagcttcgtgatcgagggcctgaaggaggccgacaaggacgagttctgcagatgcgagctgaagctgcagaagtggtacggggacctgcggggaaagcccttcgccatcgaagccgagaacagcatcctggacatcagcggcttcagcaagcagtacaactgtgccttcatctggcagaaggacggcgtgaagaagctgaacctgtacctgatcatcaactacttcaagggcggcaagctgcggttcaagaagatcaaacctgaagccttcgaagccaacagattctacaccgtgatcaacaaaaagagcggcgagatcgtgcccatggaggtgaacttcaacttcgacgaccccaacctgatcatcctgcctctggcctttggcaagagacagggcagagaattcatctggaacgacctgctgtccctggaaaccggcagcctgaagctggccaacggaagagtgatcgagaagacactgtacaacagaagaacccggcaggatgagcctgccctgttcgtggccctgaccttcgagcggcgggaggtcctggactcctccaatatcaaaccaatgaacctgatcggcgtggcaagaggcgaaaacatccccgccgtgatcgccctgaccgaccccgagggctgcccactgagccggtttaaggatagcctgggaaacccaacccacatcctgagaatcggcgagagctataaggagaagcagcggaccatccaggccaagaaggaggtggagcagcggagagccggcggctacagccggaagtacgccagcaaagccaagaatctggcagacgatatggtgagaaacaccgctagagatctgctgtactacgccgtgacccaggatgccatgctgatcttcgccaacctgagccggggcttcggccggcagggcaagcggaccttcatggccgagagacagtacacacggatggaggactggctgaccgccaagctggcctacgagggcctgagcaagacctacctgtccaagacactggcccagtacacctccaagacatgcagcaactgtgggtttaccatcaccagcgccgactacgacagggtgctggagaagctgaagaagacagcaacaggctggatgaccacaattaacggcaaggagctgaaggtggagggccagattacctactacaacagatacaagagacagaacgtagtcaaggacctgtccgtcgagctggatagactgagcgaagaatctgtgaacaacgacatctcctcctggacaaagggcagaagcggagaagctctgagcctcctgaagaaaagattctcccatagacccgtgcaggagaagttcgtgtgcctgaactgcggcttcgagacacacgcagccgagcaagccgccctgaacatcgccagatcctggctgttcctgcggagccaggagtacaagaaataccagacaaacaagacaaccggcaacaccgataagagagccttcgtcgagacctggcagtccttttaccggaagaagcttaaggaggtgtggaaacctgccgtgcggtctggcggatctggcggaggctcctatggccctgaggagcgtgatgttcagcgacgtgagcatcgacttcagccccgaggagtgggagtacctggacctggagcagaaggacctgtacagggacgtgatgctggagaactacagcaacctggtgagcctggccggctgcttcatcagcaagcccgacgtgatcagcagcctggagcagggcaaggagccctggaaggtggtgaggaagggcaggaggcagtaccccgacctggagaccggatctggctccggcagcggccccaagaaaaagagaaaagtctaagctgccttctgcggggcttgccttctggccatgcccttcttctctcccttgcacctgtacctcttggtctttgaataaagcctgagtaggaaggctagcaaaaaaaaaaaaaaaaaaaaaaaaaaaaaaaaaaaaaaaaaaaaaaaaaaaaaaaaaaaaaaaaaaaaaaaaaaaaaaaa

SEQ ID NO: 15729 - RNA, 9485 nt, synthetic construct
  source 1..9485: mol_type = other RNA
aggaaataagagagaaaagaagagtaagaagaaatataagagccaccatggcccctaagaagaagcgtaaagtgagccggatggaacgcctcgtctacgaggtgcggcagaagtgcagaaacatcgaggacatctgcatctcctgcggatctctgaacgtgaccctggagcacccactgttcatcggcggcatgtgccagaactgtaaaaactgttttctggagtgtgcctatcaatacgacgatgacggctaccagagctactgcaccatctgttgcggcggaagagaggtgctgatgtgtggaaataacaactgctgccggtgcttctgcgtggaatgcgtggacctgctggtgggccccggcgccgcccaggccgctattaaggaagatccttggaactgctacatgtgcggccacaagggcacatacggcctgctgagacggagagaggactggcctagcagactgcagatgttcttcgccaataaccacgaccaggagttcgacccccctaaggtgtaccctcccgtccccgccgagaagagaaagcccatccgggtcctgagcctgttcgatggcatcgccaccggtctgctggtgctgaaggacctgggcatccaggtggataggtacattgcctccgaggtgtgcgaggactccatcaccgtgggaatggtgcgtcatcagggcaagatcatgtacgtgggcgacgtgcggagcgtgacacagaagcatatccaggagtggggccctttcgacctggtgatcggcggcagcccttgcaatgacctgagcatcgtgaacccagcccggaagggcctgtacgagggaaccggcagactgttcttcgagttttacagactgctgcacgacgcccggcctaaggaaggcgacgaccggcccttcttttggctgttcgagaatgtggtggccatgggagtcagcgacaagcgggatattagccggttcctggagagcaaccccgtgatgatcgatgccaaggaagtgagcgccgcccaccgggccagatacttctggggcaatctgcctggcatgaacagacccctggccagcaccgtgaacgacaagctggagctgcaggagtgcctggagcacggccggatcgccaagttcagcaaggtgagaaccatcaccacccgaagcaacagcatcaaacaaggcaaggaccagcactttcctgtgttcatgaacgagaaggaggacatcctgtggtgtaccgagatggagagagtgttcgggttcccagtccactacacagatgtcagcaacatgtctagactggccagacagagactgctgggaagaagctggtccgtccctgtgatcagacacctgttcgcccctctgaaggagtacttcgcctgcgtgagcagcggcaacagcaacgccaacagccggggccccagcttctctagcggcctggtgccactgtccctgagagggagccacatgggccccatggagatctacaaaaccgtgagcgcctggaagcggcagcctgtgcgcgtgctgagcctgtttcggaatatcgataaagtcctgaaaagcctgggattcctggagagcggctctggctccggcggtggcaccctgaagtacgtggaggatgtgacaaacgtggtcagacgggatgtggagaagtggggccccttcgatctggtgtacggcagcacccaacccctgggcagctcttgtgaccggtgccctggctggtacatgtttcagttccaccggatcctgcagtacgccctgccgagacaggagtcccagcggccattcttttggattttcatggacaacttgctgctgaccgaggatgaccaggaaactaccactcggttcctgcagaccgaagccgtgaccctgcaggacgtgagaggccgggactaccagaacgccatgcgggtgtggtccaacatccctggactgaaaagcaagcacgcacctctgacccctaaagaagaggagtacctgcaggcccaggtgcggagcagaagcaagctggacgcccctaaggtggatctgctggtgaagaattgcctcctgcccctgagagagtacttcaagtatttcagccagaatagtctgcccctgggaggcagcggcggcggcgccctggtgacatttgaggacgtcgccgtgcggttcacccaggaggaatgggctctgctggatccttctcagaaaatcctgtaccgggacgtgatgagagagacataccggaatctgacctccgtgggcatcaactgggaatgttgggaccttgaagcctgcttcagaagcctgggaagaaacctgagagtgcaggtggtgaagagaaagtgcgagctgaccaacagcggcccctgcgccgagggcggcccaagcagcggcgcccctcctcccagcggcggcagcccagccggctccccaacctctaccgaggagggcacctctgagtccgccacccccgagagcggccctggcacctccaccgagcccagcgagggcagcgcacccggcagccctgccggcagccccacctccacagaggagggaaccagcaccgagcccagcgaaggcagcgccccaggcaccagcaccgagcctagtgagcaggagattaaacggatcaacaagatcagaagaagacttgtgaaagacagcaacaccaagaaggccggcaagacaggccccatgaaaaccctgctggttagagtgatgacacccgatctgagagagcggctggaaaacctgagaaagaagcctgaaaatatcccccagcccatcagcaatacatctagagccaacctgaataagctgctgaccgattacaccgaaatgaagaaggcgatcctgcatgtgtactgggaagagttccagaaggaccctgtgggcctgatgagccgggtggcccagcctgccagcaagaagatcgatcagaacaagctgaaacctgagatggacgagaagggcaacctgaccaccgccggctttgcctgctctcagtgtggccagcccctgttcgtgtacaagctggagcaggtgtctgagaagggcaaggcttacaccaactacttcggacggtgcaatgtggccgagcacgaaaagctgatcctgctggcccagctgaagcccgagaaggatagcgacgaagccgtgacatatagcctgggaaagtttgggcagagggccctggatttctacagcattcatgtgaccaaggagtccacccaccccgtgaagcccctggcccagatcgccggaaacagatacgcctccggacctgtgggaaaggccctgagcgacgcatgtatgggcacaatcgcctccttcctgtctaagtaccaggacatcatcatcgaacaccagaaggtggtgaagggcaaccagaagagactggagagcctgcgggagctggccggcaaggaaaacctggaataccctagcgtgaccctgccacctcagcctcacaccaaggagggcgttgatgcctacaacgaagtgatcgcccgggtgcgaatgtgggtgaacctgaacctgtggcagaagctgaagctaagcagagatgatgccaagcctctgctgagactgaagggattcccttcctttcctctggtcgagagacaggccaacgaagtggactggtgggacatggtgtgtaacgtgaagaagctgatcaacgagaaaaaggaggatggcaaggtgttttggcagaatctggctggctacaagagacaggaagccctgagaccatacctgagcagcgaggaagatcggaagaagggaaagaaattcgctcggtaccagctgggcgacctgctgctgcacctggaaaagaagcacggcgaggactggggaaaggtgtacgacgaggcctgggagcggattgacaagaaagtggaaggcctgagcaagcacatcaagctggaagaggaacggagaagcgaggacgcccagagcaaggccgccctgaccgactggctgcgggctaaggccagcttcgtgatcgagggcctgaaggaggccgacaaggacgagttctgcagatgcgagctgaagctgcagaagtggtacggggacctgcggggaaagcccttcgccatcgaagccgagaacagcatcctggacatcagcggcttcagcaagcagtacaactgtgccttcatctggcagaaggacggcgtgaagaagctgaacctgtacctgatcatcaactacttcaagggcggcaagctgcggttcaagaagatcaaacctgaagccttcgaagccaacagattctacaccgtgatcaacaaaaagagcggcgagatcgtgcccatggaggtgaacttcaacttcgacgaccccaacctgatcatcctgcctctggcctttggcaagagacagggcagagaattcatctggaacgacctgctgtccctggaaaccggcagcctgaagctggccaacggaagagtgatcgagaagacactgtacaacagaagaacccggcaggatgagcctgccctgttcgtggccctgaccttcgagcggcgggaggtcctggactcctccaatatcaaaccaatgaacctgatcggcgtggcaagaggcgaaaacatccccgccgtgatcgccctgaccgaccccgagggctgcccactgagccggtttaaggatagcctgggaaacccaacccacatcctgagaatcggcgagagctataaggagaagcagcggaccatccaggccaagaaggaggtggagcagcggagagccggcggctacagccggaagtacgccagcaaagccaagaatctggcagacgatatggtgagaaacaccgctagagatctgctgtactacgccgtgacccaggatgccatgctgatcttcgccaacctgagccggggcttcggccggcagggcaagcggaccttcatggccgagagacagtacacacggatggaggactggctgaccgccaagctggcctacgagggcctgagcaagacctacctgtccaagacactggcccagtacacctccaagacatgcagcaactgtgggtttaccatcaccagcgccgactacgacagggtgctggagaagctgaagaagacagcaacaggctggatgaccacaattaacggcaaggagctgaaggtggagggccagattacctactacaacagatacaagagacagaacgtagtcaaggacctgtccgtcgagctggatagactgagcgaagaatctgtgaacaacgacatctcctcctggacaaagggcagaagcggagaagctctgagcctcctgaagaaaagattctcccatagacccgtgcaggagaagttcgtgtgcctgaactgcggcttcgagacacacgcagccgagcaagccgccctgaacatcgccagatcctggctgttcctgcggagccaggagtacaagaaataccagacaaacaagacaaccggcaacaccgataagagagccttcgtcgagacctggcagtccttttaccggaagaagcttaaggaggtgtggaaacctgccgtgcggtctggcggatctggcggaggctccggccaggaggaggtggccttcaaggacgtggccgtggacttcaccagggaggagtggaggctgctgagccccccccagaaggagctgtacaaggaggtgatgctggagaacatcaggaacctgctgagcgtgggcctgcccgccccccccgaggacatgatcagctacctggagcagagggaggccccctggatgctggagcaggagggcctgaggagctacagccccggcgaggagatcaggggcggcccaagcagcggcgcccctcctcccagcggcggcagcccagccggctccccaacctctaccgaggagggcacctctgagtccgccacccccgagagcggccctggcacctccaccgagcccagcgagggcagcgcacccggcagccctgccggcagccccacctccacagaggagggaaccagcaccgagcccagcgaaggcagcgccccaggcaccagcaccgagcctagtgagcaggagattaaacggatcaacaagatcagaagaagacttgtgaaagacagcaacaccaagaaggccggcaagacaggccccatgaaaaccctgctggttagagtgatgacacccgatctgagagagcggctggaaaacctgagaaagaagcctgaaaatatcccccagcccatcagcaatacatctagagccaacctgaataagctgctgaccgattacaccgaaatgaagaaggcgatcctgcatgtgtactgggaagagttccagaaggaccctgtgggcctgatgagccgggtggcccagcctgccagcaagaagatcgatcagaacaagctgaaacctgagatggacgagaagggcaacctgaccaccgccggctttgcctgctctcagtgtggccagcccctgttcgtgtacaagctggagcaggtgtctgagaagggcaaggcttacaccaactacttcggacggtgcaatgtggccgagcacgaaaagctgatcctgctggcccagctgaagcccgagaaggatagcgacgaagccgtgacatatagcctgggaaagtttgggcagagggccctggatttctacagcattcatgtgaccaaggagtccacccaccccgtgaagcccctggcccagatcgccggaaacagatacgcctccggacctgtgggaaaggccctgagcgacgcatgtatgggcacaatcgcctccttcctgtctaagtaccaggacatcatcatcgaacaccagaaggtggtgaagggcaaccagaagagactggagagcctgcgggagctggccggcaaggaaaacctggaataccctagcgtgaccctgccacctcagcctcacaccaaggagggcgttgatgcctacaacgaagtgatcgcccgggtgcgaatgtgggtgaacctgaacctgtggcagaagctgaagctaagcagagatgatgccaagcctctgctgagactgaagggattcccttcctttcctctggtcgagagacaggccaacgaagtggactggtgggacatggtgtgtaacgtgaagaagctgatcaacgagaaaaaggaggatggcaaggtgttttggcagaatctggctggctacaagagacaggaagccctgagaccatacctgagcagcgaggaagatcggaagaagggaaagaaattcgctcggtaccagctgggcgacctgctgctgcacctggaaaagaagcacggcgaggactggggaaaggtgtacgacgaggcctgggagcggattgacaagaaagtggaaggcctgagcaagcacatcaagctggaagaggaacggagaagcgaggacgcccagagcaaggccgccctgaccgactggctgcgggctaaggccagcttcgtgatcgagggcctgaaggaggccgacaaggacgagttctgcagatgcgagctgaagctgcagaagtggtacggggacctgcggggaaagcccttcgccatcgaagccgagaacagcatcctggacatcagcggcttcagcaagcagtacaactgtgccttcatctggcagaaggacggcgtgaagaagctgaacctgtacctgatcatcaactacttcaagggcggcaagctgcggttcaagaagatcaaacctgaagccttcgaagccaacagattctacaccgtgatcaacaaaaagagcggcgagatcgtgcccatggaggtgaacttcaacttcgacgaccccaacctgatcatcctgcctctggcctttggcaagagacagggcagagaattcatctggaacgacctgctgtccctggaaaccggcagcctgaagctggccaacggaagagtgatcgagaagacactgtacaacagaagaacccggcaggatgagcctgccctgttcgtggccctgaccttcgagcggcgggaggtcctggactcctccaatatcaaaccaatgaacctgatcggcgtggcaagaggcgaaaacatccccgccgtgatcgccctgaccgaccccgagggctgcccactgagccggtttaaggatagcctgggaaacccaacccacatcctgagaatcggcgagagctataaggagaagcagcggaccatccaggccaagaaggaggtggagcagcggagagccggcggctacagccggaagtacgccagcaaagccaagaatctggcagacgatatggtgagaaacaccgctagagatctgctgtactacgccgtgacccaggatgccatgctgatcttcgccaacctgagccggggcttcggccggcagggcaagcggaccttcatggccgagagacagtacacacggatggaggactggctgaccgccaagctggcctacgagggcctgagcaagacctacctgtccaagacactggcccagtacacctccaagacatgcagcaactgtgggtttaccatcaccagcgccgactacgacagggtgctggagaagctgaagaagacagcaacaggctggatgaccacaattaacggcaaggagctgaaggtggagggccagattacctactacaacagatacaagagacagaacgtagtcaaggacctgtccgtcgagctggatagactgagcgaagaatctgtgaacaacgacatctcctcctggacaaagggcagaagcggagaagctctgagcctcctgaagaaaagattctcccatagacccgtgcaggagaagttcgtgtgcctgaactgcggcttcgagacacacgcagccgagcaagccgccctgaacatcgccagatcctggctgttcctgcggagccaggagtacaagaaataccagacaaacaagacaaccggcaacaccgataagagagccttcgtcgagacctggcagtccttttaccggaagaagcttaaggaggtgtggaaacctgccgtgcggtctggcggatctggcggaggctcctggccaggaggaggtggccttcaaggacgtggccgtggacttcaccagggaggagtggaggctgctgagccccccccagaaggagctgtacaaggaggtgatgctggagaacatcaggaacctgctgagcgtgggcctgcccgccccccccgaggacatgatcagctacctggagcagagggaggccccctggatgctggagcaggagggcctgaggagctacagccccggcgaggagatcaggggatctggctccggcagcggccccaagaaaaagagaaaagtctaagctgccttctgcggggcttgccttctggccatgcccttcttctctcccttgcacctgtacctcttggtctttgaataaagcctgagtaggaaggctagcaaaaaaaaaaaaaaaaaaaaaaaaaaaaaaaaaaaaaaaaaaaaaaaaaaaaaaaaaaaaaaaaaaaaaaaaaaaaaaaa

SEQ ID NO: 15730 - RNA, 9485 nt, synthetic construct
  source 1..9485: mol_type = other RNA
aggaaataagagagaaaagaagagtaagaagaaatataagagccaccatggcccctaagaagaagcgtaaagtgagccggatggaacgcctcgtctacgaggtgcggcagaagtgcagaaacatcgaggacatctgcatctcctgcggatctctgaacgtgaccctggagcacccactgttcatcggcggcatgtgccagaactgtaaaaactgttttctggagtgtgcctatcaatacgacgatgacggctaccagagctactgcaccatctgttgcggcggaagagaggtgctgatgtgtggaaataacaactgctgccggtgcttctgcgtggaatgcgtggacctgctggtgggccccggcgccgcccaggccgctattaaggaagatccttggaactgctacatgtgcggccacaagggcacatacggcctgctgagacggagagaggactggcctagcagactgcagatgttcttcgccaataaccacgaccaggagttcgacccccctaaggtgtaccctcccgtccccgccgagaagagaaagcccatccgggtcctgagcctgttcgatggcatcgccaccggtctgctggtgctgaaggacctgggcatccaggtggataggtacattgcctccgaggtgtgcgaggactccatcaccgtgggaatggtgcgtcatcagggcaagatcatgtacgtgggcgacgtgcggagcgtgacacagaagcatatccaggagtggggccctttcgacctggtgatcggcggcagcccttgcaatgacctgagcatcgtgaacccagcccggaagggcctgtacgagggaaccggcagactgttcttcgagttttacagactgctgcacgacgcccggcctaaggaaggcgacgaccggcccttcttttggctgttcgagaatgtggtggccatgggagtcagcgacaagcgggatattagccggttcctggagagcaaccccgtgatgatcgatgccaaggaagtgagcgccgcccaccgggccagatacttctggggcaatctgcctggcatgaacagacccctggccagcaccgtgaacgacaagctggagctgcaggagtgcctggagcacggccggatcgccaagttcagcaaggtgagaaccatcaccacccgaagcaacagcatcaaacaaggcaaggaccagcactttcctgtgttcatgaacgagaaggaggacatcctgtggtgtaccgagatggagagagtgttcgggttcccagtccactacacagatgtcagcaacatgtctagactggccagacagagactgctgggaagaagctggtccgtccctgtgatcagacacctgttcgcccctctgaaggagtacttcgcctgcgtgagcagcggcaacagcaacgccaacagccggggccccagcttctctagcggcctggtgccactgtccctgagagggagccacatgggccccatggagatctacaaaaccgtgagcgcctggaagcggcagcctgtgcgcgtgctgagcctgtttcggaatatcgataaagtcctgaaaagcctgggattcctggagagcggctctggctccggcggtggcaccctgaagtacgtggaggatgtgacaaacgtggtcagacgggatgtggagaagtggggccccttcgatctggtgtacggcagcacccaacccctgggcagctcttgtgaccggtgccctggctggtacatgtttcagttccaccggatcctgcagtacgccctgccgagacaggagtcccagcggccattcttttggattttcatggacaacttgctgctgaccgaggatgaccaggaaactaccactcggttcctgcagaccgaagccgtgaccctgcaggacgtgagaggccgggactaccagaacgccatgcgggtgtggtccaacatccctggactgaaaagcaagcacgcacctctgacccctaaagaagaggagtacctgcaggcccaggtgcggagcagaagcaagctggacgcccctaaggtggatctgctggtgaagaattgcctcctgcccctgagagagtacttcaagtatttcagccagaatagtctgcccctgggaggcagcggcggcggcgccctggtgacatttgaggacgtcgccgtgcggttcacccaggaggaatgggctctgctggatccttctcagaaaatcctgtaccgggacgtgatgagagagacataccggaatctgacctccgtgggcatcaactgggaatgttgggaccttgaagcctgcttcagaagcctgggaagaaacctgagagtgcaggtggtgaagagaaagtgcgagctgaccaacagcggcccctgcgccgagggcggcccaagcagcggcgcccctcctcccagcggcggcagcccagccggctccccaacctctaccgaggagggcacctctgagtccgccacccccgagagcggccctggcacctccaccgagcccagcgagggcagcgcacccggcagccctgccggcagccccacctccacagaggagggaaccagcaccgagcccagcgaaggcagcgccccaggcaccagcaccgagcctagtgagcaggagattaaacggatcaacaagatcagaagaagacttgtgaaagacagcaacaccaagaaggccggcaagacaggccccatgaaaaccctgctggttagagtgatgacacccgatctgagagagcggctggaaaacctgagaaagaagcctgaaaatatcccccagcccatcagcaatacatctagagccaacctgaataagctgctgaccgattacaccgaaatgaagaaggcgatcctgcatgtgtactgggaagagttccagaaggaccctgtgggcctgatgagccgggtggcccagcctgccagcaagaagatcgatcagaacaagctgaaacctgagatggacgagaagggcaacctgaccaccgccggctttgcctgctctcagtgtggccagcccctgttcgtgtacaagctggagcaggtgtctgagaagggcaaggcttacaccaactacttcggacggtgcaatgtggccgagcacgaaaagctgatcctgctggcccagctgaagcccgagaaggatagcgacgaagccgtgacatatagcctgggaaagtttgggcagagggccctggatttctacagcattcatgtgaccaaggagtccacccaccccgtgaagcccctggcccagatcgccggaaacagatacgcctccggacctgtgggaaaggccctgagcgacgcatgtatgggcacaatcgcctccttcctgtctaagtaccaggacatcatcatcgaacaccagaaggtggtgaagggcaaccagaagagactggagagcctgcgggagctggccggcaaggaaaacctggaataccctagcgtgaccctgccacctcagcctcacaccaaggagggcgttgatgcctacaacgaagtgatcgcccgggtgcgaatgtgggtgaacctgaacctgtggcagaagctgaagctaagcagagatgatgccaagcctctgctgagactgaagggattcccttcctttcctctggtcgagagacaggccaacgaagtggactggtgggacatggtgtgtaacgtgaagaagctgatcaacgagaaaaaggaggatggcaaggtgttttggcagaatctggctggctacaagagacaggaagccctgagaccatacctgagcagcgaggaagatcggaagaagggaaagaaattcgctcggtaccagctgggcgacctgctgctgcacctggaaaagaagcacggcgaggactggggaaaggtgtacgacgaggcctgggagcggattgacaagaaagtggaaggcctgagcaagcacatcaagctggaagaggaacggagaagcgaggacgcccagagcaaggccgccctgaccgactggctgcgggctaaggccagcttcgtgatcgagggcctgaaggaggccgacaaggacgagttctgcagatgcgagctgaagctgcagaagtggtacggggacctgcggggaaagcccttcgccatcgaagccgagaacagcatcctggacatcagcggcttcagcaagcagtacaactgtgccttcatctggcagaaggacggcgtgaagaagctgaacctgtacctgatcatcaactacttcaagggcggcaagctgcggttcaagaagatcaaacctgaagccttcgaagccaacagattctacaccgtgatcaacaaaaagagcggcgagatcgtgcccatggaggtgaacttcaacttcgacgaccccaacctgatcatcctgcctctggcctttggcaagagacagggcagagaattcatctggaacgacctgctgtccctggaaaccggcagcctgaagctggccaacggaagagtgatcgagaagacactgtacaacagaagaacccggcaggatgagcctgccctgttcgtggccctgaccttcgagcggcgggaggtcctggactcctccaatatcaaaccaatgaacctgatcggcgtggcaagaggcgaaaacatccccgccgtgatcgccctgaccgaccccgagggctgcccactgagccggtttaaggatagcctgggaaacccaacccacatcctgagaatcggcgagagctataaggagaagcagcggaccatccaggccaagaaggaggtggagcagcggagagccggcggctacagccggaagtacgccagcaaagccaagaatctggcagacgatatggtgagaaacaccgctagagatctgctgtactacgccgtgacccaggatgccatgctgatcttcgccaacctgagccggggcttcggccggcagggcaagcggaccttcatggccgagagacagtacacacggatggaggactggctgaccgccaagctggcctacgagggcctgagcaagacctacctgtccaagacactggcccagtacacctccaagacatgcagcaactgtgggtttaccatcaccagcgccgactacgacagggtgctggagaagctgaagaagacagcaacaggctggatgaccacaattaacggcaaggagctgaaggtggagggccagattacctactacaacagatacaagagacagaacgtagtcaaggacctgtccgtcgagctggatagactgagcgaagaatctgtgaacaacgacatctcctcctggacaaagggcagaagcggagaagctctgagcctcctgaagaaaagattctcccatagacccgtgcaggagaagttcgtgtgcctgaactgcggcttcgagacacacgcagccgagcaagccgccctgaacatcgccagatcctggctgttcctgcggagccaggagtacaagaaataccagacaaacaagacaaccggcaacaccgataagagagccttcgtcgagacctggcagtccttttaccggaagaagcttaaggaggtgtggaaacctgccgtgcggtctggcggatctggcggaggctccagccagggcagcgtgaccttcagggacgtggccatcgacttcagccaggaggagtgggagtggctgcagcccacccagagggacctgtacaggcacgtgatgctggagaactacagccacctggtgagcctgggcctgaacatcagcaagccctacgtggtgagcctgctggagcagggcaaggagccctggctggagaagaggggcgtgaggaggaacctgttcagcgagcccaacagggagggcggcccaagcagcggcgcccctcctcccagcggcggcagcccagccggctccccaacctctaccgaggagggcacctctgagtccgccacccccgagagcggccctggcacctccaccgagcccagcgagggcagcgcacccggcagccctgccggcagccccacctccacagaggagggaaccagcaccgagcccagcgaaggcagcgccccaggcaccagcaccgagcctagtgagcaggagattaaacggatcaacaagatcagaagaagacttgtgaaagacagcaacaccaagaaggccggcaagacaggccccatgaaaaccctgctggttagagtgatgacacccgatctgagagagcggctggaaaacctgagaaagaagcctgaaaatatcccccagcccatcagcaatacatctagagccaacctgaataagctgctgaccgattacaccgaaatgaagaaggcgatcctgcatgtgtactgggaagagttccagaaggaccctgtgggcctgatgagccgggtggcccagcctgccagcaagaagatcgatcagaacaagctgaaacctgagatggacgagaagggcaacctgaccaccgccggctttgcctgctctcagtgtggccagcccctgttcgtgtacaagctggagcaggtgtctgagaagggcaaggcttacaccaactacttcggacggtgcaatgtggccgagcacgaaaagctgatcctgctggcccagctgaagcccgagaaggatagcgacgaagccgtgacatatagcctgggaaagtttgggcagagggccctggatttctacagcattcatgtgaccaaggagtccacccaccccgtgaagcccctggcccagatcgccggaaacagatacgcctccggacctgtgggaaaggccctgagcgacgcatgtatgggcacaatcgcctccttcctgtctaagtaccaggacatcatcatcgaacaccagaaggtggtgaagggcaaccagaagagactggagagcctgcgggagctggccggcaaggaaaacctggaataccctagcgtgaccctgccacctcagcctcacaccaaggagggcgttgatgcctacaacgaagtgatcgcccgggtgcgaatgtgggtgaacctgaacctgtggcagaagctgaagctaagcagagatgatgccaagcctctgctgagactgaagggattcccttcctttcctctggtcgagagacaggccaacgaagtggactggtgggacatggtgtgtaacgtgaagaagctgatcaacgagaaaaaggaggatggcaaggtgttttggcagaatctggctggctacaagagacaggaagccctgagaccatacctgagcagcgaggaagatcggaagaagggaaagaaattcgctcggtaccagctgggcgacctgctgctgcacctggaaaagaagcacggcgaggactggggaaaggtgtacgacgaggcctgggagcggattgacaagaaagtggaaggcctgagcaagcacatcaagctggaagaggaacggagaagcgaggacgcccagagcaaggccgccctgaccgactggctgcgggctaaggccagcttcgtgatcgagggcctgaaggaggccgacaaggacgagttctgcagatgcgagctgaagctgcagaagtggtacggggacctgcggggaaagcccttcgccatcgaagccgagaacagcatcctggacatcagcggcttcagcaagcagtacaactgtgccttcatctggcagaaggacggcgtgaagaagctgaacctgtacctgatcatcaactacttcaagggcggcaagctgcggttcaagaagatcaaacctgaagccttcgaagccaacagattctacaccgtgatcaacaaaaagagcggcgagatcgtgcccatggaggtgaacttcaacttcgacgaccccaacctgatcatcctgcctctggcctttggcaagagacagggcagagaattcatctggaacgacctgctgtccctggaaaccggcagcctgaagctggccaacggaagagtgatcgagaagacactgtacaacagaagaacccggcaggatgagcctgccctgttcgtggccctgaccttcgagcggcgggaggtcctggactcctccaatatcaaaccaatgaacctgatcggcgtggcaagaggcgaaaacatccccgccgtgatcgccctgaccgaccccgagggctgcccactgagccggtttaaggatagcctgggaaacccaacccacatcctgagaatcggcgagagctataaggagaagcagcggaccatccaggccaagaaggaggtggagcagcggagagccggcggctacagccggaagtacgccagcaaagccaagaatctggcagacgatatggtgagaaacaccgctagagatctgctgtactacgccgtgacccaggatgccatgctgatcttcgccaacctgagccggggcttcggccggcagggcaagcggaccttcatggccgagagacagtacacacggatggaggactggctgaccgccaagctggcctacgagggcctgagcaagacctacctgtccaagacactggcccagtacacctccaagacatgcagcaactgtgggtttaccatcaccagcgccgactacgacagggtgctggagaagctgaagaagacagcaacaggctggatgaccacaattaacggcaaggagctgaaggtggagggccagattacctactacaacagatacaagagacagaacgtagtcaaggacctgtccgtcgagctggatagactgagcgaagaatctgtgaacaacgacatctcctcctggacaaagggcagaagcggagaagctctgagcctcctgaagaaaagattctcccatagacccgtgcaggagaagttcgtgtgcctgaactgcggcttcgagacacacgcagccgagcaagccgccctgaacatcgccagatcctggctgttcctgcggagccaggagtacaagaaataccagacaaacaagacaaccggcaacaccgataagagagccttcgtcgagacctggcagtccttttaccggaagaagcttaaggaggtgtggaaacctgccgtgcggtctggcggatctggcggaggctcctagccagggcagcgtgaccttcagggacgtggccatcgacttcagccaggaggagtgggagtggctgcagcccacccagagggacctgtacaggcacgtgatgctggagaactacagccacctggtgagcctgggcctgaacatcagcaagccctacgtggtgagcctgctggagcagggcaaggagccctggctggagaagaggggcgtgaggaggaacctgttcagcgagcccaacagggagggatctggctccggcagcggccccaagaaaaagagaaaagtctaagctgccttctgcggggcttgccttctggccatgcccttcttctctcccttgcacctgtacctcttggtctttgaataaagcctgagtaggaaggctagcaaaaaaaaaaaaaaaaaaaaaaaaaaaaaaaaaaaaaaaaaaaaaaaaaaaaaaaaaaaaaaaaaaaaaaaaaaaaaaaa

SEQ ID NO: 15731 - RNA, 9485 nt, synthetic construct
  source 1..9485: mol_type = other RNA
aggaaataagagagaaaagaagagtaagaagaaatataagagccaccatggcccctaagaagaagcgtaaagtgagccggatggaacgcctcgtctacgaggtgcggcagaagtgcagaaacatcgaggacatctgcatctcctgcggatctctgaacgtgaccctggagcacccactgttcatcggcggcatgtgccagaactgtaaaaactgttttctggagtgtgcctatcaatacgacgatgacggctaccagagctactgcaccatctgttgcggcggaagagaggtgctgatgtgtggaaataacaactgctgccggtgcttctgcgtggaatgcgtggacctgctggtgggccccggcgccgcccaggccgctattaaggaagatccttggaactgctacatgtgcggccacaagggcacatacggcctgctgagacggagagaggactggcctagcagactgcagatgttcttcgccaataaccacgaccaggagttcgacccccctaaggtgtaccctcccgtccccgccgagaagagaaagcccatccgggtcctgagcctgttcgatggcatcgccaccggtctgctggtgctgaaggacctgggcatccaggtggataggtacattgcctccgaggtgtgcgaggactccatcaccgtgggaatggtgcgtcatcagggcaagatcatgtacgtgggcgacgtgcggagcgtgacacagaagcatatccaggagtggggccctttcgacctggtgatcggcggcagcccttgcaatgacctgagcatcgtgaacccagcccggaagggcctgtacgagggaaccggcagactgttcttcgagttttacagactgctgcacgacgcccggcctaaggaaggcgacgaccggcccttcttttggctgttcgagaatgtggtggccatgggagtcagcgacaagcgggatattagccggttcctggagagcaaccccgtgatgatcgatgccaaggaagtgagcgccgcccaccgggccagatacttctggggcaatctgcctggcatgaacagacccctggccagcaccgtgaacgacaagctggagctgcaggagtgcctggagcacggccggatcgccaagttcagcaaggtgagaaccatcaccacccgaagcaacagcatcaaacaaggcaaggaccagcactttcctgtgttcatgaacgagaaggaggacatcctgtggtgtaccgagatggagagagtgttcgggttcccagtccactacacagatgtcagcaacatgtctagactggccagacagagactgctgggaagaagctggtccgtccctgtgatcagacacctgttcgcccctctgaaggagtacttcgcctgcgtgagcagcggcaacagcaacgccaacagccggggccccagcttctctagcggcctggtgccactgtccctgagagggagccacatgggccccatggagatctacaaaaccgtgagcgcctggaagcggcagcctgtgcgcgtgctgagcctgtttcggaatatcgataaagtcctgaaaagcctgggattcctggagagcggctctggctccggcggtggcaccctgaagtacgtggaggatgtgacaaacgtggtcagacgggatgtggagaagtggggccccttcgatctggtgtacggcagcacccaacccctgggcagctcttgtgaccggtgccctggctggtacatgtttcagttccaccggatcctgcagtacgccctgccgagacaggagtcccagcggccattcttttggattttcatggacaacttgctgctgaccgaggatgaccaggaaactaccactcggttcctgcagaccgaagccgtgaccctgcaggacgtgagaggccgggactaccagaacgccatgcgggtgtggtccaacatccctggactgaaaagcaagcacgcacctctgacccctaaagaagaggagtacctgcaggcccaggtgcggagcagaagcaagctggacgcccctaaggtggatctgctggtgaagaattgcctcctgcccctgagagagtacttcaagtatttcagccagaatagtctgcccctgggaggcagcggcggcggcgccctggtgacatttgaggacgtcgccgtgcggttcacccaggaggaatgggctctgctggatccttctcagaaaatcctgtaccgggacgtgatgagagagacataccggaatctgacctccgtgggcatcaactgggaatgttgggaccttgaagcctgcttcagaagcctgggaagaaacctgagagtgcaggtggtgaagagaaagtgcgagctgaccaacagcggcccctgcgccgagggcggcccaagcagcggcgcccctcctcccagcggcggcagcccagccggctccccaacctctaccgaggagggcacctctgagtccgccacccccgagagcggccctggcacctccaccgagcccagcgagggcagcgcacccggcagccctgccggcagccccacctccacagaggagggaaccagcaccgagcccagcgaaggcagcgccccaggcaccagcaccgagcctagtgagcaggagattaaacggatcaacaagatcagaagaagacttgtgaaagacagcaacaccaagaaggccggcaagacaggccccatgaaaaccctgctggttagagtgatgacacccgatctgagagagcggctggaaaacctgagaaagaagcctgaaaatatcccccagcccatcagcaatacatctagagccaacctgaataagctgctgaccgattacaccgaaatgaagaaggcgatcctgcatgtgtactgggaagagttccagaaggaccctgtgggcctgatgagccgggtggcccagcctgccagcaagaagatcgatcagaacaagctgaaacctgagatggacgagaagggcaacctgaccaccgccggctttgcctgctctcagtgtggccagcccctgttcgtgtacaagctggagcaggtgtctgagaagggcaaggcttacaccaactacttcggacggtgcaatgtggccgagcacgaaaagctgatcctgctggcccagctgaagcccgagaaggatagcgacgaagccgtgacatatagcctgggaaagtttgggcagagggccctggatttctacagcattcatgtgaccaaggagtccacccaccccgtgaagcccctggcccagatcgccggaaacagatacgcctccggacctgtgggaaaggccctgagcgacgcatgtatgggcacaatcgcctccttcctgtctaagtaccaggacatcatcatcgaacaccagaaggtggtgaagggcaaccagaagagactggagagcctgcgggagctggccggcaaggaaaacctggaataccctagcgtgaccctgccacctcagcctcacaccaaggagggcgttgatgcctacaacgaagtgatcgcccgggtgcgaatgtgggtgaacctgaacctgtggcagaagctgaagctaagcagagatgatgccaagcctctgctgagactgaagggattcccttcctttcctctggtcgagagacaggccaacgaagtggactggtgggacatggtgtgtaacgtgaagaagctgatcaacgagaaaaaggaggatggcaaggtgttttggcagaatctggctggctacaagagacaggaagccctgagaccatacctgagcagcgaggaagatcggaagaagggaaagaaattcgctcggtaccagctgggcgacctgctgctgcacctggaaaagaagcacggcgaggactggggaaaggtgtacgacgaggcctgggagcggattgacaagaaagtggaaggcctgagcaagcacatcaagctggaagaggaacggagaagcgaggacgcccagagcaaggccgccctgaccgactggctgcgggctaaggccagcttcgtgatcgagggcctgaaggaggccgacaaggacgagttctgcagatgcgagctgaagctgcagaagtggtacggggacctgcggggaaagcccttcgccatcgaagccgagaacagcatcctggacatcagcggcttcagcaagcagtacaactgtgccttcatctggcagaaggacggcgtgaagaagctgaacctgtacctgatcatcaactacttcaagggcggcaagctgcggttcaagaagatcaaacctgaagccttcgaagccaacagattctacaccgtgatcaacaaaaagagcggcgagatcgtgcccatggaggtgaacttcaacttcgacgaccccaacctgatcatcctgcctctggcctttggcaagagacagggcagagaattcatctggaacgacctgctgtccctggaaaccggcagcctgaagctggccaacggaagagtgatcgagaagacactgtacaacagaagaacccggcaggatgagcctgccctgttcgtggccctgaccttcgagcggcgggaggtcctggactcctccaatatcaaaccaatgaacctgatcggcgtggcaagaggcgaaaacatccccgccgtgatcgccctgaccgaccccgagggctgcccactgagccggtttaaggatagcctgggaaacccaacccacatcctgagaatcggcgagagctataaggagaagcagcggaccatccaggccaagaaggaggtggagcagcggagagccggcggctacagccggaagtacgccagcaaagccaagaatctggcagacgatatggtgagaaacaccgctagagatctgctgtactacgccgtgacccaggatgccatgctgatcttcgccaacctgagccggggcttcggccggcagggcaagcggaccttcatggccgagagacagtacacacggatggaggactggctgaccgccaagctggcctacgagggcctgagcaagacctacctgtccaagacactggcccagtacacctccaagacatgcagcaactgtgggtttaccatcaccagcgccgactacgacagggtgctggagaagctgaagaagacagcaacaggctggatgaccacaattaacggcaaggagctgaaggtggagggccagattacctactacaacagatacaagagacagaacgtagtcaaggacctgtccgtcgagctggatagactgagcgaagaatctgtgaacaacgacatctcctcctggacaaagggcagaagcggagaagctctgagcctcctgaagaaaagattctcccatagacccgtgcaggagaagttcgtgtgcctgaactgcggcttcgagacacacgcagccgagcaagccgccctgaacatcgccagatcctggctgttcctgcggagccaggagtacaagaaataccagacaaacaagacaaccggcaacaccgataagagagccttcgtcgagacctggcagtccttttaccggaagaagcttaaggaggtgtggaaacctgccgtgcggtctggcggatctggcggaggctccctgcaggaggccatcgtgttcgaggacgtggccgtgtacttcaccaggatcgagtggagctgcctggccccccaccagagggccctgtacagggacgtgatgctggagaactacggccacatggccagcctgggcttcctggtggccaagcccgccctgatcagcctgctggagcagggcgaggagcccggcgccctgatcctgcagggcaccgaggagcagggcagcaccgccagcctgtgcggcggcccaagcagcggcgcccctcctcccagcggcggcagcccagccggctccccaacctctaccgaggagggcacctctgagtccgccacccccgagagcggccctggcacctccaccgagcccagcgagggcagcgcacccggcagccctgccggcagccccacctccacagaggagggaaccagcaccgagcccagcgaaggcagcgccccaggcaccagcaccgagcctagtgagcaggagattaaacggatcaacaagatcagaagaagacttgtgaaagacagcaacaccaagaaggccggcaagacaggccccatgaaaaccctgctggttagagtgatgacacccgatctgagagagcggctggaaaacctgagaaagaagcctgaaaatatcccccagcccatcagcaatacatctagagccaacctgaataagctgctgaccgattacaccgaaatgaagaaggcgatcctgcatgtgtactgggaagagttccagaaggaccctgtgggcctgatgagccgggtggcccagcctgccagcaagaagatcgatcagaacaagctgaaacctgagatggacgagaagggcaacctgaccaccgccggctttgcctgctctcagtgtggccagcccctgttcgtgtacaagctggagcaggtgtctgagaagggcaaggcttacaccaactacttcggacggtgcaatgtggccgagcacgaaaagctgatcctgctggcccagctgaagcccgagaaggatagcgacgaagccgtgacatatagcctgggaaagtttgggcagagggccctggatttctacagcattcatgtgaccaaggagtccacccaccccgtgaagcccctggcccagatcgccggaaacagatacgcctccggacctgtgggaaaggccctgagcgacgcatgtatgggcacaatcgcctccttcctgtctaagtaccaggacatcatcatcgaacaccagaaggtggtgaagggcaaccagaagagactggagagcctgcgggagctggccggcaaggaaaacctggaataccctagcgtgaccctgccacctcagcctcacaccaaggagggcgttgatgcctacaacgaagtgatcgcccgggtgcgaatgtgggtgaacctgaacctgtggcagaagctgaagctaagcagagatgatgccaagcctctgctgagactgaagggattcccttcctttcctctggtcgagagacaggccaacgaagtggactggtgggacatggtgtgtaacgtgaagaagctgatcaacgagaaaaaggaggatggcaaggtgttttggcagaatctggctggctacaagagacaggaagccctgagaccatacctgagcagcgaggaagatcggaagaagggaaagaaattcgctcggtaccagctgggcgacctgctgctgcacctggaaaagaagcacggcgaggactggggaaaggtgtacgacgaggcctgggagcggattgacaagaaagtggaaggcctgagcaagcacatcaagctggaagaggaacggagaagcgaggacgcccagagcaaggccgccctgaccgactggctgcgggctaaggccagcttcgtgatcgagggcctgaaggaggccgacaaggacgagttctgcagatgcgagctgaagctgcagaagtggtacggggacctgcggggaaagcccttcgccatcgaagccgagaacagcatcctggacatcagcggcttcagcaagcagtacaactgtgccttcatctggcagaaggacggcgtgaagaagctgaacctgtacctgatcatcaactacttcaagggcggcaagctgcggttcaagaagatcaaacctgaagccttcgaagccaacagattctacaccgtgatcaacaaaaagagcggcgagatcgtgcccatggaggtgaacttcaacttcgacgaccccaacctgatcatcctgcctctggcctttggcaagagacagggcagagaattcatctggaacgacctgctgtccctggaaaccggcagcctgaagctggccaacggaagagtgatcgagaagacactgtacaacagaagaacccggcaggatgagcctgccctgttcgtggccctgaccttcgagcggcgggaggtcctggactcctccaatatcaaaccaatgaacctgatcggcgtggcaagaggcgaaaacatccccgccgtgatcgccctgaccgaccccgagggctgcccactgagccggtttaaggatagcctgggaaacccaacccacatcctgagaatcggcgagagctataaggagaagcagcggaccatccaggccaagaaggaggtggagcagcggagagccggcggctacagccggaagtacgccagcaaagccaagaatctggcagacgatatggtgagaaacaccgctagagatctgctgtactacgccgtgacccaggatgccatgctgatcttcgccaacctgagccggggcttcggccggcagggcaagcggaccttcatggccgagagacagtacacacggatggaggactggctgaccgccaagctggcctacgagggcctgagcaagacctacctgtccaagacactggcccagtacacctccaagacatgcagcaactgtgggtttaccatcaccagcgccgactacgacagggtgctggagaagctgaagaagacagcaacaggctggatgaccacaattaacggcaaggagctgaaggtggagggccagattacctactacaacagatacaagagacagaacgtagtcaaggacctgtccgtcgagctggatagactgagcgaagaatctgtgaacaacgacatctcctcctggacaaagggcagaagcggagaagctctgagcctcctgaagaaaagattctcccatagacccgtgcaggagaagttcgtgtgcctgaactgcggcttcgagacacacgcagccgagcaagccgccctgaacatcgccagatcctggctgttcctgcggagccaggagtacaagaaataccagacaaacaagacaaccggcaacaccgataagagagccttcgtcgagacctggcagtccttttaccggaagaagcttaaggaggtgtggaaacctgccgtgcggtctggcggatctggcggaggctcctctgcaggaggccatcgtgttcgaggacgtggccgtgtacttcaccaggatcgagtggagctgcctggccccccaccagagggccctgtacagggacgtgatgctggagaactacggccacatggccagcctgggcttcctggtggccaagcccgccctgatcagcctgctggagcagggcgaggagcccggcgccctgatcctgcagggcaccgaggagcagggcagcaccgccagcctgtgcggatctggctccggcagcggccccaagaaaaagagaaaagtctaagctgccttctgcggggcttgccttctggccatgcccttcttctctcccttgcacctgtacctcttggtctttgaataaagcctgagtaggaaggctagcaaaaaaaaaaaaaaaaaaaaaaaaaaaaaaaaaaaaaaaaaaaaaaaaaaaaaaaaaaaaaaaaaaaaaaaaaaaaaaaa

SEQ ID NO: 15732 - RNA, 9485 nt, synthetic construct
  source 1..9485: mol_type = other RNA
aggaaataagagagaaaagaagagtaagaagaaatataagagccaccatggcccctaagaagaagcgtaaagtgagccggatggaacgcctcgtctacgaggtgcggcagaagtgcagaaacatcgaggacatctgcatctcctgcggatctctgaacgtgaccctggagcacccactgttcatcggcggcatgtgccagaactgtaaaaactgttttctggagtgtgcctatcaatacgacgatgacggctaccagagctactgcaccatctgttgcggcggaagagaggtgctgatgtgtggaaataacaactgctgccggtgcttctgcgtggaatgcgtggacctgctggtgggccccggcgccgcccaggccgctattaaggaagatccttggaactgctacatgtgcggccacaagggcacatacggcctgctgagacggagagaggactggcctagcagactgcagatgttcttcgccaataaccacgaccaggagttcgacccccctaaggtgtaccctcccgtccccgccgagaagagaaagcccatccgggtcctgagcctgttcgatggcatcgccaccggtctgctggtgctgaaggacctgggcatccaggtggataggtacattgcctccgaggtgtgcgaggactccatcaccgtgggaatggtgcgtcatcagggcaagatcatgtacgtgggcgacgtgcggagcgtgacacagaagcatatccaggagtggggccctttcgacctggtgatcggcggcagcccttgcaatgacctgagcatcgtgaacccagcccggaagggcctgtacgagggaaccggcagactgttcttcgagttttacagactgctgcacgacgcccggcctaaggaaggcgacgaccggcccttcttttggctgttcgagaatgtggtggccatgggagtcagcgacaagcgggatattagccggttcctggagagcaaccccgtgatgatcgatgccaaggaagtgagcgccgcccaccgggccagatacttctggggcaatctgcctggcatgaacagacccctggccagcaccgtgaacgacaagctggagctgcaggagtgcctggagcacggccggatcgccaagttcagcaaggtgagaaccatcaccacccgaagcaacagcatcaaacaaggcaaggaccagcactttcctgtgttcatgaacgagaaggaggacatcctgtggtgtaccgagatggagagagtgttcgggttcccagtccactacacagatgtcagcaacatgtctagactggccagacagagactgctgggaagaagctggtccgtccctgtgatcagacacctgttcgcccctctgaaggagtacttcgcctgcgtgagcagcggcaacagcaacgccaacagccggggccccagcttctctagcggcctggtgccactgtccctgagagggagccacatgggccccatggagatctacaaaaccgtgagcgcctggaagcggcagcctgtgcgcgtgctgagcctgtttcggaatatcgataaagtcctgaaaagcctgggattcctggagagcggctctggctccggcggtggcaccctgaagtacgtggaggatgtgacaaacgtggtcagacgggatgtggagaagtggggccccttcgatctggtgtacggcagcacccaacccctgggcagctcttgtgaccggtgccctggctggtacatgtttcagttccaccggatcctgcagtacgccctgccgagacaggagtcccagcggccattcttttggattttcatggacaacttgctgctgaccgaggatgaccaggaaactaccactcggttcctgcagaccgaagccgtgaccctgcaggacgtgagaggccgggactaccagaacgccatgcgggtgtggtccaacatccctggactgaaaagcaagcacgcacctctgacccctaaagaagaggagtacctgcaggcccaggtgcggagcagaagcaagctggacgcccctaaggtggatctgctggtgaagaattgcctcctgcccctgagagagtacttcaagtatttcagccagaatagtctgcccctgggaggcagcggcggcggcgccctggtgacatttgaggacgtcgccgtgcggttcacccaggaggaatgggctctgctggatccttctcagaaaatcctgtaccgggacgtgatgagagagacataccggaatctgacctccgtgggcatcaactgggaatgttgggaccttgaagcctgcttcagaagcctgggaagaaacctgagagtgcaggtggtgaagagaaagtgcgagctgaccaacagcggcccctgcgccgagggcggcccaagcagcggcgcccctcctcccagcggcggcagcccagccggctccccaacctctaccgaggagggcacctctgagtccgccacccccgagagcggccctggcacctccaccgagcccagcgagggcagcgcacccggcagccctgccggcagccccacctccacagaggagggaaccagcaccgagcccagcgaaggcagcgccccaggcaccagcaccgagcctagtgagcaggagattaaacggatcaacaagatcagaagaagacttgtgaaagacagcaacaccaagaaggccggcaagacaggccccatgaaaaccctgctggttagagtgatgacacccgatctgagagagcggctggaaaacctgagaaagaagcctgaaaatatcccccagcccatcagcaatacatctagagccaacctgaataagctgctgaccgattacaccgaaatgaagaaggcgatcctgcatgtgtactgggaagagttccagaaggaccctgtgggcctgatgagccgggtggcccagcctgccagcaagaagatcgatcagaacaagctgaaacctgagatggacgagaagggcaacctgaccaccgccggctttgcctgctctcagtgtggccagcccctgttcgtgtacaagctggagcaggtgtctgagaagggcaaggcttacaccaactacttcggacggtgcaatgtggccgagcacgaaaagctgatcctgctggcccagctgaagcccgagaaggatagcgacgaagccgtgacatatagcctgggaaagtttgggcagagggccctggatttctacagcattcatgtgaccaaggagtccacccaccccgtgaagcccctggcccagatcgccggaaacagatacgcctccggacctgtgggaaaggccctgagcgacgcatgtatgggcacaatcgcctccttcctgtctaagtaccaggacatcatcatcgaacaccagaaggtggtgaagggcaaccagaagagactggagagcctgcgggagctggccggcaaggaaaacctggaataccctagcgtgaccctgccacctcagcctcacaccaaggagggcgttgatgcctacaacgaagtgatcgcccgggtgcgaatgtgggtgaacctgaacctgtggcagaagctgaagctaagcagagatgatgccaagcctctgctgagactgaagggattcccttcctttcctctggtcgagagacaggccaacgaagtggactggtgggacatggtgtgtaacgtgaagaagctgatcaacgagaaaaaggaggatggcaaggtgttttggcagaatctggctggctacaagagacaggaagccctgagaccatacctgagcagcgaggaagatcggaagaagggaaagaaattcgctcggtaccagctgggcgacctgctgctgcacctggaaaagaagcacggcgaggactggggaaaggtgtacgacgaggcctgggagcggattgacaagaaagtggaaggcctgagcaagcacatcaagctggaagaggaacggagaagcgaggacgcccagagcaaggccgccctgaccgactggctgcgggctaaggccagcttcgtgatcgagggcctgaaggaggccgacaaggacgagttctgcagatgcgagctgaagctgcagaagtggtacggggacctgcggggaaagcccttcgccatcgaagccgagaacagcatcctggacatcagcggcttcagcaagcagtacaactgtgccttcatctggcagaaggacggcgtgaagaagctgaacctgtacctgatcatcaactacttcaagggcggcaagctgcggttcaagaagatcaaacctgaagccttcgaagccaacagattctacaccgtgatcaacaaaaagagcggcgagatcgtgcccatggaggtgaacttcaacttcgacgaccccaacctgatcatcctgcctctggcctttggcaagagacagggcagagaattcatctggaacgacctgctgtccctggaaaccggcagcctgaagctggccaacggaagagtgatcgagaagacactgtacaacagaagaacccggcaggatgagcctgccctgttcgtggccctgaccttcgagcggcgggaggtcctggactcctccaatatcaaaccaatgaacctgatcggcgtggcaagaggcgaaaacatccccgccgtgatcgccctgaccgaccccgagggctgcccactgagccggtttaaggatagcctgggaaacccaacccacatcctgagaatcggcgagagctataaggagaagcagcggaccatccaggccaagaaggaggtggagcagcggagagccggcggctacagccggaagtacgccagcaaagccaagaatctggcagacgatatggtgagaaacaccgctagagatctgctgtactacgccgtgacccaggatgccatgctgatcttcgccaacctgagccggggcttcggccggcagggcaagcggaccttcatggccgagagacagtacacacggatggaggactggctgaccgccaagctggcctacgagggcctgagcaagacctacctgtccaagacactggcccagtacacctccaagacatgcagcaactgtgggtttaccatcaccagcgccgactacgacagggtgctggagaagctgaagaagacagcaacaggctggatgaccacaattaacggcaaggagctgaaggtggagggccagattacctactacaacagatacaagagacagaacgtagtcaaggacctgtccgtcgagctggatagactgagcgaagaatctgtgaacaacgacatctcctcctggacaaagggcagaagcggagaagctctgagcctcctgaagaaaagattctcccatagacccgtgcaggagaagttcgtgtgcctgaactgcggcttcgagacacacgcagccgagcaagccgccctgaacatcgccagatcctggctgttcctgcggagccaggagtacaagaaataccagacaaacaagacaaccggcaacaccgataagagagccttcgtcgagacctggcagtccttttaccggaagaagcttaaggaggtgtggaaacctgccgtgcggtctggcggatctggcggaggctccatgctgaccttcagggacgtgttcatcgagttcagccaggaggagtgggagtgcctggaccccgcccagaggaagctgtacatggacgtgatgctggagagctacaggaacctggtgagcctgggccacagcatcagcaagcccgacgtgatcaccctgctggagcagggcaaggacccctgcatggtggtgagggaggagaccaggaggtggtgcaccggcaagaacaagagcggcaggaggggcggcccaagcagcggcgcccctcctcccagcggcggcagcccagccggctccccaacctctaccgaggagggcacctctgagtccgccacccccgagagcggccctggcacctccaccgagcccagcgagggcagcgcacccggcagccctgccggcagccccacctccacagaggagggaaccagcaccgagcccagcgaaggcagcgccccaggcaccagcaccgagcctagtgagcaggagattaaacggatcaacaagatcagaagaagacttgtgaaagacagcaacaccaagaaggccggcaagacaggccccatgaaaaccctgctggttagagtgatgacacccgatctgagagagcggctggaaaacctgagaaagaagcctgaaaatatcccccagcccatcagcaatacatctagagccaacctgaataagctgctgaccgattacaccgaaatgaagaaggcgatcctgcatgtgtactgggaagagttccagaaggaccctgtgggcctgatgagccgggtggcccagcctgccagcaagaagatcgatcagaacaagctgaaacctgagatggacgagaagggcaacctgaccaccgccggctttgcctgctctcagtgtggccagcccctgttcgtgtacaagctggagcaggtgtctgagaagggcaaggcttacaccaactacttcggacggtgcaatgtggccgagcacgaaaagctgatcctgctggcccagctgaagcccgagaaggatagcgacgaagccgtgacatatagcctgggaaagtttgggcagagggccctggatttctacagcattcatgtgaccaaggagtccacccaccccgtgaagcccctggcccagatcgccggaaacagatacgcctccggacctgtgggaaaggccctgagcgacgcatgtatgggcacaatcgcctccttcctgtctaagtaccaggacatcatcatcgaacaccagaaggtggtgaagggcaaccagaagagactggagagcctgcgggagctggccggcaaggaaaacctggaataccctagcgtgaccctgccacctcagcctcacaccaaggagggcgttgatgcctacaacgaagtgatcgcccgggtgcgaatgtgggtgaacctgaacctgtggcagaagctgaagctaagcagagatgatgccaagcctctgctgagactgaagggattcccttcctttcctctggtcgagagacaggccaacgaagtggactggtgggacatggtgtgtaacgtgaagaagctgatcaacgagaaaaaggaggatggcaaggtgttttggcagaatctggctggctacaagagacaggaagccctgagaccatacctgagcagcgaggaagatcggaagaagggaaagaaattcgctcggtaccagctgggcgacctgctgctgcacctggaaaagaagcacggcgaggactggggaaaggtgtacgacgaggcctgggagcggattgacaagaaagtggaaggcctgagcaagcacatcaagctggaagaggaacggagaagcgaggacgcccagagcaaggccgccctgaccgactggctgcgggctaaggccagcttcgtgatcgagggcctgaaggaggccgacaaggacgagttctgcagatgcgagctgaagctgcagaagtggtacggggacctgcggggaaagcccttcgccatcgaagccgagaacagcatcctggacatcagcggcttcagcaagcagtacaactgtgccttcatctggcagaaggacggcgtgaagaagctgaacctgtacctgatcatcaactacttcaagggcggcaagctgcggttcaagaagatcaaacctgaagccttcgaagccaacagattctacaccgtgatcaacaaaaagagcggcgagatcgtgcccatggaggtgaacttcaacttcgacgaccccaacctgatcatcctgcctctggcctttggcaagagacagggcagagaattcatctggaacgacctgctgtccctggaaaccggcagcctgaagctggccaacggaagagtgatcgagaagacactgtacaacagaagaacccggcaggatgagcctgccctgttcgtggccctgaccttcgagcggcgggaggtcctggactcctccaatatcaaaccaatgaacctgatcggcgtggcaagaggcgaaaacatccccgccgtgatcgccctgaccgaccccgagggctgcccactgagccggtttaaggatagcctgggaaacccaacccacatcctgagaatcggcgagagctataaggagaagcagcggaccatccaggccaagaaggaggtggagcagcggagagccggcggctacagccggaagtacgccagcaaagccaagaatctggcagacgatatggtgagaaacaccgctagagatctgctgtactacgccgtgacccaggatgccatgctgatcttcgccaacctgagccggggcttcggccggcagggcaagcggaccttcatggccgagagacagtacacacggatggaggactggctgaccgccaagctggcctacgagggcctgagcaagacctacctgtccaagacactggcccagtacacctccaagacatgcagcaactgtgggtttaccatcaccagcgccgactacgacagggtgctggagaagctgaagaagacagcaacaggctggatgaccacaattaacggcaaggagctgaaggtggagggccagattacctactacaacagatacaagagacagaacgtagtcaaggacctgtccgtcgagctggatagactgagcgaagaatctgtgaacaacgacatctcctcctggacaaagggcagaagcggagaagctctgagcctcctgaagaaaagattctcccatagacccgtgcaggagaagttcgtgtgcctgaactgcggcttcgagacacacgcagccgagcaagccgccctgaacatcgccagatcctggctgttcctgcggagccaggagtacaagaaataccagacaaacaagacaaccggcaacaccgataagagagccttcgtcgagacctggcagtccttttaccggaagaagcttaaggaggtgtggaaacctgccgtgcggtctggcggatctggcggaggctcctatgctgaccttcagggacgtgttcatcgagttcagccaggaggagtgggagtgcctggaccccgcccagaggaagctgtacatggacgtgatgctggagagctacaggaacctggtgagcctgggccacagcatcagcaagcccgacgtgatcaccctgctggagcagggcaaggacccctgcatggtggtgagggaggagaccaggaggtggtgcaccggcaagaacaagagcggcaggaggggatctggctccggcagcggccccaagaaaaagagaaaagtctaagctgccttctgcggggcttgccttctggccatgcccttcttctctcccttgcacctgtacctcttggtctttgaataaagcctgagtaggaaggctagcaaaaaaaaaaaaaaaaaaaaaaaaaaaaaaaaaaaaaaaaaaaaaaaaaaaaaaaaaaaaaaaaaaaaaaaaaaaaaaaa

SEQ ID NO: 15733 - RNA, 9485 nt, synthetic construct
  source 1..9485: mol_type = other RNA
aggaaataagagagaaaagaagagtaagaagaaatataagagccaccatggcccctaagaagaagcgtaaagtgagccggatggaacgcctcgtctacgaggtgcggcagaagtgcagaaacatcgaggacatctgcatctcctgcggatctctgaacgtgaccctggagcacccactgttcatcggcggcatgtgccagaactgtaaaaactgttttctggagtgtgcctatcaatacgacgatgacggctaccagagctactgcaccatctgttgcggcggaagagaggtgctgatgtgtggaaataacaactgctgccggtgcttctgcgtggaatgcgtggacctgctggtgggccccggcgccgcccaggccgctattaaggaagatccttggaactgctacatgtgcggccacaagggcacatacggcctgctgagacggagagaggactggcctagcagactgcagatgttcttcgccaataaccacgaccaggagttcgacccccctaaggtgtaccctcccgtccccgccgagaagagaaagcccatccgggtcctgagcctgttcgatggcatcgccaccggtctgctggtgctgaaggacctgggcatccaggtggataggtacattgcctccgaggtgtgcgaggactccatcaccgtgggaatggtgcgtcatcagggcaagatcatgtacgtgggcgacgtgcggagcgtgacacagaagcatatccaggagtggggccctttcgacctggtgatcggcggcagcccttgcaatgacctgagcatcgtgaacccagcccggaagggcctgtacgagggaaccggcagactgttcttcgagttttacagactgctgcacgacgcccggcctaaggaaggcgacgaccggcccttcttttggctgttcgagaatgtggtggccatgggagtcagcgacaagcgggatattagccggttcctggagagcaaccccgtgatgatcgatgccaaggaagtgagcgccgcccaccgggccagatacttctggggcaatctgcctggcatgaacagacccctggccagcaccgtgaacgacaagctggagctgcaggagtgcctggagcacggccggatcgccaagttcagcaaggtgagaaccatcaccacccgaagcaacagcatcaaacaaggcaaggaccagcactttcctgtgttcatgaacgagaaggaggacatcctgtggtgtaccgagatggagagagtgttcgggttcccagtccactacacagatgtcagcaacatgtctagactggccagacagagactgctgggaagaagctggtccgtccctgtgatcagacacctgttcgcccctctgaaggagtacttcgcctgcgtgagcagcggcaacagcaacgccaacagccggggccccagcttctctagcggcctggtgccactgtccctgagagggagccacatgggccccatggagatctacaaaaccgtgagcgcctggaagcggcagcctgtgcgcgtgctgagcctgtttcggaatatcgataaagtcctgaaaagcctgggattcctggagagcggctctggctccggcggtggcaccctgaagtacgtggaggatgtgacaaacgtggtcagacgggatgtggagaagtggggccccttcgatctggtgtacggcagcacccaacccctgggcagctcttgtgaccggtgccctggctggtacatgtttcagttccaccggatcctgcagtacgccctgccgagacaggagtcccagcggccattcttttggattttcatggacaacttgctgctgaccgaggatgaccaggaaactaccactcggttcctgcagaccgaagccgtgaccctgcaggacgtgagaggccgggactaccagaacgccatgcgggtgtggtccaacatccctggactgaaaagcaagcacgcacctctgacccctaaagaagaggagtacctgcaggcccaggtgcggagcagaagcaagctggacgcccctaaggtggatctgctggtgaagaattgcctcctgcccctgagagagtacttcaagtatttcagccagaatagtctgcccctgggaggcagcggcggcggcgccctggtgacatttgaggacgtcgccgtgcggttcacccaggaggaatgggctctgctggatccttctcagaaaatcctgtaccgggacgtgatgagagagacataccggaatctgacctccgtgggcatcaactgggaatgttgggaccttgaagcctgcttcagaagcctgggaagaaacctgagagtgcaggtggtgaagagaaagtgcgagctgaccaacagcggcccctgcgccgagggcggcccaagcagcggcgcccctcctcccagcggcggcagcccagccggctccccaacctctaccgaggagggcacctctgagtccgccacccccgagagcggccctggcacctccaccgagcccagcgagggcagcgcacccggcagccctgccggcagccccacctccacagaggagggaaccagcaccgagcccagcgaaggcagcgccccaggcaccagcaccgagcctagtgagcaggagattaaacggatcaacaagatcagaagaagacttgtgaaagacagcaacaccaagaaggccggcaagacaggccccatgaaaaccctgctggttagagtgatgacacccgatctgagagagcggctggaaaacctgagaaagaagcctgaaaatatcccccagcccatcagcaatacatctagagccaacctgaataagctgctgaccgattacaccgaaatgaagaaggcgatcctgcatgtgtactgggaagagttccagaaggaccctgtgggcctgatgagccgggtggcccagcctgccagcaagaagatcgatcagaacaagctgaaacctgagatggacgagaagggcaacctgaccaccgccggctttgcctgctctcagtgtggccagcccctgttcgtgtacaagctggagcaggtgtctgagaagggcaaggcttacaccaactacttcggacggtgcaatgtggccgagcacgaaaagctgatcctgctggcccagctgaagcccgagaaggatagcgacgaagccgtgacatatagcctgggaaagtttgggcagagggccctggatttctacagcattcatgtgaccaaggagtccacccaccccgtgaagcccctggcccagatcgccggaaacagatacgcctccggacctgtgggaaaggccctgagcgacgcatgtatgggcacaatcgcctccttcctgtctaagtaccaggacatcatcatcgaacaccagaaggtggtgaagggcaaccagaagagactggagagcctgcgggagctggccggcaaggaaaacctggaataccctagcgtgaccctgccacctcagcctcacaccaaggagggcgttgatgcctacaacgaagtgatcgcccgggtgcgaatgtgggtgaacctgaacctgtggcagaagctgaagctaagcagagatgatgccaagcctctgctgagactgaagggattcccttcctttcctctggtcgagagacaggccaacgaagtggactggtgggacatggtgtgtaacgtgaagaagctgatcaacgagaaaaaggaggatggcaaggtgttttggcagaatctggctggctacaagagacaggaagccctgagaccatacctgagcagcgaggaagatcggaagaagggaaagaaattcgctcggtaccagctgggcgacctgctgctgcacctggaaaagaagcacggcgaggactggggaaaggtgtacgacgaggcctgggagcggattgacaagaaagtggaaggcctgagcaagcacatcaagctggaagaggaacggagaagcgaggacgcccagagcaaggccgccctgaccgactggctgcgggctaaggccagcttcgtgatcgagggcctgaaggaggccgacaaggacgagttctgcagatgcgagctgaagctgcagaagtggtacggggacctgcggggaaagcccttcgccatcgaagccgagaacagcatcctggacatcagcggcttcagcaagcagtacaactgtgccttcatctggcagaaggacggcgtgaagaagctgaacctgtacctgatcatcaactacttcaagggcggcaagctgcggttcaagaagatcaaacctgaagccttcgaagccaacagattctacaccgtgatcaacaaaaagagcggcgagatcgtgcccatggaggtgaacttcaacttcgacgaccccaacctgatcatcctgcctctggcctttggcaagagacagggcagagaattcatctggaacgacctgctgtccctggaaaccggcagcctgaagctggccaacggaagagtgatcgagaagacactgtacaacagaagaacccggcaggatgagcctgccctgttcgtggccctgaccttcgagcggcgggaggtcctggactcctccaatatcaaaccaatgaacctgatcggcgtggcaagaggcgaaaacatccccgccgtgatcgccctgaccgaccccgagggctgcccactgagccggtttaaggatagcctgggaaacccaacccacatcctgagaatcggcgagagctataaggagaagcagcggaccatccaggccaagaaggaggtggagcagcggagagccggcggctacagccggaagtacgccagcaaagccaagaatctggcagacgatatggtgagaaacaccgctagagatctgctgtactacgccgtgacccaggatgccatgctgatcttcgccaacctgagccggggcttcggccggcagggcaagcggaccttcatggccgagagacagtacacacggatggaggactggctgaccgccaagctggcctacgagggcctgagcaagacctacctgtccaagacactggcccagtacacctccaagacatgcagcaactgtgggtttaccatcaccagcgccgactacgacagggtgctggagaagctgaagaagacagcaacaggctggatgaccacaattaacggcaaggagctgaaggtggagggccagattacctactacaacagatacaagagacagaacgtagtcaaggacctgtccgtcgagctggatagactgagcgaagaatctgtgaacaacgacatctcctcctggacaaagggcagaagcggagaagctctgagcctcctgaagaaaagattctcccatagacccgtgcaggagaagttcgtgtgcctgaactgcggcttcgagacacacgcagccgagcaagccgccctgaacatcgccagatcctggctgttcctgcggagccaggagtacaagaaataccagacaaacaagacaaccggcaacaccgataagagagccttcgtcgagacctggcagtccttttaccggaagaagcttaaggaggtgtggaaacctgccgtgcggtctggcggatctggcggaggctccagcgtggccttcgaggacgtggccgtgaacttcacccaggaggagtggagcctgctggaccccagccagaagaacctgtacagggaggtgatgcaggagaccctgaggaacctggccagcatcggcaagaagtggaaggaccagaacatcgagaacgagtacaagaaccccaggagcaaccagaggggcctgatggaggagaggctgttcgagagcgagggccaccagcccggcgagatcctgggcggcccaagcagcggcgcccctcctcccagcggcggcagcccagccggctccccaacctctaccgaggagggcacctctgagtccgccacccccgagagcggccctggcacctccaccgagcccagcgagggcagcgcacccggcagccctgccggcagccccacctccacagaggagggaaccagcaccgagcccagcgaaggcagcgccccaggcaccagcaccgagcctagtgagcaggagattaaacggatcaacaagatcagaagaagacttgtgaaagacagcaacaccaagaaggccggcaagacaggccccatgaaaaccctgctggttagagtgatgacacccgatctgagagagcggctggaaaacctgagaaagaagcctgaaaatatcccccagcccatcagcaatacatctagagccaacctgaataagctgctgaccgattacaccgaaatgaagaaggcgatcctgcatgtgtactgggaagagttccagaaggaccctgtgggcctgatgagccgggtggcccagcctgccagcaagaagatcgatcagaacaagctgaaacctgagatggacgagaagggcaacctgaccaccgccggctttgcctgctctcagtgtggccagcccctgttcgtgtacaagctggagcaggtgtctgagaagggcaaggcttacaccaactacttcggacggtgcaatgtggccgagcacgaaaagctgatcctgctggcccagctgaagcccgagaaggatagcgacgaagccgtgacatatagcctgggaaagtttgggcagagggccctggatttctacagcattcatgtgaccaaggagtccacccaccccgtgaagcccctggcccagatcgccggaaacagatacgcctccggacctgtgggaaaggccctgagcgacgcatgtatgggcacaatcgcctccttcctgtctaagtaccaggacatcatcatcgaacaccagaaggtggtgaagggcaaccagaagagactggagagcctgcgggagctggccggcaaggaaaacctggaataccctagcgtgaccctgccacctcagcctcacaccaaggagggcgttgatgcctacaacgaagtgatcgcccgggtgcgaatgtgggtgaacctgaacctgtggcagaagctgaagctaagcagagatgatgccaagcctctgctgagactgaagggattcccttcctttcctctggtcgagagacaggccaacgaagtggactggtgggacatggtgtgtaacgtgaagaagctgatcaacgagaaaaaggaggatggcaaggtgttttggcagaatctggctggctacaagagacaggaagccctgagaccatacctgagcagcgaggaagatcggaagaagggaaagaaattcgctcggtaccagctgggcgacctgctgctgcacctggaaaagaagcacggcgaggactggggaaaggtgtacgacgaggcctgggagcggattgacaagaaagtggaaggcctgagcaagcacatcaagctggaagaggaacggagaagcgaggacgcccagagcaaggccgccctgaccgactggctgcgggctaaggccagcttcgtgatcgagggcctgaaggaggccgacaaggacgagttctgcagatgcgagctgaagctgcagaagtggtacggggacctgcggggaaagcccttcgccatcgaagccgagaacagcatcctggacatcagcggcttcagcaagcagtacaactgtgccttcatctggcagaaggacggcgtgaagaagctgaacctgtacctgatcatcaactacttcaagggcggcaagctgcggttcaagaagatcaaacctgaagccttcgaagccaacagattctacaccgtgatcaacaaaaagagcggcgagatcgtgcccatggaggtgaacttcaacttcgacgaccccaacctgatcatcctgcctctggcctttggcaagagacagggcagagaattcatctggaacgacctgctgtccctggaaaccggcagcctgaagctggccaacggaagagtgatcgagaagacactgtacaacagaagaacccggcaggatgagcctgccctgttcgtggccctgaccttcgagcggcgggaggtcctggactcctccaatatcaaaccaatgaacctgatcggcgtggcaagaggcgaaaacatccccgccgtgatcgccctgaccgaccccgagggctgcccactgagccggtttaaggatagcctgggaaacccaacccacatcctgagaatcggcgagagctataaggagaagcagcggaccatccaggccaagaaggaggtggagcagcggagagccggcggctacagccggaagtacgccagcaaagccaagaatctggcagacgatatggtgagaaacaccgctagagatctgctgtactacgccgtgacccaggatgccatgctgatcttcgccaacctgagccggggcttcggccggcagggcaagcggaccttcatggccgagagacagtacacacggatggaggactggctgaccgccaagctggcctacgagggcctgagcaagacctacctgtccaagacactggcccagtacacctccaagacatgcagcaactgtgggtttaccatcaccagcgccgactacgacagggtgctggagaagctgaagaagacagcaacaggctggatgaccacaattaacggcaaggagctgaaggtggagggccagattacctactacaacagatacaagagacagaacgtagtcaaggacctgtccgtcgagctggatagactgagcgaagaatctgtgaacaacgacatctcctcctggacaaagggcagaagcggagaagctctgagcctcctgaagaaaagattctcccatagacccgtgcaggagaagttcgtgtgcctgaactgcggcttcgagacacacgcagccgagcaagccgccctgaacatcgccagatcctggctgttcctgcggagccaggagtacaagaaataccagacaaacaagacaaccggcaacaccgataagagagccttcgtcgagacctggcagtccttttaccggaagaagcttaaggaggtgtggaaacctgccgtgcggtctggcggatctggcggaggctcctagcgtggccttcgaggacgtggccgtgaacttcacccaggaggagtggagcctgctggaccccagccagaagaacctgtacagggaggtgatgcaggagaccctgaggaacctggccagcatcggcaagaagtggaaggaccagaacatcgagaacgagtacaagaaccccaggagcaaccagaggggcctgatggaggagaggctgttcgagagcgagggccaccagcccggcgagatcctgggatctggctccggcagcggccccaagaaaaagagaaaagtctaagctgccttctgcggggcttgccttctggccatgcccttcttctctcccttgcacctgtacctcttggtctttgaataaagcctgagtaggaaggctagcaaaaaaaaaaaaaaaaaaaaaaaaaaaaaaaaaaaaaaaaaaaaaaaaaaaaaaaaaaaaaaaaaaaaaaaaaaaaaaaa

SEQ ID NO: 15734 - RNA, 9485 nt, synthetic construct
  source 1..9485: mol_type = other RNA
aggaaataagagagaaaagaagagtaagaagaaatataagagccaccatggcccctaagaagaagcgtaaagtgagccggatggaacgcctcgtctacgaggtgcggcagaagtgcagaaacatcgaggacatctgcatctcctgcggatctctgaacgtgaccctggagcacccactgttcatcggcggcatgtgccagaactgtaaaaactgttttctggagtgtgcctatcaatacgacgatgacggctaccagagctactgcaccatctgttgcggcggaagagaggtgctgatgtgtggaaataacaactgctgccggtgcttctgcgtggaatgcgtggacctgctggtgggccccggcgccgcccaggccgctattaaggaagatccttggaactgctacatgtgcggccacaagggcacatacggcctgctgagacggagagaggactggcctagcagactgcagatgttcttcgccaataaccacgaccaggagttcgacccccctaaggtgtaccctcccgtccccgccgagaagagaaagcccatccgggtcctgagcctgttcgatggcatcgccaccggtctgctggtgctgaaggacctgggcatccaggtggataggtacattgcctccgaggtgtgcgaggactccatcaccgtgggaatggtgcgtcatcagggcaagatcatgtacgtgggcgacgtgcggagcgtgacacagaagcatatccaggagtggggccctttcgacctggtgatcggcggcagcccttgcaatgacctgagcatcgtgaacccagcccggaagggcctgtacgagggaaccggcagactgttcttcgagttttacagactgctgcacgacgcccggcctaaggaaggcgacgaccggcccttcttttggctgttcgagaatgtggtggccatgggagtcagcgacaagcgggatattagccggttcctggagagcaaccccgtgatgatcgatgccaaggaagtgagcgccgcccaccgggccagatacttctggggcaatctgcctggcatgaacagacccctggccagcaccgtgaacgacaagctggagctgcaggagtgcctggagcacggccggatcgccaagttcagcaaggtgagaaccatcaccacccgaagcaacagcatcaaacaaggcaaggaccagcactttcctgtgttcatgaacgagaaggaggacatcctgtggtgtaccgagatggagagagtgttcgggttcccagtccactacacagatgtcagcaacatgtctagactggccagacagagactgctgggaagaagctggtccgtccctgtgatcagacacctgttcgcccctctgaaggagtacttcgcctgcgtgagcagcggcaacagcaacgccaacagccggggccccagcttctctagcggcctggtgccactgtccctgagagggagccacatgggccccatggagatctacaaaaccgtgagcgcctggaagcggcagcctgtgcgcgtgctgagcctgtttcggaatatcgataaagtcctgaaaagcctgggattcctggagagcggctctggctccggcggtggcaccctgaagtacgtggaggatgtgacaaacgtggtcagacgggatgtggagaagtggggccccttcgatctggtgtacggcagcacccaacccctgggcagctcttgtgaccggtgccctggctggtacatgtttcagttccaccggatcctgcagtacgccctgccgagacaggagtcccagcggccattcttttggattttcatggacaacttgctgctgaccgaggatgaccaggaaactaccactcggttcctgcagaccgaagccgtgaccctgcaggacgtgagaggccgggactaccagaacgccatgcgggtgtggtccaacatccctggactgaaaagcaagcacgcacctctgacccctaaagaagaggagtacctgcaggcccaggtgcggagcagaagcaagctggacgcccctaaggtggatctgctggtgaagaattgcctcctgcccctgagagagtacttcaagtatttcagccagaatagtctgcccctgggaggcagcggcggcggcgccctggtgacatttgaggacgtcgccgtgcggttcacccaggaggaatgggctctgctggatccttctcagaaaatcctgtaccgggacgtgatgagagagacataccggaatctgacctccgtgggcatcaactgggaatgttgggaccttgaagcctgcttcagaagcctgggaagaaacctgagagtgcaggtggtgaagagaaagtgcgagctgaccaacagcggcccctgcgccgagggcggcccaagcagcggcgcccctcctcccagcggcggcagcccagccggctccccaacctctaccgaggagggcacctctgagtccgccacccccgagagcggccctggcacctccaccgagcccagcgagggcagcgcacccggcagccctgccggcagccccacctccacagaggagggaaccagcaccgagcccagcgaaggcagcgccccaggcaccagcaccgagcctagtgagcaggagattaaacggatcaacaagatcagaagaagacttgtgaaagacagcaacaccaagaaggccggcaagacaggccccatgaaaaccctgctggttagagtgatgacacccgatctgagagagcggctggaaaacctgagaaagaagcctgaaaatatcccccagcccatcagcaatacatctagagccaacctgaataagctgctgaccgattacaccgaaatgaagaaggcgatcctgcatgtgtactgggaagagttccagaaggaccctgtgggcctgatgagccgggtggcccagcctgccagcaagaagatcgatcagaacaagctgaaacctgagatggacgagaagggcaacctgaccaccgccggctttgcctgctctcagtgtggccagcccctgttcgtgtacaagctggagcaggtgtctgagaagggcaaggcttacaccaactacttcggacggtgcaatgtggccgagcacgaaaagctgatcctgctggcccagctgaagcccgagaaggatagcgacgaagccgtgacatatagcctgggaaagtttgggcagagggccctggatttctacagcattcatgtgaccaaggagtccacccaccccgtgaagcccctggcccagatcgccggaaacagatacgcctccggacctgtgggaaaggccctgagcgacgcatgtatgggcacaatcgcctccttcctgtctaagtaccaggacatcatcatcgaacaccagaaggtggtgaagggcaaccagaagagactggagagcctgcgggagctggccggcaaggaaaacctggaataccctagcgtgaccctgccacctcagcctcacaccaaggagggcgttgatgcctacaacgaagtgatcgcccgggtgcgaatgtgggtgaacctgaacctgtggcagaagctgaagctaagcagagatgatgccaagcctctgctgagactgaagggattcccttcctttcctctggtcgagagacaggccaacgaagtggactggtgggacatggtgtgtaacgtgaagaagctgatcaacgagaaaaaggaggatggcaaggtgttttggcagaatctggctggctacaagagacaggaagccctgagaccatacctgagcagcgaggaagatcggaagaagggaaagaaattcgctcggtaccagctgggcgacctgctgctgcacctggaaaagaagcacggcgaggactggggaaaggtgtacgacgaggcctgggagcggattgacaagaaagtggaaggcctgagcaagcacatcaagctggaagaggaacggagaagcgaggacgcccagagcaaggccgccctgaccgactggctgcgggctaaggccagcttcgtgatcgagggcctgaaggaggccgacaaggacgagttctgcagatgcgagctgaagctgcagaagtggtacggggacctgcggggaaagcccttcgccatcgaagccgagaacagcatcctggacatcagcggcttcagcaagcagtacaactgtgccttcatctggcagaaggacggcgtgaagaagctgaacctgtacctgatcatcaactacttcaagggcggcaagctgcggttcaagaagatcaaacctgaagccttcgaagccaacagattctacaccgtgatcaacaaaaagagcggcgagatcgtgcccatggaggtgaacttcaacttcgacgaccccaacctgatcatcctgcctctggcctttggcaagagacagggcagagaattcatctggaacgacctgctgtccctggaaaccggcagcctgaagctggccaacggaagagtgatcgagaagacactgtacaacagaagaacccggcaggatgagcctgccctgttcgtggccctgaccttcgagcggcgggaggtcctggactcctccaatatcaaaccaatgaacctgatcggcgtggcaagaggcgaaaacatccccgccgtgatcgccctgaccgaccccgagggctgcccactgagccggtttaaggatagcctgggaaacccaacccacatcctgagaatcggcgagagctataaggagaagcagcggaccatccaggccaagaaggaggtggagcagcggagagccggcggctacagccggaagtacgccagcaaagccaagaatctggcagacgatatggtgagaaacaccgctagagatctgctgtactacgccgtgacccaggatgccatgctgatcttcgccaacctgagccggggcttcggccggcagggcaagcggaccttcatggccgagagacagtacacacggatggaggactggctgaccgccaagctggcctacgagggcctgagcaagacctacctgtccaagacactggcccagtacacctccaagacatgcagcaactgtgggtttaccatcaccagcgccgactacgacagggtgctggagaagctgaagaagacagcaacaggctggatgaccacaattaacggcaaggagctgaaggtggagggccagattacctactacaacagatacaagagacagaacgtagtcaaggacctgtccgtcgagctggatagactgagcgaagaatctgtgaacaacgacatctcctcctggacaaagggcagaagcggagaagctctgagcctcctgaagaaaagattctcccatagacccgtgcaggagaagttcgtgtgcctgaactgcggcttcgagacacacgcagccgagcaagccgccctgaacatcgccagatcctggctgttcctgcggagccaggagtacaagaaataccagacaaacaagacaaccggcaacaccgataagagagccttcgtcgagacctggcagtccttttaccggaagaagcttaaggaggtgtggaaacctgccgtgcggtctggcggatctggcggaggctccccccaggagagcgtgaccttcgaggacgtggccgtgaacttcagctacgaggagtggcagtgcctgacccacgcccagaggcacctgtacaccgacgtgatgctggagaactacggcaacatggtgagcctgggcttcagcttcagcaagccccccctgatcagcaggctggagcagggcaccgagccctacgtgcaggacaggcaggactgggagttcctgaactgcagctaccccgccgccggcggcccaagcagcggcgcccctcctcccagcggcggcagcccagccggctccccaacctctaccgaggagggcacctctgagtccgccacccccgagagcggccctggcacctccaccgagcccagcgagggcagcgcacccggcagccctgccggcagccccacctccacagaggagggaaccagcaccgagcccagcgaaggcagcgccccaggcaccagcaccgagcctagtgagcaggagattaaacggatcaacaagatcagaagaagacttgtgaaagacagcaacaccaagaaggccggcaagacaggccccatgaaaaccctgctggttagagtgatgacacccgatctgagagagcggctggaaaacctgagaaagaagcctgaaaatatcccccagcccatcagcaatacatctagagccaacctgaataagctgctgaccgattacaccgaaatgaagaaggcgatcctgcatgtgtactgggaagagttccagaaggaccctgtgggcctgatgagccgggtggcccagcctgccagcaagaagatcgatcagaacaagctgaaacctgagatggacgagaagggcaacctgaccaccgccggctttgcctgctctcagtgtggccagcccctgttcgtgtacaagctggagcaggtgtctgagaagggcaaggcttacaccaactacttcggacggtgcaatgtggccgagcacgaaaagctgatcctgctggcccagctgaagcccgagaaggatagcgacgaagccgtgacatatagcctgggaaagtttgggcagagggccctggatttctacagcattcatgtgaccaaggagtccacccaccccgtgaagcccctggcccagatcgccggaaacagatacgcctccggacctgtgggaaaggccctgagcgacgcatgtatgggcacaatcgcctccttcctgtctaagtaccaggacatcatcatcgaacaccagaaggtggtgaagggcaaccagaagagactggagagcctgcgggagctggccggcaaggaaaacctggaataccctagcgtgaccctgccacctcagcctcacaccaaggagggcgttgatgcctacaacgaagtgatcgcccgggtgcgaatgtgggtgaacctgaacctgtggcagaagctgaagctaagcagagatgatgccaagcctctgctgagactgaagggattcccttcctttcctctggtcgagagacaggccaacgaagtggactggtgggacatggtgtgtaacgtgaagaagctgatcaacgagaaaaaggaggatggcaaggtgttttggcagaatctggctggctacaagagacaggaagccctgagaccatacctgagcagcgaggaagatcggaagaagggaaagaaattcgctcggtaccagctgggcgacctgctgctgcacctggaaaagaagcacggcgaggactggggaaaggtgtacgacgaggcctgggagcggattgacaagaaagtggaaggcctgagcaagcacatcaagctggaagaggaacggagaagcgaggacgcccagagcaaggccgccctgaccgactggctgcgggctaaggccagcttcgtgatcgagggcctgaaggaggccgacaaggacgagttctgcagatgcgagctgaagctgcagaagtggtacggggacctgcggggaaagcccttcgccatcgaagccgagaacagcatcctggacatcagcggcttcagcaagcagtacaactgtgccttcatctggcagaaggacggcgtgaagaagctgaacctgtacctgatcatcaactacttcaagggcggcaagctgcggttcaagaagatcaaacctgaagccttcgaagccaacagattctacaccgtgatcaacaaaaagagcggcgagatcgtgcccatggaggtgaacttcaacttcgacgaccccaacctgatcatcctgcctctggcctttggcaagagacagggcagagaattcatctggaacgacctgctgtccctggaaaccggcagcctgaagctggccaacggaagagtgatcgagaagacactgtacaacagaagaacccggcaggatgagcctgccctgttcgtggccctgaccttcgagcggcgggaggtcctggactcctccaatatcaaaccaatgaacctgatcggcgtggcaagaggcgaaaacatccccgccgtgatcgccctgaccgaccccgagggctgcccactgagccggtttaaggatagcctgggaaacccaacccacatcctgagaatcggcgagagctataaggagaagcagcggaccatccaggccaagaaggaggtggagcagcggagagccggcggctacagccggaagtacgccagcaaagccaagaatctggcagacgatatggtgagaaacaccgctagagatctgctgtactacgccgtgacccaggatgccatgctgatcttcgccaacctgagccggggcttcggccggcagggcaagcggaccttcatggccgagagacagtacacacggatggaggactggctgaccgccaagctggcctacgagggcctgagcaagacctacctgtccaagacactggcccagtacacctccaagacatgcagcaactgtgggtttaccatcaccagcgccgactacgacagggtgctggagaagctgaagaagacagcaacaggctggatgaccacaattaacggcaaggagctgaaggtggagggccagattacctactacaacagatacaagagacagaacgtagtcaaggacctgtccgtcgagctggatagactgagcgaagaatctgtgaacaacgacatctcctcctggacaaagggcagaagcggagaagctctgagcctcctgaagaaaagattctcccatagacccgtgcaggagaagttcgtgtgcctgaactgcggcttcgagacacacgcagccgagcaagccgccctgaacatcgccagatcctggctgttcctgcggagccaggagtacaagaaataccagacaaacaagacaaccggcaacaccgataagagagccttcgtcgagacctggcagtccttttaccggaagaagcttaaggaggtgtggaaacctgccgtgcggtctggcggatctggcggaggctcctccccaggagagcgtgaccttcgaggacgtggccgtgaacttcagctacgaggagtggcagtgcctgacccacgcccagaggcacctgtacaccgacgtgatgctggagaactacggcaacatggtgagcctgggcttcagcttcagcaagccccccctgatcagcaggctggagcagggcaccgagccctacgtgcaggacaggcaggactgggagttcctgaactgcagctaccccgccgccggatctggctccggcagcggccccaagaaaaagagaaaagtctaagctgccttctgcggggcttgccttctggccatgcccttcttctctcccttgcacctgtacctcttggtctttgaataaagcctgagtaggaaggctagcaaaaaaaaaaaaaaaaaaaaaaaaaaaaaaaaaaaaaaaaaaaaaaaaaaaaaaaaaaaaaaaaaaaaaaaaaaaaaaaa

SEQ ID NO: 15735 - RNA, 9485 nt, synthetic construct
  source 1..9485: mol_type = other RNA
aggaaataagagagaaaagaagagtaagaagaaatataagagccaccatggcccctaagaagaagcgtaaagtgagccggatggaacgcctcgtctacgaggtgcggcagaagtgcagaaacatcgaggacatctgcatctcctgcggatctctgaacgtgaccctggagcacccactgttcatcggcggcatgtgccagaactgtaaaaactgttttctggagtgtgcctatcaatacgacgatgacggctaccagagctactgcaccatctgttgcggcggaagagaggtgctgatgtgtggaaataacaactgctgccggtgcttctgcgtggaatgcgtggacctgctggtgggccccggcgccgcccaggccgctattaaggaagatccttggaactgctacatgtgcggccacaagggcacatacggcctgctgagacggagagaggactggcctagcagactgcagatgttcttcgccaataaccacgaccaggagttcgacccccctaaggtgtaccctcccgtccccgccgagaagagaaagcccatccgggtcctgagcctgttcgatggcatcgccaccggtctgctggtgctgaaggacctgggcatccaggtggataggtacattgcctccgaggtgtgcgaggactccatcaccgtgggaatggtgcgtcatcagggcaagatcatgtacgtgggcgacgtgcggagcgtgacacagaagcatatccaggagtggggccctttcgacctggtgatcggcggcagcccttgcaatgacctgagcatcgtgaacccagcccggaagggcctgtacgagggaaccggcagactgttcttcgagttttacagactgctgcacgacgcccggcctaaggaaggcgacgaccggcccttcttttggctgttcgagaatgtggtggccatgggagtcagcgacaagcgggatattagccggttcctggagagcaaccccgtgatgatcgatgccaaggaagtgagcgccgcccaccgggccagatacttctggggcaatctgcctggcatgaacagacccctggccagcaccgtgaacgacaagctggagctgcaggagtgcctggagcacggccggatcgccaagttcagcaaggtgagaaccatcaccacccgaagcaacagcatcaaacaaggcaaggaccagcactttcctgtgttcatgaacgagaaggaggacatcctgtggtgtaccgagatggagagagtgttcgggttcccagtccactacacagatgtcagcaacatgtctagactggccagacagagactgctgggaagaagctggtccgtccctgtgatcagacacctgttcgcccctctgaaggagtacttcgcctgcgtgagcagcggcaacagcaacgccaacagccggggccccagcttctctagcggcctggtgccactgtccctgagagggagccacatgggccccatggagatctacaaaaccgtgagcgcctggaagcggcagcctgtgcgcgtgctgagcctgtttcggaatatcgataaagtcctgaaaagcctgggattcctggagagcggctctggctccggcggtggcaccctgaagtacgtggaggatgtgacaaacgtggtcagacgggatgtggagaagtggggccccttcgatctggtgtacggcagcacccaacccctgggcagctcttgtgaccggtgccctggctggtacatgtttcagttccaccggatcctgcagtacgccctgccgagacaggagtcccagcggccattcttttggattttcatggacaacttgctgctgaccgaggatgaccaggaaactaccactcggttcctgcagaccgaagccgtgaccctgcaggacgtgagaggccgggactaccagaacgccatgcgggtgtggtccaacatccctggactgaaaagcaagcacgcacctctgacccctaaagaagaggagtacctgcaggcccaggtgcggagcagaagcaagctggacgcccctaaggtggatctgctggtgaagaattgcctcctgcccctgagagagtacttcaagtatttcagccagaatagtctgcccctgggaggcagcggcggcggcgccctggtgacatttgaggacgtcgccgtgcggttcacccaggaggaatgggctctgctggatccttctcagaaaatcctgtaccgggacgtgatgagagagacataccggaatctgacctccgtgggcatcaactgggaatgttgggaccttgaagcctgcttcagaagcctgggaagaaacctgagagtgcaggtggtgaagagaaagtgcgagctgaccaacagcggcccctgcgccgagggcggcccaagcagcggcgcccctcctcccagcggcggcagcccagccggctccccaacctctaccgaggagggcacctctgagtccgccacccccgagagcggccctggcacctccaccgagcccagcgagggcagcgcacccggcagccctgccggcagccccacctccacagaggagggaaccagcaccgagcccagcgaaggcagcgccccaggcaccagcaccgagcctagtgagcaggagattaaacggatcaacaagatcagaagaagacttgtgaaagacagcaacaccaagaaggccggcaagacaggccccatgaaaaccctgctggttagagtgatgacacccgatctgagagagcggctggaaaacctgagaaagaagcctgaaaatatcccccagcccatcagcaatacatctagagccaacctgaataagctgctgaccgattacaccgaaatgaagaaggcgatcctgcatgtgtactgggaagagttccagaaggaccctgtgggcctgatgagccgggtggcccagcctgccagcaagaagatcgatcagaacaagctgaaacctgagatggacgagaagggcaacctgaccaccgccggctttgcctgctctcagtgtggccagcccctgttcgtgtacaagctggagcaggtgtctgagaagggcaaggcttacaccaactacttcggacggtgcaatgtggccgagcacgaaaagctgatcctgctggcccagctgaagcccgagaaggatagcgacgaagccgtgacatatagcctgggaaagtttgggcagagggccctggatttctacagcattcatgtgaccaaggagtccacccaccccgtgaagcccctggcccagatcgccggaaacagatacgcctccggacctgtgggaaaggccctgagcgacgcatgtatgggcacaatcgcctccttcctgtctaagtaccaggacatcatcatcgaacaccagaaggtggtgaagggcaaccagaagagactggagagcctgcgggagctggccggcaaggaaaacctggaataccctagcgtgaccctgccacctcagcctcacaccaaggagggcgttgatgcctacaacgaagtgatcgcccgggtgcgaatgtgggtgaacctgaacctgtggcagaagctgaagctaagcagagatgatgccaagcctctgctgagactgaagggattcccttcctttcctctggtcgagagacaggccaacgaagtggactggtgggacatggtgtgtaacgtgaagaagctgatcaacgagaaaaaggaggatggcaaggtgttttggcagaatctggctggctacaagagacaggaagccctgagaccatacctgagcagcgaggaagatcggaagaagggaaagaaattcgctcggtaccagctgggcgacctgctgctgcacctggaaaagaagcacggcgaggactggggaaaggtgtacgacgaggcctgggagcggattgacaagaaagtggaaggcctgagcaagcacatcaagctggaagaggaacggagaagcgaggacgcccagagcaaggccgccctgaccgactggctgcgggctaaggccagcttcgtgatcgagggcctgaaggaggccgacaaggacgagttctgcagatgcgagctgaagctgcagaagtggtacggggacctgcggggaaagcccttcgccatcgaagccgagaacagcatcctggacatcagcggcttcagcaagcagtacaactgtgccttcatctggcagaaggacggcgtgaagaagctgaacctgtacctgatcatcaactacttcaagggcggcaagctgcggttcaagaagatcaaacctgaagccttcgaagccaacagattctacaccgtgatcaacaaaaagagcggcgagatcgtgcccatggaggtgaacttcaacttcgacgaccccaacctgatcatcctgcctctggcctttggcaagagacagggcagagaattcatctggaacgacctgctgtccctggaaaccggcagcctgaagctggccaacggaagagtgatcgagaagacactgtacaacagaagaacccggcaggatgagcctgccctgttcgtggccctgaccttcgagcggcgggaggtcctggactcctccaatatcaaaccaatgaacctgatcggcgtggcaagaggcgaaaacatccccgccgtgatcgccctgaccgaccccgagggctgcccactgagccggtttaaggatagcctgggaaacccaacccacatcctgagaatcggcgagagctataaggagaagcagcggaccatccaggccaagaaggaggtggagcagcggagagccggcggctacagccggaagtacgccagcaaagccaagaatctggcagacgatatggtgagaaacaccgctagagatctgctgtactacgccgtgacccaggatgccatgctgatcttcgccaacctgagccggggcttcggccggcagggcaagcggaccttcatggccgagagacagtacacacggatggaggactggctgaccgccaagctggcctacgagggcctgagcaagacctacctgtccaagacactggcccagtacacctccaagacatgcagcaactgtgggtttaccatcaccagcgccgactacgacagggtgctggagaagctgaagaagacagcaacaggctggatgaccacaattaacggcaaggagctgaaggtggagggccagattacctactacaacagatacaagagacagaacgtagtcaaggacctgtccgtcgagctggatagactgagcgaagaatctgtgaacaacgacatctcctcctggacaaagggcagaagcggagaagctctgagcctcctgaagaaaagattctcccatagacccgtgcaggagaagttcgtgtgcctgaactgcggcttcgagacacacgcagccgagcaagccgccctgaacatcgccagatcctggctgttcctgcggagccaggagtacaagaaataccagacaaacaagacaaccggcaacaccgataagagagccttcgtcgagacctggcagtccttttaccggaagaagcttaaggaggtgtggaaacctgccgtgcggtctggcggatctggcggaggctccacccacggcctggtgatgttcaaggacgtggccatcgacgtgagccaggaggagtgggagtgcctgaaccccacccagaggagcctgtacagggacgtgatgctggagaactacagcaacctggtgagcctgggcctgagcctgagcaagcccgccgtgatcagcagcctggagcagggcatggagccctggatggtggtgagggaggtgaccggcaagcagtgccccgacctggtgagcaggggcggcccaagcagcggcgcccctcctcccagcggcggcagcccagccggctccccaacctctaccgaggagggcacctctgagtccgccacccccgagagcggccctggcacctccaccgagcccagcgagggcagcgcacccggcagccctgccggcagccccacctccacagaggagggaaccagcaccgagcccagcgaaggcagcgccccaggcaccagcaccgagcctagtgagcaggagattaaacggatcaacaagatcagaagaagacttgtgaaagacagcaacaccaagaaggccggcaagacaggccccatgaaaaccctgctggttagagtgatgacacccgatctgagagagcggctggaaaacctgagaaagaagcctgaaaatatcccccagcccatcagcaatacatctagagccaacctgaataagctgctgaccgattacaccgaaatgaagaaggcgatcctgcatgtgtactgggaagagttccagaaggaccctgtgggcctgatgagccgggtggcccagcctgccagcaagaagatcgatcagaacaagctgaaacctgagatggacgagaagggcaacctgaccaccgccggctttgcctgctctcagtgtggccagcccctgttcgtgtacaagctggagcaggtgtctgagaagggcaaggcttacaccaactacttcggacggtgcaatgtggccgagcacgaaaagctgatcctgctggcccagctgaagcccgagaaggatagcgacgaagccgtgacatatagcctgggaaagtttgggcagagggccctggatttctacagcattcatgtgaccaaggagtccacccaccccgtgaagcccctggcccagatcgccggaaacagatacgcctccggacctgtgggaaaggccctgagcgacgcatgtatgggcacaatcgcctccttcctgtctaagtaccaggacatcatcatcgaacaccagaaggtggtgaagggcaaccagaagagactggagagcctgcgggagctggccggcaaggaaaacctggaataccctagcgtgaccctgccacctcagcctcacaccaaggagggcgttgatgcctacaacgaagtgatcgcccgggtgcgaatgtgggtgaacctgaacctgtggcagaagctgaagctaagcagagatgatgccaagcctctgctgagactgaagggattcccttcctttcctctggtcgagagacaggccaacgaagtggactggtgggacatggtgtgtaacgtgaagaagctgatcaacgagaaaaaggaggatggcaaggtgttttggcagaatctggctggctacaagagacaggaagccctgagaccatacctgagcagcgaggaagatcggaagaagggaaagaaattcgctcggtaccagctgggcgacctgctgctgcacctggaaaagaagcacggcgaggactggggaaaggtgtacgacgaggcctgggagcggattgacaagaaagtggaaggcctgagcaagcacatcaagctggaagaggaacggagaagcgaggacgcccagagcaaggccgccctgaccgactggctgcgggctaaggccagcttcgtgatcgagggcctgaaggaggccgacaaggacgagttctgcagatgcgagctgaagctgcagaagtggtacggggacctgcggggaaagcccttcgccatcgaagccgagaacagcatcctggacatcagcggcttcagcaagcagtacaactgtgccttcatctggcagaaggacggcgtgaagaagctgaacctgtacctgatcatcaactacttcaagggcggcaagctgcggttcaagaagatcaaacctgaagccttcgaagccaacagattctacaccgtgatcaacaaaaagagcggcgagatcgtgcccatggaggtgaacttcaacttcgacgaccccaacctgatcatcctgcctctggcctttggcaagagacagggcagagaattcatctggaacgacctgctgtccctggaaaccggcagcctgaagctggccaacggaagagtgatcgagaagacactgtacaacagaagaacccggcaggatgagcctgccctgttcgtggccctgaccttcgagcggcgggaggtcctggactcctccaatatcaaaccaatgaacctgatcggcgtggcaagaggcgaaaacatccccgccgtgatcgccctgaccgaccccgagggctgcccactgagccggtttaaggatagcctgggaaacccaacccacatcctgagaatcggcgagagctataaggagaagcagcggaccatccaggccaagaaggaggtggagcagcggagagccggcggctacagccggaagtacgccagcaaagccaagaatctggcagacgatatggtgagaaacaccgctagagatctgctgtactacgccgtgacccaggatgccatgctgatcttcgccaacctgagccggggcttcggccggcagggcaagcggaccttcatggccgagagacagtacacacggatggaggactggctgaccgccaagctggcctacgagggcctgagcaagacctacctgtccaagacactggcccagtacacctccaagacatgcagcaactgtgggtttaccatcaccagcgccgactacgacagggtgctggagaagctgaagaagacagcaacaggctggatgaccacaattaacggcaaggagctgaaggtggagggccagattacctactacaacagatacaagagacagaacgtagtcaaggacctgtccgtcgagctggatagactgagcgaagaatctgtgaacaacgacatctcctcctggacaaagggcagaagcggagaagctctgagcctcctgaagaaaagattctcccatagacccgtgcaggagaagttcgtgtgcctgaactgcggcttcgagacacacgcagccgagcaagccgccctgaacatcgccagatcctggctgttcctgcggagccaggagtacaagaaataccagacaaacaagacaaccggcaacaccgataagagagccttcgtcgagacctggcagtccttttaccggaagaagcttaaggaggtgtggaaacctgccgtgcggtctggcggatctggcggaggctcctacccacggcctggtgatgttcaaggacgtggccatcgacgtgagccaggaggagtgggagtgcctgaaccccacccagaggagcctgtacagggacgtgatgctggagaactacagcaacctggtgagcctgggcctgagcctgagcaagcccgccgtgatcagcagcctggagcagggcatggagccctggatggtggtgagggaggtgaccggcaagcagtgccccgacctggtgagcaggggatctggctccggcagcggccccaagaaaaagagaaaagtctaagctgccttctgcggggcttgccttctggccatgcccttcttctctcccttgcacctgtacctcttggtctttgaataaagcctgagtaggaaggctagcaaaaaaaaaaaaaaaaaaaaaaaaaaaaaaaaaaaaaaaaaaaaaaaaaaaaaaaaaaaaaaaaaaaaaaaaaaaaaaaa

SEQ ID NO: 15736 - RNA, 9485 nt, synthetic construct
  source 1..9485: mol_type = other RNA
aggaaataagagagaaaagaagagtaagaagaaatataagagccaccatggcccctaagaagaagcgtaaagtgagccggatggaacgcctcgtctacgaggtgcggcagaagtgcagaaacatcgaggacatctgcatctcctgcggatctctgaacgtgaccctggagcacccactgttcatcggcggcatgtgccagaactgtaaaaactgttttctggagtgtgcctatcaatacgacgatgacggctaccagagctactgcaccatctgttgcggcggaagagaggtgctgatgtgtggaaataacaactgctgccggtgcttctgcgtggaatgcgtggacctgctggtgggccccggcgccgcccaggccgctattaaggaagatccttggaactgctacatgtgcggccacaagggcacatacggcctgctgagacggagagaggactggcctagcagactgcagatgttcttcgccaataaccacgaccaggagttcgacccccctaaggtgtaccctcccgtccccgccgagaagagaaagcccatccgggtcctgagcctgttcgatggcatcgccaccggtctgctggtgctgaaggacctgggcatccaggtggataggtacattgcctccgaggtgtgcgaggactccatcaccgtgggaatggtgcgtcatcagggcaagatcatgtacgtgggcgacgtgcggagcgtgacacagaagcatatccaggagtggggccctttcgacctggtgatcggcggcagcccttgcaatgacctgagcatcgtgaacccagcccggaagggcctgtacgagggaaccggcagactgttcttcgagttttacagactgctgcacgacgcccggcctaaggaaggcgacgaccggcccttcttttggctgttcgagaatgtggtggccatgggagtcagcgacaagcgggatattagccggttcctggagagcaaccccgtgatgatcgatgccaaggaagtgagcgccgcccaccgggccagatacttctggggcaatctgcctggcatgaacagacccctggccagcaccgtgaacgacaagctggagctgcaggagtgcctggagcacggccggatcgccaagttcagcaaggtgagaaccatcaccacccgaagcaacagcatcaaacaaggcaaggaccagcactttcctgtgttcatgaacgagaaggaggacatcctgtggtgtaccgagatggagagagtgttcgggttcccagtccactacacagatgtcagcaacatgtctagactggccagacagagactgctgggaagaagctggtccgtccctgtgatcagacacctgttcgcccctctgaaggagtacttcgcctgcgtgagcagcggcaacagcaacgccaacagccggggccccagcttctctagcggcctggtgccactgtccctgagagggagccacatgggccccatggagatctacaaaaccgtgagcgcctggaagcggcagcctgtgcgcgtgctgagcctgtttcggaatatcgataaagtcctgaaaagcctgggattcctggagagcggctctggctccggcggtggcaccctgaagtacgtggaggatgtgacaaacgtggtcagacgggatgtggagaagtggggccccttcgatctggtgtacggcagcacccaacccctgggcagctcttgtgaccggtgccctggctggtacatgtttcagttccaccggatcctgcagtacgccctgccgagacaggagtcccagcggccattcttttggattttcatggacaacttgctgctgaccgaggatgaccaggaaactaccactcggttcctgcagaccgaagccgtgaccctgcaggacgtgagaggccgggactaccagaacgccatgcgggtgtggtccaacatccctggactgaaaagcaagcacgcacctctgacccctaaagaagaggagtacctgcaggcccaggtgcggagcagaagcaagctggacgcccctaaggtggatctgctggtgaagaattgcctcctgcccctgagagagtacttcaagtatttcagccagaatagtctgcccctgggaggcagcggcggcggcgccctggtgacatttgaggacgtcgccgtgcggttcacccaggaggaatgggctctgctggatccttctcagaaaatcctgtaccgggacgtgatgagagagacataccggaatctgacctccgtgggcatcaactgggaatgttgggaccttgaagcctgcttcagaagcctgggaagaaacctgagagtgcaggtggtgaagagaaagtgcgagctgaccaacagcggcccctgcgccgagggcggcccaagcagcggcgcccctcctcccagcggcggcagcccagccggctccccaacctctaccgaggagggcacctctgagtccgccacccccgagagcggccctggcacctccaccgagcccagcgagggcagcgcacccggcagccctgccggcagccccacctccacagaggagggaaccagcaccgagcccagcgaaggcagcgccccaggcaccagcaccgagcctagtgagcaggagattaaacggatcaacaagatcagaagaagacttgtgaaagacagcaacaccaagaaggccggcaagacaggccccatgaaaaccctgctggttagagtgatgacacccgatctgagagagcggctggaaaacctgagaaagaagcctgaaaatatcccccagcccatcagcaatacatctagagccaacctgaataagctgctgaccgattacaccgaaatgaagaaggcgatcctgcatgtgtactgggaagagttccagaaggaccctgtgggcctgatgagccgggtggcccagcctgccagcaagaagatcgatcagaacaagctgaaacctgagatggacgagaagggcaacctgaccaccgccggctttgcctgctctcagtgtggccagcccctgttcgtgtacaagctggagcaggtgtctgagaagggcaaggcttacaccaactacttcggacggtgcaatgtggccgagcacgaaaagctgatcctgctggcccagctgaagcccgagaaggatagcgacgaagccgtgacatatagcctgggaaagtttgggcagagggccctggatttctacagcattcatgtgaccaaggagtccacccaccccgtgaagcccctggcccagatcgccggaaacagatacgcctccggacctgtgggaaaggccctgagcgacgcatgtatgggcacaatcgcctccttcctgtctaagtaccaggacatcatcatcgaacaccagaaggtggtgaagggcaaccagaagagactggagagcctgcgggagctggccggcaaggaaaacctggaataccctagcgtgaccctgccacctcagcctcacaccaaggagggcgttgatgcctacaacgaagtgatcgcccgggtgcgaatgtgggtgaacctgaacctgtggcagaagctgaagctaagcagagatgatgccaagcctctgctgagactgaagggattcccttcctttcctctggtcgagagacaggccaacgaagtggactggtgggacatggtgtgtaacgtgaagaagctgatcaacgagaaaaaggaggatggcaaggtgttttggcagaatctggctggctacaagagacaggaagccctgagaccatacctgagcagcgaggaagatcggaagaagggaaagaaattcgctcggtaccagctgggcgacctgctgctgcacctggaaaagaagcacggcgaggactggggaaaggtgtacgacgaggcctgggagcggattgacaagaaagtggaaggcctgagcaagcacatcaagctggaagaggaacggagaagcgaggacgcccagagcaaggccgccctgaccgactggctgcgggctaaggccagcttcgtgatcgagggcctgaaggaggccgacaaggacgagttctgcagatgcgagctgaagctgcagaagtggtacggggacctgcggggaaagcccttcgccatcgaagccgagaacagcatcctggacatcagcggcttcagcaagcagtacaactgtgccttcatctggcagaaggacggcgtgaagaagctgaacctgtacctgatcatcaactacttcaagggcggcaagctgcggttcaagaagatcaaacctgaagccttcgaagccaacagattctacaccgtgatcaacaaaaagagcggcgagatcgtgcccatggaggtgaacttcaacttcgacgaccccaacctgatcatcctgcctctggcctttggcaagagacagggcagagaattcatctggaacgacctgctgtccctggaaaccggcagcctgaagctggccaacggaagagtgatcgagaagacactgtacaacagaagaacccggcaggatgagcctgccctgttcgtggccctgaccttcgagcggcgggaggtcctggactcctccaatatcaaaccaatgaacctgatcggcgtggcaagaggcgaaaacatccccgccgtgatcgccctgaccgaccccgagggctgcccactgagccggtttaaggatagcctgggaaacccaacccacatcctgagaatcggcgagagctataaggagaagcagcggaccatccaggccaagaaggaggtggagcagcggagagccggcggctacagccggaagtacgccagcaaagccaagaatctggcagacgatatggtgagaaacaccgctagagatctgctgtactacgccgtgacccaggatgccatgctgatcttcgccaacctgagccggggcttcggccggcagggcaagcggaccttcatggccgagagacagtacacacggatggaggactggctgaccgccaagctggcctacgagggcctgagcaagacctacctgtccaagacactggcccagtacacctccaagacatgcagcaactgtgggtttaccatcaccagcgccgactacgacagggtgctggagaagctgaagaagacagcaacaggctggatgaccacaattaacggcaaggagctgaaggtggagggccagattacctactacaacagatacaagagacagaacgtagtcaaggacctgtccgtcgagctggatagactgagcgaagaatctgtgaacaacgacatctcctcctggacaaagggcagaagcggagaagctctgagcctcctgaagaaaagattctcccatagacccgtgcaggagaagttcgtgtgcctgaactgcggcttcgagacacacgcagccgagcaagccgccctgaacatcgccagatcctggctgttcctgcggagccaggagtacaagaaataccagacaaacaagacaaccggcaacaccgataagagagccttcgtcgagacctggcagtccttttaccggaagaagcttaaggaggtgtggaaacctgccgtgcggtctggcggatctggcggaggctccacccaggagagcgtgaccttcagggacgtggccgtgcacttcagcagggacgagtggctgtacctggaccccgcccagagggccctgtacagggaggtgatgctggagaactacagcagcctggtgagcctgggcatcctgttcagcaagcccaaggtgatcttccagctgcagcagggcgaggacccctggatggtggagaacggcgtgagctgcggcgcctgcctgggctgggagagcctgggcggcccaagcagcggcgcccctcctcccagcggcggcagcccagccggctccccaacctctaccgaggagggcacctctgagtccgccacccccgagagcggccctggcacctccaccgagcccagcgagggcagcgcacccggcagccctgccggcagccccacctccacagaggagggaaccagcaccgagcccagcgaaggcagcgccccaggcaccagcaccgagcctagtgagcaggagattaaacggatcaacaagatcagaagaagacttgtgaaagacagcaacaccaagaaggccggcaagacaggccccatgaaaaccctgctggttagagtgatgacacccgatctgagagagcggctggaaaacctgagaaagaagcctgaaaatatcccccagcccatcagcaatacatctagagccaacctgaataagctgctgaccgattacaccgaaatgaagaaggcgatcctgcatgtgtactgggaagagttccagaaggaccctgtgggcctgatgagccgggtggcccagcctgccagcaagaagatcgatcagaacaagctgaaacctgagatggacgagaagggcaacctgaccaccgccggctttgcctgctctcagtgtggccagcccctgttcgtgtacaagctggagcaggtgtctgagaagggcaaggcttacaccaactacttcggacggtgcaatgtggccgagcacgaaaagctgatcctgctggcccagctgaagcccgagaaggatagcgacgaagccgtgacatatagcctgggaaagtttgggcagagggccctggatttctacagcattcatgtgaccaaggagtccacccaccccgtgaagcccctggcccagatcgccggaaacagatacgcctccggacctgtgggaaaggccctgagcgacgcatgtatgggcacaatcgcctccttcctgtctaagtaccaggacatcatcatcgaacaccagaaggtggtgaagggcaaccagaagagactggagagcctgcgggagctggccggcaaggaaaacctggaataccctagcgtgaccctgccacctcagcctcacaccaaggagggcgttgatgcctacaacgaagtgatcgcccgggtgcgaatgtgggtgaacctgaacctgtggcagaagctgaagctaagcagagatgatgccaagcctctgctgagactgaagggattcccttcctttcctctggtcgagagacaggccaacgaagtggactggtgggacatggtgtgtaacgtgaagaagctgatcaacgagaaaaaggaggatggcaaggtgttttggcagaatctggctggctacaagagacaggaagccctgagaccatacctgagcagcgaggaagatcggaagaagggaaagaaattcgctcggtaccagctgggcgacctgctgctgcacctggaaaagaagcacggcgaggactggggaaaggtgtacgacgaggcctgggagcggattgacaagaaagtggaaggcctgagcaagcacatcaagctggaagaggaacggagaagcgaggacgcccagagcaaggccgccctgaccgactggctgcgggctaaggccagcttcgtgatcgagggcctgaaggaggccgacaaggacgagttctgcagatgcgagctgaagctgcagaagtggtacggggacctgcggggaaagcccttcgccatcgaagccgagaacagcatcctggacatcagcggcttcagcaagcagtacaactgtgccttcatctggcagaaggacggcgtgaagaagctgaacctgtacctgatcatcaactacttcaagggcggcaagctgcggttcaagaagatcaaacctgaagccttcgaagccaacagattctacaccgtgatcaacaaaaagagcggcgagatcgtgcccatggaggtgaacttcaacttcgacgaccccaacctgatcatcctgcctctggcctttggcaagagacagggcagagaattcatctggaacgacctgctgtccctggaaaccggcagcctgaagctggccaacggaagagtgatcgagaagacactgtacaacagaagaacccggcaggatgagcctgccctgttcgtggccctgaccttcgagcggcgggaggtcctggactcctccaatatcaaaccaatgaacctgatcggcgtggcaagaggcgaaaacatccccgccgtgatcgccctgaccgaccccgagggctgcccactgagccggtttaaggatagcctgggaaacccaacccacatcctgagaatcggcgagagctataaggagaagcagcggaccatccaggccaagaaggaggtggagcagcggagagccggcggctacagccggaagtacgccagcaaagccaagaatctggcagacgatatggtgagaaacaccgctagagatctgctgtactacgccgtgacccaggatgccatgctgatcttcgccaacctgagccggggcttcggccggcagggcaagcggaccttcatggccgagagacagtacacacggatggaggactggctgaccgccaagctggcctacgagggcctgagcaagacctacctgtccaagacactggcccagtacacctccaagacatgcagcaactgtgggtttaccatcaccagcgccgactacgacagggtgctggagaagctgaagaagacagcaacaggctggatgaccacaattaacggcaaggagctgaaggtggagggccagattacctactacaacagatacaagagacagaacgtagtcaaggacctgtccgtcgagctggatagactgagcgaagaatctgtgaacaacgacatctcctcctggacaaagggcagaagcggagaagctctgagcctcctgaagaaaagattctcccatagacccgtgcaggagaagttcgtgtgcctgaactgcggcttcgagacacacgcagccgagcaagccgccctgaacatcgccagatcctggctgttcctgcggagccaggagtacaagaaataccagacaaacaagacaaccggcaacaccgataagagagccttcgtcgagacctggcagtccttttaccggaagaagcttaaggaggtgtggaaacctgccgtgcggtctggcggatctggcggaggctcctacccaggagagcgtgaccttcagggacgtggccgtgcacttcagcagggacgagtggctgtacctggaccccgcccagagggccctgtacagggaggtgatgctggagaactacagcagcctggtgagcctgggcatcctgttcagcaagcccaaggtgatcttccagctgcagcagggcgaggacccctggatggtggagaacggcgtgagctgcggcgcctgcctgggctgggagagcctgggatctggctccggcagcggccccaagaaaaagagaaaagtctaagctgccttctgcggggcttgccttctggccatgcccttcttctctcccttgcacctgtacctcttggtctttgaataaagcctgagtaggaaggctagcaaaaaaaaaaaaaaaaaaaaaaaaaaaaaaaaaaaaaaaaaaaaaaaaaaaaaaaaaaaaaaaaaaaaaaaaaaaaaaaa

SEQ ID NO: 15737 - RNA, 9485 nt, synthetic construct
  source 1..9485: mol_type = other RNA
aggaaataagagagaaaagaagagtaagaagaaatataagagccaccatggcccctaagaagaagcgtaaagtgagccggatggaacgcctcgtctacgaggtgcggcagaagtgcagaaacatcgaggacatctgcatctcctgcggatctctgaacgtgaccctggagcacccactgttcatcggcggcatgtgccagaactgtaaaaactgttttctggagtgtgcctatcaatacgacgatgacggctaccagagctactgcaccatctgttgcggcggaagagaggtgctgatgtgtggaaataacaactgctgccggtgcttctgcgtggaatgcgtggacctgctggtgggccccggcgccgcccaggccgctattaaggaagatccttggaactgctacatgtgcggccacaagggcacatacggcctgctgagacggagagaggactggcctagcagactgcagatgttcttcgccaataaccacgaccaggagttcgacccccctaaggtgtaccctcccgtccccgccgagaagagaaagcccatccgggtcctgagcctgttcgatggcatcgccaccggtctgctggtgctgaaggacctgggcatccaggtggataggtacattgcctccgaggtgtgcgaggactccatcaccgtgggaatggtgcgtcatcagggcaagatcatgtacgtgggcgacgtgcggagcgtgacacagaagcatatccaggagtggggccctttcgacctggtgatcggcggcagcccttgcaatgacctgagcatcgtgaacccagcccggaagggcctgtacgagggaaccggcagactgttcttcgagttttacagactgctgcacgacgcccggcctaaggaaggcgacgaccggcccttcttttggctgttcgagaatgtggtggccatgggagtcagcgacaagcgggatattagccggttcctggagagcaaccccgtgatgatcgatgccaaggaagtgagcgccgcccaccgggccagatacttctggggcaatctgcctggcatgaacagacccctggccagcaccgtgaacgacaagctggagctgcaggagtgcctggagcacggccggatcgccaagttcagcaaggtgagaaccatcaccacccgaagcaacagcatcaaacaaggcaaggaccagcactttcctgtgttcatgaacgagaaggaggacatcctgtggtgtaccgagatggagagagtgttcgggttcccagtccactacacagatgtcagcaacatgtctagactggccagacagagactgctgggaagaagctggtccgtccctgtgatcagacacctgttcgcccctctgaaggagtacttcgcctgcgtgagcagcggcaacagcaacgccaacagccggggccccagcttctctagcggcctggtgccactgtccctgagagggagccacatgggccccatggagatctacaaaaccgtgagcgcctggaagcggcagcctgtgcgcgtgctgagcctgtttcggaatatcgataaagtcctgaaaagcctgggattcctggagagcggctctggctccggcggtggcaccctgaagtacgtggaggatgtgacaaacgtggtcagacgggatgtggagaagtggggccccttcgatctggtgtacggcagcacccaacccctgggcagctcttgtgaccggtgccctggctggtacatgtttcagttccaccggatcctgcagtacgccctgccgagacaggagtcccagcggccattcttttggattttcatggacaacttgctgctgaccgaggatgaccaggaaactaccactcggttcctgcagaccgaagccgtgaccctgcaggacgtgagaggccgggactaccagaacgccatgcgggtgtggtccaacatccctggactgaaaagcaagcacgcacctctgacccctaaagaagaggagtacctgcaggcccaggtgcggagcagaagcaagctggacgcccctaaggtggatctgctggtgaagaattgcctcctgcccctgagagagtacttcaagtatttcagccagaatagtctgcccctgggaggcagcggcggcggcgccctggtgacatttgaggacgtcgccgtgcggttcacccaggaggaatgggctctgctggatccttctcagaaaatcctgtaccgggacgtgatgagagagacataccggaatctgacctccgtgggcatcaactgggaatgttgggaccttgaagcctgcttcagaagcctgggaagaaacctgagagtgcaggtggtgaagagaaagtgcgagctgaccaacagcggcccctgcgccgagggcggcccaagcagcggcgcccctcctcccagcggcggcagcccagccggctccccaacctctaccgaggagggcacctctgagtccgccacccccgagagcggccctggcacctccaccgagcccagcgagggcagcgcacccggcagccctgccggcagccccacctccacagaggagggaaccagcaccgagcccagcgaaggcagcgccccaggcaccagcaccgagcctagtgagcaggagattaaacggatcaacaagatcagaagaagacttgtgaaagacagcaacaccaagaaggccggcaagacaggccccatgaaaaccctgctggttagagtgatgacacccgatctgagagagcggctggaaaacctgagaaagaagcctgaaaatatcccccagcccatcagcaatacatctagagccaacctgaataagctgctgaccgattacaccgaaatgaagaaggcgatcctgcatgtgtactgggaagagttccagaaggaccctgtgggcctgatgagccgggtggcccagcctgccagcaagaagatcgatcagaacaagctgaaacctgagatggacgagaagggcaacctgaccaccgccggctttgcctgctctcagtgtggccagcccctgttcgtgtacaagctggagcaggtgtctgagaagggcaaggcttacaccaactacttcggacggtgcaatgtggccgagcacgaaaagctgatcctgctggcccagctgaagcccgagaaggatagcgacgaagccgtgacatatagcctgggaaagtttgggcagagggccctggatttctacagcattcatgtgaccaaggagtccacccaccccgtgaagcccctggcccagatcgccggaaacagatacgcctccggacctgtgggaaaggccctgagcgacgcatgtatgggcacaatcgcctccttcctgtctaagtaccaggacatcatcatcgaacaccagaaggtggtgaagggcaaccagaagagactggagagcctgcgggagctggccggcaaggaaaacctggaataccctagcgtgaccctgccacctcagcctcacaccaaggagggcgttgatgcctacaacgaagtgatcgcccgggtgcgaatgtgggtgaacctgaacctgtggcagaagctgaagctaagcagagatgatgccaagcctctgctgagactgaagggattcccttcctttcctctggtcgagagacaggccaacgaagtggactggtgggacatggtgtgtaacgtgaagaagctgatcaacgagaaaaaggaggatggcaaggtgttttggcagaatctggctggctacaagagacaggaagccctgagaccatacctgagcagcgaggaagatcggaagaagggaaagaaattcgctcggtaccagctgggcgacctgctgctgcacctggaaaagaagcacggcgaggactggggaaaggtgtacgacgaggcctgggagcggattgacaagaaagtggaaggcctgagcaagcacatcaagctggaagaggaacggagaagcgaggacgcccagagcaaggccgccctgaccgactggctgcgggctaaggccagcttcgtgatcgagggcctgaaggaggccgacaaggacgagttctgcagatgcgagctgaagctgcagaagtggtacggggacctgcggggaaagcccttcgccatcgaagccgagaacagcatcctggacatcagcggcttcagcaagcagtacaactgtgccttcatctggcagaaggacggcgtgaagaagctgaacctgtacctgatcatcaactacttcaagggcggcaagctgcggttcaagaagatcaaacctgaagccttcgaagccaacagattctacaccgtgatcaacaaaaagagcggcgagatcgtgcccatggaggtgaacttcaacttcgacgaccccaacctgatcatcctgcctctggcctttggcaagagacagggcagagaattcatctggaacgacctgctgtccctggaaaccggcagcctgaagctggccaacggaagagtgatcgagaagacactgtacaacagaagaacccggcaggatgagcctgccctgttcgtggccctgaccttcgagcggcgggaggtcctggactcctccaatatcaaaccaatgaacctgatcggcgtggcaagaggcgaaaacatccccgccgtgatcgccctgaccgaccccgagggctgcccactgagccggtttaaggatagcctgggaaacccaacccacatcctgagaatcggcgagagctataaggagaagcagcggaccatccaggccaagaaggaggtggagcagcggagagccggcggctacagccggaagtacgccagcaaagccaagaatctggcagacgatatggtgagaaacaccgctagagatctgctgtactacgccgtgacccaggatgccatgctgatcttcgccaacctgagccggggcttcggccggcagggcaagcggaccttcatggccgagagacagtacacacggatggaggactggctgaccgccaagctggcctacgagggcctgagcaagacctacctgtccaagacactggcccagtacacctccaagacatgcagcaactgtgggtttaccatcaccagcgccgactacgacagggtgctggagaagctgaagaagacagcaacaggctggatgaccacaattaacggcaaggagctgaaggtggagggccagattacctactacaacagatacaagagacagaacgtagtcaaggacctgtccgtcgagctggatagactgagcgaagaatctgtgaacaacgacatctcctcctggacaaagggcagaagcggagaagctctgagcctcctgaagaaaagattctcccatagacccgtgcaggagaagttcgtgtgcctgaactgcggcttcgagacacacgcagccgagcaagccgccctgaacatcgccagatcctggctgttcctgcggagccaggagtacaagaaataccagacaaacaagacaaccggcaacaccgataagagagccttcgtcgagacctggcagtccttttaccggaagaagcttaaggaggtgtggaaacctgccgtgcggtctggcggatctggcggaggctcccaggtgcccgtgaccttcgaggacatcaccatctacttcagccaggaggagtgggagggcctgcaggagtggcagaaggagctgtacaaggacgtgatgaaggagaactacgagatcctgatcagcctgggcgccagcagccccatcctgacccccgacgtgatcagccacatcgagaggggcgaggagccctacatcagggacgagcccaggagcgaggagagggagagcggcaagagcagcggcggcccaagcagcggcgcccctcctcccagcggcggcagcccagccggctccccaacctctaccgaggagggcacctctgagtccgccacccccgagagcggccctggcacctccaccgagcccagcgagggcagcgcacccggcagccctgccggcagccccacctccacagaggagggaaccagcaccgagcccagcgaaggcagcgccccaggcaccagcaccgagcctagtgagcaggagattaaacggatcaacaagatcagaagaagacttgtgaaagacagcaacaccaagaaggccggcaagacaggccccatgaaaaccctgctggttagagtgatgacacccgatctgagagagcggctggaaaacctgagaaagaagcctgaaaatatcccccagcccatcagcaatacatctagagccaacctgaataagctgctgaccgattacaccgaaatgaagaaggcgatcctgcatgtgtactgggaagagttccagaaggaccctgtgggcctgatgagccgggtggcccagcctgccagcaagaagatcgatcagaacaagctgaaacctgagatggacgagaagggcaacctgaccaccgccggctttgcctgctctcagtgtggccagcccctgttcgtgtacaagctggagcaggtgtctgagaagggcaaggcttacaccaactacttcggacggtgcaatgtggccgagcacgaaaagctgatcctgctggcccagctgaagcccgagaaggatagcgacgaagccgtgacatatagcctgggaaagtttgggcagagggccctggatttctacagcattcatgtgaccaaggagtccacccaccccgtgaagcccctggcccagatcgccggaaacagatacgcctccggacctgtgggaaaggccctgagcgacgcatgtatgggcacaatcgcctccttcctgtctaagtaccaggacatcatcatcgaacaccagaaggtggtgaagggcaaccagaagagactggagagcctgcgggagctggccggcaaggaaaacctggaataccctagcgtgaccctgccacctcagcctcacaccaaggagggcgttgatgcctacaacgaagtgatcgcccgggtgcgaatgtgggtgaacctgaacctgtggcagaagctgaagctaagcagagatgatgccaagcctctgctgagactgaagggattcccttcctttcctctggtcgagagacaggccaacgaagtggactggtgggacatggtgtgtaacgtgaagaagctgatcaacgagaaaaaggaggatggcaaggtgttttggcagaatctggctggctacaagagacaggaagccctgagaccatacctgagcagcgaggaagatcggaagaagggaaagaaattcgctcggtaccagctgggcgacctgctgctgcacctggaaaagaagcacggcgaggactggggaaaggtgtacgacgaggcctgggagcggattgacaagaaagtggaaggcctgagcaagcacatcaagctggaagaggaacggagaagcgaggacgcccagagcaaggccgccctgaccgactggctgcgggctaaggccagcttcgtgatcgagggcctgaaggaggccgacaaggacgagttctgcagatgcgagctgaagctgcagaagtggtacggggacctgcggggaaagcccttcgccatcgaagccgagaacagcatcctggacatcagcggcttcagcaagcagtacaactgtgccttcatctggcagaaggacggcgtgaagaagctgaacctgtacctgatcatcaactacttcaagggcggcaagctgcggttcaagaagatcaaacctgaagccttcgaagccaacagattctacaccgtgatcaacaaaaagagcggcgagatcgtgcccatggaggtgaacttcaacttcgacgaccccaacctgatcatcctgcctctggcctttggcaagagacagggcagagaattcatctggaacgacctgctgtccctggaaaccggcagcctgaagctggccaacggaagagtgatcgagaagacactgtacaacagaagaacccggcaggatgagcctgccctgttcgtggccctgaccttcgagcggcgggaggtcctggactcctccaatatcaaaccaatgaacctgatcggcgtggcaagaggcgaaaacatccccgccgtgatcgccctgaccgaccccgagggctgcccactgagccggtttaaggatagcctgggaaacccaacccacatcctgagaatcggcgagagctataaggagaagcagcggaccatccaggccaagaaggaggtggagcagcggagagccggcggctacagccggaagtacgccagcaaagccaagaatctggcagacgatatggtgagaaacaccgctagagatctgctgtactacgccgtgacccaggatgccatgctgatcttcgccaacctgagccggggcttcggccggcagggcaagcggaccttcatggccgagagacagtacacacggatggaggactggctgaccgccaagctggcctacgagggcctgagcaagacctacctgtccaagacactggcccagtacacctccaagacatgcagcaactgtgggtttaccatcaccagcgccgactacgacagggtgctggagaagctgaagaagacagcaacaggctggatgaccacaattaacggcaaggagctgaaggtggagggccagattacctactacaacagatacaagagacagaacgtagtcaaggacctgtccgtcgagctggatagactgagcgaagaatctgtgaacaacgacatctcctcctggacaaagggcagaagcggagaagctctgagcctcctgaagaaaagattctcccatagacccgtgcaggagaagttcgtgtgcctgaactgcggcttcgagacacacgcagccgagcaagccgccctgaacatcgccagatcctggctgttcctgcggagccaggagtacaagaaataccagacaaacaagacaaccggcaacaccgataagagagccttcgtcgagacctggcagtccttttaccggaagaagcttaaggaggtgtggaaacctgccgtgcggtctggcggatctggcggaggctcctcaggtgcccgtgaccttcgaggacatcaccatctacttcagccaggaggagtgggagggcctgcaggagtggcagaaggagctgtacaaggacgtgatgaaggagaactacgagatcctgatcagcctgggcgccagcagccccatcctgacccccgacgtgatcagccacatcgagaggggcgaggagccctacatcagggacgagcccaggagcgaggagagggagagcggcaagagcagcggatctggctccggcagcggccccaagaaaaagagaaaagtctaagctgccttctgcggggcttgccttctggccatgcccttcttctctcccttgcacctgtacctcttggtctttgaataaagcctgagtaggaaggctagcaaaaaaaaaaaaaaaaaaaaaaaaaaaaaaaaaaaaaaaaaaaaaaaaaaaaaaaaaaaaaaaaaaaaaaaaaaaaaaaa

SEQ ID NO: 15738 - RNA, 9485 nt, synthetic construct
  source 1..9485: mol_type = other RNA
aggaaataagagagaaaagaagagtaagaagaaatataagagccaccatggcccctaagaagaagcgtaaagtgagccggatggaacgcctcgtctacgaggtgcggcagaagtgcagaaacatcgaggacatctgcatctcctgcggatctctgaacgtgaccctggagcacccactgttcatcggcggcatgtgccagaactgtaaaaactgttttctggagtgtgcctatcaatacgacgatgacggctaccagagctactgcaccatctgttgcggcggaagagaggtgctgatgtgtggaaataacaactgctgccggtgcttctgcgtggaatgcgtggacctgctggtgggccccggcgccgcccaggccgctattaaggaagatccttggaactgctacatgtgcggccacaagggcacatacggcctgctgagacggagagaggactggcctagcagactgcagatgttcttcgccaataaccacgaccaggagttcgacccccctaaggtgtaccctcccgtccccgccgagaagagaaagcccatccgggtcctgagcctgttcgatggcatcgccaccggtctgctggtgctgaaggacctgggcatccaggtggataggtacattgcctccgaggtgtgcgaggactccatcaccgtgggaatggtgcgtcatcagggcaagatcatgtacgtgggcgacgtgcggagcgtgacacagaagcatatccaggagtggggccctttcgacctggtgatcggcggcagcccttgcaatgacctgagcatcgtgaacccagcccggaagggcctgtacgagggaaccggcagactgttcttcgagttttacagactgctgcacgacgcccggcctaaggaaggcgacgaccggcccttcttttggctgttcgagaatgtggtggccatgggagtcagcgacaagcgggatattagccggttcctggagagcaaccccgtgatgatcgatgccaaggaagtgagcgccgcccaccgggccagatacttctggggcaatctgcctggcatgaacagacccctggccagcaccgtgaacgacaagctggagctgcaggagtgcctggagcacggccggatcgccaagttcagcaaggtgagaaccatcaccacccgaagcaacagcatcaaacaaggcaaggaccagcactttcctgtgttcatgaacgagaaggaggacatcctgtggtgtaccgagatggagagagtgttcgggttcccagtccactacacagatgtcagcaacatgtctagactggccagacagagactgctgggaagaagctggtccgtccctgtgatcagacacctgttcgcccctctgaaggagtacttcgcctgcgtgagcagcggcaacagcaacgccaacagccggggccccagcttctctagcggcctggtgccactgtccctgagagggagccacatgggccccatggagatctacaaaaccgtgagcgcctggaagcggcagcctgtgcgcgtgctgagcctgtttcggaatatcgataaagtcctgaaaagcctgggattcctggagagcggctctggctccggcggtggcaccctgaagtacgtggaggatgtgacaaacgtggtcagacgggatgtggagaagtggggccccttcgatctggtgtacggcagcacccaacccctgggcagctcttgtgaccggtgccctggctggtacatgtttcagttccaccggatcctgcagtacgccctgccgagacaggagtcccagcggccattcttttggattttcatggacaacttgctgctgaccgaggatgaccaggaaactaccactcggttcctgcagaccgaagccgtgaccctgcaggacgtgagaggccgggactaccagaacgccatgcgggtgtggtccaacatccctggactgaaaagcaagcacgcacctctgacccctaaagaagaggagtacctgcaggcccaggtgcggagcagaagcaagctggacgcccctaaggtggatctgctggtgaagaattgcctcctgcccctgagagagtacttcaagtatttcagccagaatagtctgcccctgggaggcagcggcggcggcgccctggtgacatttgaggacgtcgccgtgcggttcacccaggaggaatgggctctgctggatccttctcagaaaatcctgtaccgggacgtgatgagagagacataccggaatctgacctccgtgggcatcaactgggaatgttgggaccttgaagcctgcttcagaagcctgggaagaaacctgagagtgcaggtggtgaagagaaagtgcgagctgaccaacagcggcccctgcgccgagggcggcccaagcagcggcgcccctcctcccagcggcggcagcccagccggctccccaacctctaccgaggagggcacctctgagtccgccacccccgagagcggccctggcacctccaccgagcccagcgagggcagcgcacccggcagccctgccggcagccccacctccacagaggagggaaccagcaccgagcccagcgaaggcagcgccccaggcaccagcaccgagcctagtgagcaggagattaaacggatcaacaagatcagaagaagacttgtgaaagacagcaacaccaagaaggccggcaagacaggccccatgaaaaccctgctggttagagtgatgacacccgatctgagagagcggctggaaaacctgagaaagaagcctgaaaatatcccccagcccatcagcaatacatctagagccaacctgaataagctgctgaccgattacaccgaaatgaagaaggcgatcctgcatgtgtactgggaagagttccagaaggaccctgtgggcctgatgagccgggtggcccagcctgccagcaagaagatcgatcagaacaagctgaaacctgagatggacgagaagggcaacctgaccaccgccggctttgcctgctctcagtgtggccagcccctgttcgtgtacaagctggagcaggtgtctgagaagggcaaggcttacaccaactacttcggacggtgcaatgtggccgagcacgaaaagctgatcctgctggcccagctgaagcccgagaaggatagcgacgaagccgtgacatatagcctgggaaagtttgggcagagggccctggatttctacagcattcatgtgaccaaggagtccacccaccccgtgaagcccctggcccagatcgccggaaacagatacgcctccggacctgtgggaaaggccctgagcgacgcatgtatgggcacaatcgcctccttcctgtctaagtaccaggacatcatcatcgaacaccagaaggtggtgaagggcaaccagaagagactggagagcctgcgggagctggccggcaaggaaaacctggaataccctagcgtgaccctgccacctcagcctcacaccaaggagggcgttgatgcctacaacgaagtgatcgcccgggtgcgaatgtgggtgaacctgaacctgtggcagaagctgaagctaagcagagatgatgccaagcctctgctgagactgaagggattcccttcctttcctctggtcgagagacaggccaacgaagtggactggtgggacatggtgtgtaacgtgaagaagctgatcaacgagaaaaaggaggatggcaaggtgttttggcagaatctggctggctacaagagacaggaagccctgagaccatacctgagcagcgaggaagatcggaagaagggaaagaaattcgctcggtaccagctgggcgacctgctgctgcacctggaaaagaagcacggcgaggactggggaaaggtgtacgacgaggcctgggagcggattgacaagaaagtggaaggcctgagcaagcacatcaagctggaagaggaacggagaagcgaggacgcccagagcaaggccgccctgaccgactggctgcgggctaaggccagcttcgtgatcgagggcctgaaggaggccgacaaggacgagttctgcagatgcgagctgaagctgcagaagtggtacggggacctgcggggaaagcccttcgccatcgaagccgagaacagcatcctggacatcagcggcttcagcaagcagtacaactgtgccttcatctggcagaaggacggcgtgaagaagctgaacctgtacctgatcatcaactacttcaagggcggcaagctgcggttcaagaagatcaaacctgaagccttcgaagccaacagattctacaccgtgatcaacaaaaagagcggcgagatcgtgcccatggaggtgaacttcaacttcgacgaccccaacctgatcatcctgcctctggcctttggcaagagacagggcagagaattcatctggaacgacctgctgtccctggaaaccggcagcctgaagctggccaacggaagagtgatcgagaagacactgtacaacagaagaacccggcaggatgagcctgccctgttcgtggccctgaccttcgagcggcgggaggtcctggactcctccaatatcaaaccaatgaacctgatcggcgtggcaagaggcgaaaacatccccgccgtgatcgccctgaccgaccccgagggctgcccactgagccggtttaaggatagcctgggaaacccaacccacatcctgagaatcggcgagagctataaggagaagcagcggaccatccaggccaagaaggaggtggagcagcggagagccggcggctacagccggaagtacgccagcaaagccaagaatctggcagacgatatggtgagaaacaccgctagagatctgctgtactacgccgtgacccaggatgccatgctgatcttcgccaacctgagccggggcttcggccggcagggcaagcggaccttcatggccgagagacagtacacacggatggaggactggctgaccgccaagctggcctacgagggcctgagcaagacctacctgtccaagacactggcccagtacacctccaagacatgcagcaactgtgggtttaccatcaccagcgccgactacgacagggtgctggagaagctgaagaagacagcaacaggctggatgaccacaattaacggcaaggagctgaaggtggagggccagattacctactacaacagatacaagagacagaacgtagtcaaggacctgtccgtcgagctggatagactgagcgaagaatctgtgaacaacgacatctcctcctggacaaagggcagaagcggagaagctctgagcctcctgaagaaaagattctcccatagacccgtgcaggagaagttcgtgtgcctgaactgcggcttcgagacacacgcagccgagcaagccgccctgaacatcgccagatcctggctgttcctgcggagccaggagtacaagaaataccagacaaacaagacaaccggcaacaccgataagagagccttcgtcgagacctggcagtccttttaccggaagaagcttaaggaggtgtggaaacctgccgtgcggtctggcggatctggcggaggctccgaggagctgcccgtggtgttcgaggacgtggccgtgtacttcaccagggaggagtggggcatgctggacaagaggcagaaggagctgtacagggacgtgatgaggatgaactacgagctgctggccagcctgggccccgccgccgccaagcccgacctgatcagcaagctggagaggagggccgccccctggatcaaggaccccaacggcgccaagagcggcggcaagggcaggccccccggcggcggcccaagcagcggcgcccctcctcccagcggcggcagcccagccggctccccaacctctaccgaggagggcacctctgagtccgccacccccgagagcggccctggcacctccaccgagcccagcgagggcagcgcacccggcagccctgccggcagccccacctccacagaggagggaaccagcaccgagcccagcgaaggcagcgccccaggcaccagcaccgagcctagtgagcaggagattaaacggatcaacaagatcagaagaagacttgtgaaagacagcaacaccaagaaggccggcaagacaggccccatgaaaaccctgctggttagagtgatgacacccgatctgagagagcggctggaaaacctgagaaagaagcctgaaaatatcccccagcccatcagcaatacatctagagccaacctgaataagctgctgaccgattacaccgaaatgaagaaggcgatcctgcatgtgtactgggaagagttccagaaggaccctgtgggcctgatgagccgggtggcccagcctgccagcaagaagatcgatcagaacaagctgaaacctgagatggacgagaagggcaacctgaccaccgccggctttgcctgctctcagtgtggccagcccctgttcgtgtacaagctggagcaggtgtctgagaagggcaaggcttacaccaactacttcggacggtgcaatgtggccgagcacgaaaagctgatcctgctggcccagctgaagcccgagaaggatagcgacgaagccgtgacatatagcctgggaaagtttgggcagagggccctggatttctacagcattcatgtgaccaaggagtccacccaccccgtgaagcccctggcccagatcgccggaaacagatacgcctccggacctgtgggaaaggccctgagcgacgcatgtatgggcacaatcgcctccttcctgtctaagtaccaggacatcatcatcgaacaccagaaggtggtgaagggcaaccagaagagactggagagcctgcgggagctggccggcaaggaaaacctggaataccctagcgtgaccctgccacctcagcctcacaccaaggagggcgttgatgcctacaacgaagtgatcgcccgggtgcgaatgtgggtgaacctgaacctgtggcagaagctgaagctaagcagagatgatgccaagcctctgctgagactgaagggattcccttcctttcctctggtcgagagacaggccaacgaagtggactggtgggacatggtgtgtaacgtgaagaagctgatcaacgagaaaaaggaggatggcaaggtgttttggcagaatctggctggctacaagagacaggaagccctgagaccatacctgagcagcgaggaagatcggaagaagggaaagaaattcgctcggtaccagctgggcgacctgctgctgcacctggaaaagaagcacggcgaggactggggaaaggtgtacgacgaggcctgggagcggattgacaagaaagtggaaggcctgagcaagcacatcaagctggaagaggaacggagaagcgaggacgcccagagcaaggccgccctgaccgactggctgcgggctaaggccagcttcgtgatcgagggcctgaaggaggccgacaaggacgagttctgcagatgcgagctgaagctgcagaagtggtacggggacctgcggggaaagcccttcgccatcgaagccgagaacagcatcctggacatcagcggcttcagcaagcagtacaactgtgccttcatctggcagaaggacggcgtgaagaagctgaacctgtacctgatcatcaactacttcaagggcggcaagctgcggttcaagaagatcaaacctgaagccttcgaagccaacagattctacaccgtgatcaacaaaaagagcggcgagatcgtgcccatggaggtgaacttcaacttcgacgaccccaacctgatcatcctgcctctggcctttggcaagagacagggcagagaattcatctggaacgacctgctgtccctggaaaccggcagcctgaagctggccaacggaagagtgatcgagaagacactgtacaacagaagaacccggcaggatgagcctgccctgttcgtggccctgaccttcgagcggcgggaggtcctggactcctccaatatcaaaccaatgaacctgatcggcgtggcaagaggcgaaaacatccccgccgtgatcgccctgaccgaccccgagggctgcccactgagccggtttaaggatagcctgggaaacccaacccacatcctgagaatcggcgagagctataaggagaagcagcggaccatccaggccaagaaggaggtggagcagcggagagccggcggctacagccggaagtacgccagcaaagccaagaatctggcagacgatatggtgagaaacaccgctagagatctgctgtactacgccgtgacccaggatgccatgctgatcttcgccaacctgagccggggcttcggccggcagggcaagcggaccttcatggccgagagacagtacacacggatggaggactggctgaccgccaagctggcctacgagggcctgagcaagacctacctgtccaagacactggcccagtacacctccaagacatgcagcaactgtgggtttaccatcaccagcgccgactacgacagggtgctggagaagctgaagaagacagcaacaggctggatgaccacaattaacggcaaggagctgaaggtggagggccagattacctactacaacagatacaagagacagaacgtagtcaaggacctgtccgtcgagctggatagactgagcgaagaatctgtgaacaacgacatctcctcctggacaaagggcagaagcggagaagctctgagcctcctgaagaaaagattctcccatagacccgtgcaggagaagttcgtgtgcctgaactgcggcttcgagacacacgcagccgagcaagccgccctgaacatcgccagatcctggctgttcctgcggagccaggagtacaagaaataccagacaaacaagacaaccggcaacaccgataagagagccttcgtcgagacctggcagtccttttaccggaagaagcttaaggaggtgtggaaacctgccgtgcggtctggcggatctggcggaggctcctgaggagctgcccgtggtgttcgaggacgtggccgtgtacttcaccagggaggagtggggcatgctggacaagaggcagaaggagctgtacagggacgtgatgaggatgaactacgagctgctggccagcctgggccccgccgccgccaagcccgacctgatcagcaagctggagaggagggccgccccctggatcaaggaccccaacggcgccaagagcggcggcaagggcaggccccccggcggatctggctccggcagcggccccaagaaaaagagaaaagtctaagctgccttctgcggggcttgccttctggccatgcccttcttctctcccttgcacctgtacctcttggtctttgaataaagcctgagtaggaaggctagcaaaaaaaaaaaaaaaaaaaaaaaaaaaaaaaaaaaaaaaaaaaaaaaaaaaaaaaaaaaaaaaaaaaaaaaaaaaaaaaa

SEQ ID NO: 15739 - RNA, 9485 nt, synthetic construct
  source 1..9485: mol_type = other RNA
aggaaataagagagaaaagaagagtaagaagaaatataagagccaccatggcccctaagaagaagcgtaaagtgagccggatggaacgcctcgtctacgaggtgcggcagaagtgcagaaacatcgaggacatctgcatctcctgcggatctctgaacgtgaccctggagcacccactgttcatcggcggcatgtgccagaactgtaaaaactgttttctggagtgtgcctatcaatacgacgatgacggctaccagagctactgcaccatctgttgcggcggaagagaggtgctgatgtgtggaaataacaactgctgccggtgcttctgcgtggaatgcgtggacctgctggtgggccccggcgccgcccaggccgctattaaggaagatccttggaactgctacatgtgcggccacaagggcacatacggcctgctgagacggagagaggactggcctagcagactgcagatgttcttcgccaataaccacgaccaggagttcgacccccctaaggtgtaccctcccgtccccgccgagaagagaaagcccatccgggtcctgagcctgttcgatggcatcgccaccggtctgctggtgctgaaggacctgggcatccaggtggataggtacattgcctccgaggtgtgcgaggactccatcaccgtgggaatggtgcgtcatcagggcaagatcatgtacgtgggcgacgtgcggagcgtgacacagaagcatatccaggagtggggccctttcgacctggtgatcggcggcagcccttgcaatgacctgagcatcgtgaacccagcccggaagggcctgtacgagggaaccggcagactgttcttcgagttttacagactgctgcacgacgcccggcctaaggaaggcgacgaccggcccttcttttggctgttcgagaatgtggtggccatgggagtcagcgacaagcgggatattagccggttcctggagagcaaccccgtgatgatcgatgccaaggaagtgagcgccgcccaccgggccagatacttctggggcaatctgcctggcatgaacagacccctggccagcaccgtgaacgacaagctggagctgcaggagtgcctggagcacggccggatcgccaagttcagcaaggtgagaaccatcaccacccgaagcaacagcatcaaacaaggcaaggaccagcactttcctgtgttcatgaacgagaaggaggacatcctgtggtgtaccgagatggagagagtgttcgggttcccagtccactacacagatgtcagcaacatgtctagactggccagacagagactgctgggaagaagctggtccgtccctgtgatcagacacctgttcgcccctctgaaggagtacttcgcctgcgtgagcagcggcaacagcaacgccaacagccggggccccagcttctctagcggcctggtgccactgtccctgagagggagccacatgggccccatggagatctacaaaaccgtgagcgcctggaagcggcagcctgtgcgcgtgctgagcctgtttcggaatatcgataaagtcctgaaaagcctgggattcctggagagcggctctggctccggcggtggcaccctgaagtacgtggaggatgtgacaaacgtggtcagacgggatgtggagaagtggggccccttcgatctggtgtacggcagcacccaacccctgggcagctcttgtgaccggtgccctggctggtacatgtttcagttccaccggatcctgcagtacgccctgccgagacaggagtcccagcggccattcttttggattttcatggacaacttgctgctgaccgaggatgaccaggaaactaccactcggttcctgcagaccgaagccgtgaccctgcaggacgtgagaggccgggactaccagaacgccatgcgggtgtggtccaacatccctggactgaaaagcaagcacgcacctctgacccctaaagaagaggagtacctgcaggcccaggtgcggagcagaagcaagctggacgcccctaaggtggatctgctggtgaagaattgcctcctgcccctgagagagtacttcaagtatttcagccagaatagtctgcccctgggaggcagcggcggcggcgccctggtgacatttgaggacgtcgccgtgcggttcacccaggaggaatgggctctgctggatccttctcagaaaatcctgtaccgggacgtgatgagagagacataccggaatctgacctccgtgggcatcaactgggaatgttgggaccttgaagcctgcttcagaagcctgggaagaaacctgagagtgcaggtggtgaagagaaagtgcgagctgaccaacagcggcccctgcgccgagggcggcccaagcagcggcgcccctcctcccagcggcggcagcccagccggctccccaacctctaccgaggagggcacctctgagtccgccacccccgagagcggccctggcacctccaccgagcccagcgagggcagcgcacccggcagccctgccggcagccccacctccacagaggagggaaccagcaccgagcccagcgaaggcagcgccccaggcaccagcaccgagcctagtgagcaggagattaaacggatcaacaagatcagaagaagacttgtgaaagacagcaacaccaagaaggccggcaagacaggccccatgaaaaccctgctggttagagtgatgacacccgatctgagagagcggctggaaaacctgagaaagaagcctgaaaatatcccccagcccatcagcaatacatctagagccaacctgaataagctgctgaccgattacaccgaaatgaagaaggcgatcctgcatgtgtactgggaagagttccagaaggaccctgtgggcctgatgagccgggtggcccagcctgccagcaagaagatcgatcagaacaagctgaaacctgagatggacgagaagggcaacctgaccaccgccggctttgcctgctctcagtgtggccagcccctgttcgtgtacaagctggagcaggtgtctgagaagggcaaggcttacaccaactacttcggacggtgcaatgtggccgagcacgaaaagctgatcctgctggcccagctgaagcccgagaaggatagcgacgaagccgtgacatatagcctgggaaagtttgggcagagggccctggatttctacagcattcatgtgaccaaggagtccacccaccccgtgaagcccctggcccagatcgccggaaacagatacgcctccggacctgtgggaaaggccctgagcgacgcatgtatgggcacaatcgcctccttcctgtctaagtaccaggacatcatcatcgaacaccagaaggtggtgaagggcaaccagaagagactggagagcctgcgggagctggccggcaaggaaaacctggaataccctagcgtgaccctgccacctcagcctcacaccaaggagggcgttgatgcctacaacgaagtgatcgcccgggtgcgaatgtgggtgaacctgaacctgtggcagaagctgaagctaagcagagatgatgccaagcctctgctgagactgaagggattcccttcctttcctctggtcgagagacaggccaacgaagtggactggtgggacatggtgtgtaacgtgaagaagctgatcaacgagaaaaaggaggatggcaaggtgttttggcagaatctggctggctacaagagacaggaagccctgagaccatacctgagcagcgaggaagatcggaagaagggaaagaaattcgctcggtaccagctgggcgacctgctgctgcacctggaaaagaagcacggcgaggactggggaaaggtgtacgacgaggcctgggagcggattgacaagaaagtggaaggcctgagcaagcacatcaagctggaagaggaacggagaagcgaggacgcccagagcaaggccgccctgaccgactggctgcgggctaaggccagcttcgtgatcgagggcctgaaggaggccgacaaggacgagttctgcagatgcgagctgaagctgcagaagtggtacggggacctgcggggaaagcccttcgccatcgaagccgagaacagcatcctggacatcagcggcttcagcaagcagtacaactgtgccttcatctggcagaaggacggcgtgaagaagctgaacctgtacctgatcatcaactacttcaagggcggcaagctgcggttcaagaagatcaaacctgaagccttcgaagccaacagattctacaccgtgatcaacaaaaagagcggcgagatcgtgcccatggaggtgaacttcaacttcgacgaccccaacctgatcatcctgcctctggcctttggcaagagacagggcagagaattcatctggaacgacctgctgtccctggaaaccggcagcctgaagctggccaacggaagagtgatcgagaagacactgtacaacagaagaacccggcaggatgagcctgccctgttcgtggccctgaccttcgagcggcgggaggtcctggactcctccaatatcaaaccaatgaacctgatcggcgtggcaagaggcgaaaacatccccgccgtgatcgccctgaccgaccccgagggctgcccactgagccggtttaaggatagcctgggaaacccaacccacatcctgagaatcggcgagagctataaggagaagcagcggaccatccaggccaagaaggaggtggagcagcggagagccggcggctacagccggaagtacgccagcaaagccaagaatctggcagacgatatggtgagaaacaccgctagagatctgctgtactacgccgtgacccaggatgccatgctgatcttcgccaacctgagccggggcttcggccggcagggcaagcggaccttcatggccgagagacagtacacacggatggaggactggctgaccgccaagctggcctacgagggcctgagcaagacctacctgtccaagacactggcccagtacacctccaagacatgcagcaactgtgggtttaccatcaccagcgccgactacgacagggtgctggagaagctgaagaagacagcaacaggctggatgaccacaattaacggcaaggagctgaaggtggagggccagattacctactacaacagatacaagagacagaacgtagtcaaggacctgtccgtcgagctggatagactgagcgaagaatctgtgaacaacgacatctcctcctggacaaagggcagaagcggagaagctctgagcctcctgaagaaaagattctcccatagacccgtgcaggagaagttcgtgtgcctgaactgcggcttcgagacacacgcagccgagcaagccgccctgaacatcgccagatcctggctgttcctgcggagccaggagtacaagaaataccagacaaacaagacaaccggcaacaccgataagagagccttcgtcgagacctggcagtccttttaccggaagaagcttaaggaggtgtggaaacctgccgtgcggtctggcggatctggcggaggctccaagcacggccccgtgaccttcgaggaggtggccgtgtacttcaccagggaggagtgggccctgctggaccccacccagagggccctgtacagggacgtgatgcaggagaactacgagatggtggtgctgctgggcttcctgaacagcaagcccgacgtgatcagccagctggagcagggcgaggagccctgcatcgtggacctgcagggcagcgagaaggaggtgctgcccagggccgcctgcggcggcccaagcagcggcgcccctcctcccagcggcggcagcccagccggctccccaacctctaccgaggagggcacctctgagtccgccacccccgagagcggccctggcacctccaccgagcccagcgagggcagcgcacccggcagccctgccggcagccccacctccacagaggagggaaccagcaccgagcccagcgaaggcagcgccccaggcaccagcaccgagcctagtgagcaggagattaaacggatcaacaagatcagaagaagacttgtgaaagacagcaacaccaagaaggccggcaagacaggccccatgaaaaccctgctggttagagtgatgacacccgatctgagagagcggctggaaaacctgagaaagaagcctgaaaatatcccccagcccatcagcaatacatctagagccaacctgaataagctgctgaccgattacaccgaaatgaagaaggcgatcctgcatgtgtactgggaagagttccagaaggaccctgtgggcctgatgagccgggtggcccagcctgccagcaagaagatcgatcagaacaagctgaaacctgagatggacgagaagggcaacctgaccaccgccggctttgcctgctctcagtgtggccagcccctgttcgtgtacaagctggagcaggtgtctgagaagggcaaggcttacaccaactacttcggacggtgcaatgtggccgagcacgaaaagctgatcctgctggcccagctgaagcccgagaaggatagcgacgaagccgtgacatatagcctgggaaagtttgggcagagggccctggatttctacagcattcatgtgaccaaggagtccacccaccccgtgaagcccctggcccagatcgccggaaacagatacgcctccggacctgtgggaaaggccctgagcgacgcatgtatgggcacaatcgcctccttcctgtctaagtaccaggacatcatcatcgaacaccagaaggtggtgaagggcaaccagaagagactggagagcctgcgggagctggccggcaaggaaaacctggaataccctagcgtgaccctgccacctcagcctcacaccaaggagggcgttgatgcctacaacgaagtgatcgcccgggtgcgaatgtgggtgaacctgaacctgtggcagaagctgaagctaagcagagatgatgccaagcctctgctgagactgaagggattcccttcctttcctctggtcgagagacaggccaacgaagtggactggtgggacatggtgtgtaacgtgaagaagctgatcaacgagaaaaaggaggatggcaaggtgttttggcagaatctggctggctacaagagacaggaagccctgagaccatacctgagcagcgaggaagatcggaagaagggaaagaaattcgctcggtaccagctgggcgacctgctgctgcacctggaaaagaagcacggcgaggactggggaaaggtgtacgacgaggcctgggagcggattgacaagaaagtggaaggcctgagcaagcacatcaagctggaagaggaacggagaagcgaggacgcccagagcaaggccgccctgaccgactggctgcgggctaaggccagcttcgtgatcgagggcctgaaggaggccgacaaggacgagttctgcagatgcgagctgaagctgcagaagtggtacggggacctgcggggaaagcccttcgccatcgaagccgagaacagcatcctggacatcagcggcttcagcaagcagtacaactgtgccttcatctggcagaaggacggcgtgaagaagctgaacctgtacctgatcatcaactacttcaagggcggcaagctgcggttcaagaagatcaaacctgaagccttcgaagccaacagattctacaccgtgatcaacaaaaagagcggcgagatcgtgcccatggaggtgaacttcaacttcgacgaccccaacctgatcatcctgcctctggcctttggcaagagacagggcagagaattcatctggaacgacctgctgtccctggaaaccggcagcctgaagctggccaacggaagagtgatcgagaagacactgtacaacagaagaacccggcaggatgagcctgccctgttcgtggccctgaccttcgagcggcgggaggtcctggactcctccaatatcaaaccaatgaacctgatcggcgtggcaagaggcgaaaacatccccgccgtgatcgccctgaccgaccccgagggctgcccactgagccggtttaaggatagcctgggaaacccaacccacatcctgagaatcggcgagagctataaggagaagcagcggaccatccaggccaagaaggaggtggagcagcggagagccggcggctacagccggaagtacgccagcaaagccaagaatctggcagacgatatggtgagaaacaccgctagagatctgctgtactacgccgtgacccaggatgccatgctgatcttcgccaacctgagccggggcttcggccggcagggcaagcggaccttcatggccgagagacagtacacacggatggaggactggctgaccgccaagctggcctacgagggcctgagcaagacctacctgtccaagacactggcccagtacacctccaagacatgcagcaactgtgggtttaccatcaccagcgccgactacgacagggtgctggagaagctgaagaagacagcaacaggctggatgaccacaattaacggcaaggagctgaaggtggagggccagattacctactacaacagatacaagagacagaacgtagtcaaggacctgtccgtcgagctggatagactgagcgaagaatctgtgaacaacgacatctcctcctggacaaagggcagaagcggagaagctctgagcctcctgaagaaaagattctcccatagacccgtgcaggagaagttcgtgtgcctgaactgcggcttcgagacacacgcagccgagcaagccgccctgaacatcgccagatcctggctgttcctgcggagccaggagtacaagaaataccagacaaacaagacaaccggcaacaccgataagagagccttcgtcgagacctggcagtccttttaccggaagaagcttaaggaggtgtggaaacctgccgtgcggtctggcggatctggcggaggctcctaagcacggccccgtgaccttcgaggaggtggccgtgtacttcaccagggaggagtgggccctgctggaccccacccagagggccctgtacagggacgtgatgcaggagaactacgagatggtggtgctgctgggcttcctgaacagcaagcccgacgtgatcagccagctggagcagggcgaggagccctgcatcgtggacctgcagggcagcgagaaggaggtgctgcccagggccgcctgcggatctggctccggcagcggccccaagaaaaagagaaaagtctaagctgccttctgcggggcttgccttctggccatgcccttcttctctcccttgcacctgtacctcttggtctttgaataaagcctgagtaggaaggctagcaaaaaaaaaaaaaaaaaaaaaaaaaaaaaaaaaaaaaaaaaaaaaaaaaaaaaaaaaaaaaaaaaaaaaaaaaaaaaaaa

SEQ ID NO: 15740 - RNA, 9485 nt, synthetic construct
  source 1..9485: mol_type = other RNA
aggaaataagagagaaaagaagagtaagaagaaatataagagccaccatggcccctaagaagaagcgtaaagtgagccggatggaacgcctcgtctacgaggtgcggcagaagtgcagaaacatcgaggacatctgcatctcctgcggatctctgaacgtgaccctggagcacccactgttcatcggcggcatgtgccagaactgtaaaaactgttttctggagtgtgcctatcaatacgacgatgacggctaccagagctactgcaccatctgttgcggcggaagagaggtgctgatgtgtggaaataacaactgctgccggtgcttctgcgtggaatgcgtggacctgctggtgggccccggcgccgcccaggccgctattaaggaagatccttggaactgctacatgtgcggccacaagggcacatacggcctgctgagacggagagaggactggcctagcagactgcagatgttcttcgccaataaccacgaccaggagttcgacccccctaaggtgtaccctcccgtccccgccgagaagagaaagcccatccgggtcctgagcctgttcgatggcatcgccaccggtctgctggtgctgaaggacctgggcatccaggtggataggtacattgcctccgaggtgtgcgaggactccatcaccgtgggaatggtgcgtcatcagggcaagatcatgtacgtgggcgacgtgcggagcgtgacacagaagcatatccaggagtggggccctttcgacctggtgatcggcggcagcccttgcaatgacctgagcatcgtgaacccagcccggaagggcctgtacgagggaaccggcagactgttcttcgagttttacagactgctgcacgacgcccggcctaaggaaggcgacgaccggcccttcttttggctgttcgagaatgtggtggccatgggagtcagcgacaagcgggatattagccggttcctggagagcaaccccgtgatgatcgatgccaaggaagtgagcgccgcccaccgggccagatacttctggggcaatctgcctggcatgaacagacccctggccagcaccgtgaacgacaagctggagctgcaggagtgcctggagcacggccggatcgccaagttcagcaaggtgagaaccatcaccacccgaagcaacagcatcaaacaaggcaaggaccagcactttcctgtgttcatgaacgagaaggaggacatcctgtggtgtaccgagatggagagagtgttcgggttcccagtccactacacagatgtcagcaacatgtctagactggccagacagagactgctgggaagaagctggtccgtccctgtgatcagacacctgttcgcccctctgaaggagtacttcgcctgcgtgagcagcggcaacagcaacgccaacagccggggccccagcttctctagcggcctggtgccactgtccctgagagggagccacatgggccccatggagatctacaaaaccgtgagcgcctggaagcggcagcctgtgcgcgtgctgagcctgtttcggaatatcgataaagtcctgaaaagcctgggattcctggagagcggctctggctccggcggtggcaccctgaagtacgtggaggatgtgacaaacgtggtcagacgggatgtggagaagtggggccccttcgatctggtgtacggcagcacccaacccctgggcagctcttgtgaccggtgccctggctggtacatgtttcagttccaccggatcctgcagtacgccctgccgagacaggagtcccagcggccattcttttggattttcatggacaacttgctgctgaccgaggatgaccaggaaactaccactcggttcctgcagaccgaagccgtgaccctgcaggacgtgagaggccgggactaccagaacgccatgcgggtgtggtccaacatccctggactgaaaagcaagcacgcacctctgacccctaaagaagaggagtacctgcaggcccaggtgcggagcagaagcaagctggacgcccctaaggtggatctgctggtgaagaattgcctcctgcccctgagagagtacttcaagtatttcagccagaatagtctgcccctgggaggcagcggcggcggcgccctggtgacatttgaggacgtcgccgtgcggttcacccaggaggaatgggctctgctggatccttctcagaaaatcctgtaccgggacgtgatgagagagacataccggaatctgacctccgtgggcatcaactgggaatgttgggaccttgaagcctgcttcagaagcctgggaagaaacctgagagtgcaggtggtgaagagaaagtgcgagctgaccaacagcggcccctgcgccgagggcggcccaagcagcggcgcccctcctcccagcggcggcagcccagccggctccccaacctctaccgaggagggcacctctgagtccgccacccccgagagcggccctggcacctccaccgagcccagcgagggcagcgcacccggcagccctgccggcagccccacctccacagaggagggaaccagcaccgagcccagcgaaggcagcgccccaggcaccagcaccgagcctagtgagcaggagattaaacggatcaacaagatcagaagaagacttgtgaaagacagcaacaccaagaaggccggcaagacaggccccatgaaaaccctgctggttagagtgatgacacccgatctgagagagcggctggaaaacctgagaaagaagcctgaaaatatcccccagcccatcagcaatacatctagagccaacctgaataagctgctgaccgattacaccgaaatgaagaaggcgatcctgcatgtgtactgggaagagttccagaaggaccctgtgggcctgatgagccgggtggcccagcctgccagcaagaagatcgatcagaacaagctgaaacctgagatggacgagaagggcaacctgaccaccgccggctttgcctgctctcagtgtggccagcccctgttcgtgtacaagctggagcaggtgtctgagaagggcaaggcttacaccaactacttcggacggtgcaatgtggccgagcacgaaaagctgatcctgctggcccagctgaagcccgagaaggatagcgacgaagccgtgacatatagcctgggaaagtttgggcagagggccctggatttctacagcattcatgtgaccaaggagtccacccaccccgtgaagcccctggcccagatcgccggaaacagatacgcctccggacctgtgggaaaggccctgagcgacgcatgtatgggcacaatcgcctccttcctgtctaagtaccaggacatcatcatcgaacaccagaaggtggtgaagggcaaccagaagagactggagagcctgcgggagctggccggcaaggaaaacctggaataccctagcgtgaccctgccacctcagcctcacaccaaggagggcgttgatgcctacaacgaagtgatcgcccgggtgcgaatgtgggtgaacctgaacctgtggcagaagctgaagctaagcagagatgatgccaagcctctgctgagactgaagggattcccttcctttcctctggtcgagagacaggccaacgaagtggactggtgggacatggtgtgtaacgtgaagaagctgatcaacgagaaaaaggaggatggcaaggtgttttggcagaatctggctggctacaagagacaggaagccctgagaccatacctgagcagcgaggaagatcggaagaagggaaagaaattcgctcggtaccagctgggcgacctgctgctgcacctggaaaagaagcacggcgaggactggggaaaggtgtacgacgaggcctgggagcggattgacaagaaagtggaaggcctgagcaagcacatcaagctggaagaggaacggagaagcgaggacgcccagagcaaggccgccctgaccgactggctgcgggctaaggccagcttcgtgatcgagggcctgaaggaggccgacaaggacgagttctgcagatgcgagctgaagctgcagaagtggtacggggacctgcggggaaagcccttcgccatcgaagccgagaacagcatcctggacatcagcggcttcagcaagcagtacaactgtgccttcatctggcagaaggacggcgtgaagaagctgaacctgtacctgatcatcaactacttcaagggcggcaagctgcggttcaagaagatcaaacctgaagccttcgaagccaacagattctacaccgtgatcaacaaaaagagcggcgagatcgtgcccatggaggtgaacttcaacttcgacgaccccaacctgatcatcctgcctctggcctttggcaagagacagggcagagaattcatctggaacgacctgctgtccctggaaaccggcagcctgaagctggccaacggaagagtgatcgagaagacactgtacaacagaagaacccggcaggatgagcctgccctgttcgtggccctgaccttcgagcggcgggaggtcctggactcctccaatatcaaaccaatgaacctgatcggcgtggcaagaggcgaaaacatccccgccgtgatcgccctgaccgaccccgagggctgcccactgagccggtttaaggatagcctgggaaacccaacccacatcctgagaatcggcgagagctataaggagaagcagcggaccatccaggccaagaaggaggtggagcagcggagagccggcggctacagccggaagtacgccagcaaagccaagaatctggcagacgatatggtgagaaacaccgctagagatctgctgtactacgccgtgacccaggatgccatgctgatcttcgccaacctgagccggggcttcggccggcagggcaagcggaccttcatggccgagagacagtacacacggatggaggactggctgaccgccaagctggcctacgagggcctgagcaagacctacctgtccaagacactggcccagtacacctccaagacatgcagcaactgtgggtttaccatcaccagcgccgactacgacagggtgctggagaagctgaagaagacagcaacaggctggatgaccacaattaacggcaaggagctgaaggtggagggccagattacctactacaacagatacaagagacagaacgtagtcaaggacctgtccgtcgagctggatagactgagcgaagaatctgtgaacaacgacatctcctcctggacaaagggcagaagcggagaagctctgagcctcctgaagaaaagattctcccatagacccgtgcaggagaagttcgtgtgcctgaactgcggcttcgagacacacgcagccgagcaagccgccctgaacatcgccagatcctggctgttcctgcggagccaggagtacaagaaataccagacaaacaagacaaccggcaacaccgataagagagccttcgtcgagacctggcagtccttttaccggaagaagcttaaggaggtgtggaaacctgccgtgcggtctggcggatctggcggaggctccagccaggaggtggtgaccttccaggacgtggccgtgaacttcaccagggaggagtggaggctgctgagccccccccagaaggagctgtacagggaggtgatgctggagaacgccaggaacctgctgagcgtgggcctgcccgccagcatcgaggacgtgatcagcaacgtggagcagagggaggccctgtggatgctggagagggagggcctgaggagctgctgccccgaggaggacatcaggggcggcccaagcagcggcgcccctcctcccagcggcggcagcccagccggctccccaacctctaccgaggagggcacctctgagtccgccacccccgagagcggccctggcacctccaccgagcccagcgagggcagcgcacccggcagccctgccggcagccccacctccacagaggagggaaccagcaccgagcccagcgaaggcagcgccccaggcaccagcaccgagcctagtgagcaggagattaaacggatcaacaagatcagaagaagacttgtgaaagacagcaacaccaagaaggccggcaagacaggccccatgaaaaccctgctggttagagtgatgacacccgatctgagagagcggctggaaaacctgagaaagaagcctgaaaatatcccccagcccatcagcaatacatctagagccaacctgaataagctgctgaccgattacaccgaaatgaagaaggcgatcctgcatgtgtactgggaagagttccagaaggaccctgtgggcctgatgagccgggtggcccagcctgccagcaagaagatcgatcagaacaagctgaaacctgagatggacgagaagggcaacctgaccaccgccggctttgcctgctctcagtgtggccagcccctgttcgtgtacaagctggagcaggtgtctgagaagggcaaggcttacaccaactacttcggacggtgcaatgtggccgagcacgaaaagctgatcctgctggcccagctgaagcccgagaaggatagcgacgaagccgtgacatatagcctgggaaagtttgggcagagggccctggatttctacagcattcatgtgaccaaggagtccacccaccccgtgaagcccctggcccagatcgccggaaacagatacgcctccggacctgtgggaaaggccctgagcgacgcatgtatgggcacaatcgcctccttcctgtctaagtaccaggacatcatcatcgaacaccagaaggtggtgaagggcaaccagaagagactggagagcctgcgggagctggccggcaaggaaaacctggaataccctagcgtgaccctgccacctcagcctcacaccaaggagggcgttgatgcctacaacgaagtgatcgcccgggtgcgaatgtgggtgaacctgaacctgtggcagaagctgaagctaagcagagatgatgccaagcctctgctgagactgaagggattcccttcctttcctctggtcgagagacaggccaacgaagtggactggtgggacatggtgtgtaacgtgaagaagctgatcaacgagaaaaaggaggatggcaaggtgttttggcagaatctggctggctacaagagacaggaagccctgagaccatacctgagcagcgaggaagatcggaagaagggaaagaaattcgctcggtaccagctgggcgacctgctgctgcacctggaaaagaagcacggcgaggactggggaaaggtgtacgacgaggcctgggagcggattgacaagaaagtggaaggcctgagcaagcacatcaagctggaagaggaacggagaagcgaggacgcccagagcaaggccgccctgaccgactggctgcgggctaaggccagcttcgtgatcgagggcctgaaggaggccgacaaggacgagttctgcagatgcgagctgaagctgcagaagtggtacggggacctgcggggaaagcccttcgccatcgaagccgagaacagcatcctggacatcagcggcttcagcaagcagtacaactgtgccttcatctggcagaaggacggcgtgaagaagctgaacctgtacctgatcatcaactacttcaagggcggcaagctgcggttcaagaagatcaaacctgaagccttcgaagccaacagattctacaccgtgatcaacaaaaagagcggcgagatcgtgcccatggaggtgaacttcaacttcgacgaccccaacctgatcatcctgcctctggcctttggcaagagacagggcagagaattcatctggaacgacctgctgtccctggaaaccggcagcctgaagctggccaacggaagagtgatcgagaagacactgtacaacagaagaacccggcaggatgagcctgccctgttcgtggccctgaccttcgagcggcgggaggtcctggactcctccaatatcaaaccaatgaacctgatcggcgtggcaagaggcgaaaacatccccgccgtgatcgccctgaccgaccccgagggctgcccactgagccggtttaaggatagcctgggaaacccaacccacatcctgagaatcggcgagagctataaggagaagcagcggaccatccaggccaagaaggaggtggagcagcggagagccggcggctacagccggaagtacgccagcaaagccaagaatctggcagacgatatggtgagaaacaccgctagagatctgctgtactacgccgtgacccaggatgccatgctgatcttcgccaacctgagccggggcttcggccggcagggcaagcggaccttcatggccgagagacagtacacacggatggaggactggctgaccgccaagctggcctacgagggcctgagcaagacctacctgtccaagacactggcccagtacacctccaagacatgcagcaactgtgggtttaccatcaccagcgccgactacgacagggtgctggagaagctgaagaagacagcaacaggctggatgaccacaattaacggcaaggagctgaaggtggagggccagattacctactacaacagatacaagagacagaacgtagtcaaggacctgtccgtcgagctggatagactgagcgaagaatctgtgaacaacgacatctcctcctggacaaagggcagaagcggagaagctctgagcctcctgaagaaaagattctcccatagacccgtgcaggagaagttcgtgtgcctgaactgcggcttcgagacacacgcagccgagcaagccgccctgaacatcgccagatcctggctgttcctgcggagccaggagtacaagaaataccagacaaacaagacaaccggcaacaccgataagagagccttcgtcgagacctggcagtccttttaccggaagaagcttaaggaggtgtggaaacctgccgtgcggtctggcggatctggcggaggctcctagccaggaggtggtgaccttccaggacgtggccgtgaacttcaccagggaggagtggaggctgctgagccccccccagaaggagctgtacagggaggtgatgctggagaacgccaggaacctgctgagcgtgggcctgcccgccagcatcgaggacgtgatcagcaacgtggagcagagggaggccctgtggatgctggagagggagggcctgaggagctgctgccccgaggaggacatcaggggatctggctccggcagcggccccaagaaaaagagaaaagtctaagctgccttctgcggggcttgccttctggccatgcccttcttctctcccttgcacctgtacctcttggtctttgaataaagcctgagtaggaaggctagcaaaaaaaaaaaaaaaaaaaaaaaaaaaaaaaaaaaaaaaaaaaaaaaaaaaaaaaaaaaaaaaaaaaaaaaaaaaaaaaa

SEQ ID NO: 15741 - RNA, 9485 nt, synthetic construct
  source 1..9485: mol_type = other RNA
aggaaataagagagaaaagaagagtaagaagaaatataagagccaccatggcccctaagaagaagcgtaaagtgagccggatggaacgcctcgtctacgaggtgcggcagaagtgcagaaacatcgaggacatctgcatctcctgcggatctctgaacgtgaccctggagcacccactgttcatcggcggcatgtgccagaactgtaaaaactgttttctggagtgtgcctatcaatacgacgatgacggctaccagagctactgcaccatctgttgcggcggaagagaggtgctgatgtgtggaaataacaactgctgccggtgcttctgcgtggaatgcgtggacctgctggtgggccccggcgccgcccaggccgctattaaggaagatccttggaactgctacatgtgcggccacaagggcacatacggcctgctgagacggagagaggactggcctagcagactgcagatgttcttcgccaataaccacgaccaggagttcgacccccctaaggtgtaccctcccgtccccgccgagaagagaaagcccatccgggtcctgagcctgttcgatggcatcgccaccggtctgctggtgctgaaggacctgggcatccaggtggataggtacattgcctccgaggtgtgcgaggactccatcaccgtgggaatggtgcgtcatcagggcaagatcatgtacgtgggcgacgtgcggagcgtgacacagaagcatatccaggagtggggccctttcgacctggtgatcggcggcagcccttgcaatgacctgagcatcgtgaacccagcccggaagggcctgtacgagggaaccggcagactgttcttcgagttttacagactgctgcacgacgcccggcctaaggaaggcgacgaccggcccttcttttggctgttcgagaatgtggtggccatgggagtcagcgacaagcgggatattagccggttcctggagagcaaccccgtgatgatcgatgccaaggaagtgagcgccgcccaccgggccagatacttctggggcaatctgcctggcatgaacagacccctggccagcaccgtgaacgacaagctggagctgcaggagtgcctggagcacggccggatcgccaagttcagcaaggtgagaaccatcaccacccgaagcaacagcatcaaacaaggcaaggaccagcactttcctgtgttcatgaacgagaaggaggacatcctgtggtgtaccgagatggagagagtgttcgggttcccagtccactacacagatgtcagcaacatgtctagactggccagacagagactgctgggaagaagctggtccgtccctgtgatcagacacctgttcgcccctctgaaggagtacttcgcctgcgtgagcagcggcaacagcaacgccaacagccggggccccagcttctctagcggcctggtgccactgtccctgagagggagccacatgggccccatggagatctacaaaaccgtgagcgcctggaagcggcagcctgtgcgcgtgctgagcctgtttcggaatatcgataaagtcctgaaaagcctgggattcctggagagcggctctggctccggcggtggcaccctgaagtacgtggaggatgtgacaaacgtggtcagacgggatgtggagaagtggggccccttcgatctggtgtacggcagcacccaacccctgggcagctcttgtgaccggtgccctggctggtacatgtttcagttccaccggatcctgcagtacgccctgccgagacaggagtcccagcggccattcttttggattttcatggacaacttgctgctgaccgaggatgaccaggaaactaccactcggttcctgcagaccgaagccgtgaccctgcaggacgtgagaggccgggactaccagaacgccatgcgggtgtggtccaacatccctggactgaaaagcaagcacgcacctctgacccctaaagaagaggagtacctgcaggcccaggtgcggagcagaagcaagctggacgcccctaaggtggatctgctggtgaagaattgcctcctgcccctgagagagtacttcaagtatttcagccagaatagtctgcccctgggaggcagcggcggcggcgccctggtgacatttgaggacgtcgccgtgcggttcacccaggaggaatgggctctgctggatccttctcagaaaatcctgtaccgggacgtgatgagagagacataccggaatctgacctccgtgggcatcaactgggaatgttgggaccttgaagcctgcttcagaagcctgggaagaaacctgagagtgcaggtggtgaagagaaagtgcgagctgaccaacagcggcccctgcgccgagggcggcccaagcagcggcgcccctcctcccagcggcggcagcccagccggctccccaacctctaccgaggagggcacctctgagtccgccacccccgagagcggccctggcacctccaccgagcccagcgagggcagcgcacccggcagccctgccggcagccccacctccacagaggagggaaccagcaccgagcccagcgaaggcagcgccccaggcaccagcaccgagcctagtgagcaggagattaaacggatcaacaagatcagaagaagacttgtgaaagacagcaacaccaagaaggccggcaagacaggccccatgaaaaccctgctggttagagtgatgacacccgatctgagagagcggctggaaaacctgagaaagaagcctgaaaatatcccccagcccatcagcaatacatctagagccaacctgaataagctgctgaccgattacaccgaaatgaagaaggcgatcctgcatgtgtactgggaagagttccagaaggaccctgtgggcctgatgagccgggtggcccagcctgccagcaagaagatcgatcagaacaagctgaaacctgagatggacgagaagggcaacctgaccaccgccggctttgcctgctctcagtgtggccagcccctgttcgtgtacaagctggagcaggtgtctgagaagggcaaggcttacaccaactacttcggacggtgcaatgtggccgagcacgaaaagctgatcctgctggcccagctgaagcccgagaaggatagcgacgaagccgtgacatatagcctgggaaagtttgggcagagggccctggatttctacagcattcatgtgaccaaggagtccacccaccccgtgaagcccctggcccagatcgccggaaacagatacgcctccggacctgtgggaaaggccctgagcgacgcatgtatgggcacaatcgcctccttcctgtctaagtaccaggacatcatcatcgaacaccagaaggtggtgaagggcaaccagaagagactggagagcctgcgggagctggccggcaaggaaaacctggaataccctagcgtgaccctgccacctcagcctcacaccaaggagggcgttgatgcctacaacgaagtgatcgcccgggtgcgaatgtgggtgaacctgaacctgtggcagaagctgaagctaagcagagatgatgccaagcctctgctgagactgaagggattcccttcctttcctctggtcgagagacaggccaacgaagtggactggtgggacatggtgtgtaacgtgaagaagctgatcaacgagaaaaaggaggatggcaaggtgttttggcagaatctggctggctacaagagacaggaagccctgagaccatacctgagcagcgaggaagatcggaagaagggaaagaaattcgctcggtaccagctgggcgacctgctgctgcacctggaaaagaagcacggcgaggactggggaaaggtgtacgacgaggcctgggagcggattgacaagaaagtggaaggcctgagcaagcacatcaagctggaagaggaacggagaagcgaggacgcccagagcaaggccgccctgaccgactggctgcgggctaaggccagcttcgtgatcgagggcctgaaggaggccgacaaggacgagttctgcagatgcgagctgaagctgcagaagtggtacggggacctgcggggaaagcccttcgccatcgaagccgagaacagcatcctggacatcagcggcttcagcaagcagtacaactgtgccttcatctggcagaaggacggcgtgaagaagctgaacctgtacctgatcatcaactacttcaagggcggcaagctgcggttcaagaagatcaaacctgaagccttcgaagccaacagattctacaccgtgatcaacaaaaagagcggcgagatcgtgcccatggaggtgaacttcaacttcgacgaccccaacctgatcatcctgcctctggcctttggcaagagacagggcagagaattcatctggaacgacctgctgtccctggaaaccggcagcctgaagctggccaacggaagagtgatcgagaagacactgtacaacagaagaacccggcaggatgagcctgccctgttcgtggccctgaccttcgagcggcgggaggtcctggactcctccaatatcaaaccaatgaacctgatcggcgtggcaagaggcgaaaacatccccgccgtgatcgccctgaccgaccccgagggctgcccactgagccggtttaaggatagcctgggaaacccaacccacatcctgagaatcggcgagagctataaggagaagcagcggaccatccaggccaagaaggaggtggagcagcggagagccggcggctacagccggaagtacgccagcaaagccaagaatctggcagacgatatggtgagaaacaccgctagagatctgctgtactacgccgtgacccaggatgccatgctgatcttcgccaacctgagccggggcttcggccggcagggcaagcggaccttcatggccgagagacagtacacacggatggaggactggctgaccgccaagctggcctacgagggcctgagcaagacctacctgtccaagacactggcccagtacacctccaagacatgcagcaactgtgggtttaccatcaccagcgccgactacgacagggtgctggagaagctgaagaagacagcaacaggctggatgaccacaattaacggcaaggagctgaaggtggagggccagattacctactacaacagatacaagagacagaacgtagtcaaggacctgtccgtcgagctggatagactgagcgaagaatctgtgaacaacgacatctcctcctggacaaagggcagaagcggagaagctctgagcctcctgaagaaaagattctcccatagacccgtgcaggagaagttcgtgtgcctgaactgcggcttcgagacacacgcagccgagcaagccgccctgaacatcgccagatcctggctgttcctgcggagccaggagtacaagaaataccagacaaacaagacaaccggcaacaccgataagagagccttcgtcgagacctggcagtccttttaccggaagaagcttaaggaggtgtggaaacctgccgtgcggtctggcggatctggcggaggctccgagagcgtggccttcgaggacgtggccgtgtacttcacccagaaccagtggggcagcctggaccccgcccagagggccctgtacagggaggtgatgctggagaactacgccaacgtggccagcctggtggccttccccttccccaagcccgccctgatcagccacctggagaagggcgaggccccctggggccccgacccctgggacgccgagatccccagcggcatcagccagggcggcgagggcggcccaagcagcggcgcccctcctcccagcggcggcagcccagccggctccccaacctctaccgaggagggcacctctgagtccgccacccccgagagcggccctggcacctccaccgagcccagcgagggcagcgcacccggcagccctgccggcagccccacctccacagaggagggaaccagcaccgagcccagcgaaggcagcgccccaggcaccagcaccgagcctagtgagcaggagattaaacggatcaacaagatcagaagaagacttgtgaaagacagcaacaccaagaaggccggcaagacaggccccatgaaaaccctgctggttagagtgatgacacccgatctgagagagcggctggaaaacctgagaaagaagcctgaaaatatcccccagcccatcagcaatacatctagagccaacctgaataagctgctgaccgattacaccgaaatgaagaaggcgatcctgcatgtgtactgggaagagttccagaaggaccctgtgggcctgatgagccgggtggcccagcctgccagcaagaagatcgatcagaacaagctgaaacctgagatggacgagaagggcaacctgaccaccgccggctttgcctgctctcagtgtggccagcccctgttcgtgtacaagctggagcaggtgtctgagaagggcaaggcttacaccaactacttcggacggtgcaatgtggccgagcacgaaaagctgatcctgctggcccagctgaagcccgagaaggatagcgacgaagccgtgacatatagcctgggaaagtttgggcagagggccctggatttctacagcattcatgtgaccaaggagtccacccaccccgtgaagcccctggcccagatcgccggaaacagatacgcctccggacctgtgggaaaggccctgagcgacgcatgtatgggcacaatcgcctccttcctgtctaagtaccaggacatcatcatcgaacaccagaaggtggtgaagggcaaccagaagagactggagagcctgcgggagctggccggcaaggaaaacctggaataccctagcgtgaccctgccacctcagcctcacaccaaggagggcgttgatgcctacaacgaagtgatcgcccgggtgcgaatgtgggtgaacctgaacctgtggcagaagctgaagctaagcagagatgatgccaagcctctgctgagactgaagggattcccttcctttcctctggtcgagagacaggccaacgaagtggactggtgggacatggtgtgtaacgtgaagaagctgatcaacgagaaaaaggaggatggcaaggtgttttggcagaatctggctggctacaagagacaggaagccctgagaccatacctgagcagcgaggaagatcggaagaagggaaagaaattcgctcggtaccagctgggcgacctgctgctgcacctggaaaagaagcacggcgaggactggggaaaggtgtacgacgaggcctgggagcggattgacaagaaagtggaaggcctgagcaagcacatcaagctggaagaggaacggagaagcgaggacgcccagagcaaggccgccctgaccgactggctgcgggctaaggccagcttcgtgatcgagggcctgaaggaggccgacaaggacgagttctgcagatgcgagctgaagctgcagaagtggtacggggacctgcggggaaagcccttcgccatcgaagccgagaacagcatcctggacatcagcggcttcagcaagcagtacaactgtgccttcatctggcagaaggacggcgtgaagaagctgaacctgtacctgatcatcaactacttcaagggcggcaagctgcggttcaagaagatcaaacctgaagccttcgaagccaacagattctacaccgtgatcaacaaaaagagcggcgagatcgtgcccatggaggtgaacttcaacttcgacgaccccaacctgatcatcctgcctctggcctttggcaagagacagggcagagaattcatctggaacgacctgctgtccctggaaaccggcagcctgaagctggccaacggaagagtgatcgagaagacactgtacaacagaagaacccggcaggatgagcctgccctgttcgtggccctgaccttcgagcggcgggaggtcctggactcctccaatatcaaaccaatgaacctgatcggcgtggcaagaggcgaaaacatccccgccgtgatcgccctgaccgaccccgagggctgcccactgagccggtttaaggatagcctgggaaacccaacccacatcctgagaatcggcgagagctataaggagaagcagcggaccatccaggccaagaaggaggtggagcagcggagagccggcggctacagccggaagtacgccagcaaagccaagaatctggcagacgatatggtgagaaacaccgctagagatctgctgtactacgccgtgacccaggatgccatgctgatcttcgccaacctgagccggggcttcggccggcagggcaagcggaccttcatggccgagagacagtacacacggatggaggactggctgaccgccaagctggcctacgagggcctgagcaagacctacctgtccaagacactggcccagtacacctccaagacatgcagcaactgtgggtttaccatcaccagcgccgactacgacagggtgctggagaagctgaagaagacagcaacaggctggatgaccacaattaacggcaaggagctgaaggtggagggccagattacctactacaacagatacaagagacagaacgtagtcaaggacctgtccgtcgagctggatagactgagcgaagaatctgtgaacaacgacatctcctcctggacaaagggcagaagcggagaagctctgagcctcctgaagaaaagattctcccatagacccgtgcaggagaagttcgtgtgcctgaactgcggcttcgagacacacgcagccgagcaagccgccctgaacatcgccagatcctggctgttcctgcggagccaggagtacaagaaataccagacaaacaagacaaccggcaacaccgataagagagccttcgtcgagacctggcagtccttttaccggaagaagcttaaggaggtgtggaaacctgccgtgcggtctggcggatctggcggaggctcctgagagcgtggccttcgaggacgtggccgtgtacttcacccagaaccagtggggcagcctggaccccgcccagagggccctgtacagggaggtgatgctggagaactacgccaacgtggccagcctggtggccttccccttccccaagcccgccctgatcagccacctggagaagggcgaggccccctggggccccgacccctgggacgccgagatccccagcggcatcagccagggcggcgagggatctggctccggcagcggccccaagaaaaagagaaaagtctaagctgccttctgcggggcttgccttctggccatgcccttcttctctcccttgcacctgtacctcttggtctttgaataaagcctgagtaggaaggctagcaaaaaaaaaaaaaaaaaaaaaaaaaaaaaaaaaaaaaaaaaaaaaaaaaaaaaaaaaaaaaaaaaaaaaaaaaaaaaaaa

SEQ ID NO: 15742 - RNA, 9485 nt, synthetic construct
  source 1..9485: mol_type = other RNA
aggaaataagagagaaaagaagagtaagaagaaatataagagccaccatggcccctaagaagaagcgtaaagtgagccggatggaacgcctcgtctacgaggtgcggcagaagtgcagaaacatcgaggacatctgcatctcctgcggatctctgaacgtgaccctggagcacccactgttcatcggcggcatgtgccagaactgtaaaaactgttttctggagtgtgcctatcaatacgacgatgacggctaccagagctactgcaccatctgttgcggcggaagagaggtgctgatgtgtggaaataacaactgctgccggtgcttctgcgtggaatgcgtggacctgctggtgggccccggcgccgcccaggccgctattaaggaagatccttggaactgctacatgtgcggccacaagggcacatacggcctgctgagacggagagaggactggcctagcagactgcagatgttcttcgccaataaccacgaccaggagttcgacccccctaaggtgtaccctcccgtccccgccgagaagagaaagcccatccgggtcctgagcctgttcgatggcatcgccaccggtctgctggtgctgaaggacctgggcatccaggtggataggtacattgcctccgaggtgtgcgaggactccatcaccgtgggaatggtgcgtcatcagggcaagatcatgtacgtgggcgacgtgcggagcgtgacacagaagcatatccaggagtggggccctttcgacctggtgatcggcggcagcccttgcaatgacctgagcatcgtgaacccagcccggaagggcctgtacgagggaaccggcagactgttcttcgagttttacagactgctgcacgacgcccggcctaaggaaggcgacgaccggcccttcttttggctgttcgagaatgtggtggccatgggagtcagcgacaagcgggatattagccggttcctggagagcaaccccgtgatgatcgatgccaaggaagtgagcgccgcccaccgggccagatacttctggggcaatctgcctggcatgaacagacccctggccagcaccgtgaacgacaagctggagctgcaggagtgcctggagcacggccggatcgccaagttcagcaaggtgagaaccatcaccacccgaagcaacagcatcaaacaaggcaaggaccagcactttcctgtgttcatgaacgagaaggaggacatcctgtggtgtaccgagatggagagagtgttcgggttcccagtccactacacagatgtcagcaacatgtctagactggccagacagagactgctgggaagaagctggtccgtccctgtgatcagacacctgttcgcccctctgaaggagtacttcgcctgcgtgagcagcggcaacagcaacgccaacagccggggccccagcttctctagcggcctggtgccactgtccctgagagggagccacatgggccccatggagatctacaaaaccgtgagcgcctggaagcggcagcctgtgcgcgtgctgagcctgtttcggaatatcgataaagtcctgaaaagcctgggattcctggagagcggctctggctccggcggtggcaccctgaagtacgtggaggatgtgacaaacgtggtcagacgggatgtggagaagtggggccccttcgatctggtgtacggcagcacccaacccctgggcagctcttgtgaccggtgccctggctggtacatgtttcagttccaccggatcctgcagtacgccctgccgagacaggagtcccagcggccattcttttggattttcatggacaacttgctgctgaccgaggatgaccaggaaactaccactcggttcctgcagaccgaagccgtgaccctgcaggacgtgagaggccgggactaccagaacgccatgcgggtgtggtccaacatccctggactgaaaagcaagcacgcacctctgacccctaaagaagaggagtacctgcaggcccaggtgcggagcagaagcaagctggacgcccctaaggtggatctgctggtgaagaattgcctcctgcccctgagagagtacttcaagtatttcagccagaatagtctgcccctgggaggcagcggcggcggcgccctggtgacatttgaggacgtcgccgtgcggttcacccaggaggaatgggctctgctggatccttctcagaaaatcctgtaccgggacgtgatgagagagacataccggaatctgacctccgtgggcatcaactgggaatgttgggaccttgaagcctgcttcagaagcctgggaagaaacctgagagtgcaggtggtgaagagaaagtgcgagctgaccaacagcggcccctgcgccgagggcggcccaagcagcggcgcccctcctcccagcggcggcagcccagccggctccccaacctctaccgaggagggcacctctgagtccgccacccccgagagcggccctggcacctccaccgagcccagcgagggcagcgcacccggcagccctgccggcagccccacctccacagaggagggaaccagcaccgagcccagcgaaggcagcgccccaggcaccagcaccgagcctagtgagcaggagattaaacggatcaacaagatcagaagaagacttgtgaaagacagcaacaccaagaaggccggcaagacaggccccatgaaaaccctgctggttagagtgatgacacccgatctgagagagcggctggaaaacctgagaaagaagcctgaaaatatcccccagcccatcagcaatacatctagagccaacctgaataagctgctgaccgattacaccgaaatgaagaaggcgatcctgcatgtgtactgggaagagttccagaaggaccctgtgggcctgatgagccgggtggcccagcctgccagcaagaagatcgatcagaacaagctgaaacctgagatggacgagaagggcaacctgaccaccgccggctttgcctgctctcagtgtggccagcccctgttcgtgtacaagctggagcaggtgtctgagaagggcaaggcttacaccaactacttcggacggtgcaatgtggccgagcacgaaaagctgatcctgctggcccagctgaagcccgagaaggatagcgacgaagccgtgacatatagcctgggaaagtttgggcagagggccctggatttctacagcattcatgtgaccaaggagtccacccaccccgtgaagcccctggcccagatcgccggaaacagatacgcctccggacctgtgggaaaggccctgagcgacgcatgtatgggcacaatcgcctccttcctgtctaagtaccaggacatcatcatcgaacaccagaaggtggtgaagggcaaccagaagagactggagagcctgcgggagctggccggcaaggaaaacctggaataccctagcgtgaccctgccacctcagcctcacaccaaggagggcgttgatgcctacaacgaagtgatcgcccgggtgcgaatgtgggtgaacctgaacctgtggcagaagctgaagctaagcagagatgatgccaagcctctgctgagactgaagggattcccttcctttcctctggtcgagagacaggccaacgaagtggactggtgggacatggtgtgtaacgtgaagaagctgatcaacgagaaaaaggaggatggcaaggtgttttggcagaatctggctggctacaagagacaggaagccctgagaccatacctgagcagcgaggaagatcggaagaagggaaagaaattcgctcggtaccagctgggcgacctgctgctgcacctggaaaagaagcacggcgaggactggggaaaggtgtacgacgaggcctgggagcggattgacaagaaagtggaaggcctgagcaagcacatcaagctggaagaggaacggagaagcgaggacgcccagagcaaggccgccctgaccgactggctgcgggctaaggccagcttcgtgatcgagggcctgaaggaggccgacaaggacgagttctgcagatgcgagctgaagctgcagaagtggtacggggacctgcggggaaagcccttcgccatcgaagccgagaacagcatcctggacatcagcggcttcagcaagcagtacaactgtgccttcatctggcagaaggacggcgtgaagaagctgaacctgtacctgatcatcaactacttcaagggcggcaagctgcggttcaagaagatcaaacctgaagccttcgaagccaacagattctacaccgtgatcaacaaaaagagcggcgagatcgtgcccatggaggtgaacttcaacttcgacgaccccaacctgatcatcctgcctctggcctttggcaagagacagggcagagaattcatctggaacgacctgctgtccctggaaaccggcagcctgaagctggccaacggaagagtgatcgagaagacactgtacaacagaagaacccggcaggatgagcctgccctgttcgtggccctgaccttcgagcggcgggaggtcctggactcctccaatatcaaaccaatgaacctgatcggcgtggcaagaggcgaaaacatccccgccgtgatcgccctgaccgaccccgagggctgcccactgagccggtttaaggatagcctgggaaacccaacccacatcctgagaatcggcgagagctataaggagaagcagcggaccatccaggccaagaaggaggtggagcagcggagagccggcggctacagccggaagtacgccagcaaagccaagaatctggcagacgatatggtgagaaacaccgctagagatctgctgtactacgccgtgacccaggatgccatgctgatcttcgccaacctgagccggggcttcggccggcagggcaagcggaccttcatggccgagagacagtacacacggatggaggactggctgaccgccaagctggcctacgagggcctgagcaagacctacctgtccaagacactggcccagtacacctccaagacatgcagcaactgtgggtttaccatcaccagcgccgactacgacagggtgctggagaagctgaagaagacagcaacaggctggatgaccacaattaacggcaaggagctgaaggtggagggccagattacctactacaacagatacaagagacagaacgtagtcaaggacctgtccgtcgagctggatagactgagcgaagaatctgtgaacaacgacatctcctcctggacaaagggcagaagcggagaagctctgagcctcctgaagaaaagattctcccatagacccgtgcaggagaagttcgtgtgcctgaactgcggcttcgagacacacgcagccgagcaagccgccctgaacatcgccagatcctggctgttcctgcggagccaggagtacaagaaataccagacaaacaagacaaccggcaacaccgataagagagccttcgtcgagacctggcagtccttttaccggaagaagcttaaggaggtgtggaaacctgccgtgcggtctggcggatctggcggaggctccagcgagggcctggtgaccttcggcgacgtggccgtggacttcagccaggaggagtgggagtggctgaaccccgcccagaggagcctgtacaggaaggtgatgctggacaactacaggagcctggtgagcctgggcgtgagcgtgagcaagcccgacgtgatcagcctgctggagcagggcaaggagccctggctggtgaaggaggagggccccaggggcgccaggagcgactgggagtacgccggcggcccaagcagcggcgcccctcctcccagcggcggcagcccagccggctccccaacctctaccgaggagggcacctctgagtccgccacccccgagagcggccctggcacctccaccgagcccagcgagggcagcgcacccggcagccctgccggcagccccacctccacagaggagggaaccagcaccgagcccagcgaaggcagcgccccaggcaccagcaccgagcctagtgagcaggagattaaacggatcaacaagatcagaagaagacttgtgaaagacagcaacaccaagaaggccggcaagacaggccccatgaaaaccctgctggttagagtgatgacacccgatctgagagagcggctggaaaacctgagaaagaagcctgaaaatatcccccagcccatcagcaatacatctagagccaacctgaataagctgctgaccgattacaccgaaatgaagaaggcgatcctgcatgtgtactgggaagagttccagaaggaccctgtgggcctgatgagccgggtggcccagcctgccagcaagaagatcgatcagaacaagctgaaacctgagatggacgagaagggcaacctgaccaccgccggctttgcctgctctcagtgtggccagcccctgttcgtgtacaagctggagcaggtgtctgagaagggcaaggcttacaccaactacttcggacggtgcaatgtggccgagcacgaaaagctgatcctgctggcccagctgaagcccgagaaggatagcgacgaagccgtgacatatagcctgggaaagtttgggcagagggccctggatttctacagcattcatgtgaccaaggagtccacccaccccgtgaagcccctggcccagatcgccggaaacagatacgcctccggacctgtgggaaaggccctgagcgacgcatgtatgggcacaatcgcctccttcctgtctaagtaccaggacatcatcatcgaacaccagaaggtggtgaagggcaaccagaagagactggagagcctgcgggagctggccggcaaggaaaacctggaataccctagcgtgaccctgccacctcagcctcacaccaaggagggcgttgatgcctacaacgaagtgatcgcccgggtgcgaatgtgggtgaacctgaacctgtggcagaagctgaagctaagcagagatgatgccaagcctctgctgagactgaagggattcccttcctttcctctggtcgagagacaggccaacgaagtggactggtgggacatggtgtgtaacgtgaagaagctgatcaacgagaaaaaggaggatggcaaggtgttttggcagaatctggctggctacaagagacaggaagccctgagaccatacctgagcagcgaggaagatcggaagaagggaaagaaattcgctcggtaccagctgggcgacctgctgctgcacctggaaaagaagcacggcgaggactggggaaaggtgtacgacgaggcctgggagcggattgacaagaaagtggaaggcctgagcaagcacatcaagctggaagaggaacggagaagcgaggacgcccagagcaaggccgccctgaccgactggctgcgggctaaggccagcttcgtgatcgagggcctgaaggaggccgacaaggacgagttctgcagatgcgagctgaagctgcagaagtggtacggggacctgcggggaaagcccttcgccatcgaagccgagaacagcatcctggacatcagcggcttcagcaagcagtacaactgtgccttcatctggcagaaggacggcgtgaagaagctgaacctgtacctgatcatcaactacttcaagggcggcaagctgcggttcaagaagatcaaacctgaagccttcgaagccaacagattctacaccgtgatcaacaaaaagagcggcgagatcgtgcccatggaggtgaacttcaacttcgacgaccccaacctgatcatcctgcctctggcctttggcaagagacagggcagagaattcatctggaacgacctgctgtccctggaaaccggcagcctgaagctggccaacggaagagtgatcgagaagacactgtacaacagaagaacccggcaggatgagcctgccctgttcgtggccctgaccttcgagcggcgggaggtcctggactcctccaatatcaaaccaatgaacctgatcggcgtggcaagaggcgaaaacatccccgccgtgatcgccctgaccgaccccgagggctgcccactgagccggtttaaggatagcctgggaaacccaacccacatcctgagaatcggcgagagctataaggagaagcagcggaccatccaggccaagaaggaggtggagcagcggagagccggcggctacagccggaagtacgccagcaaagccaagaatctggcagacgatatggtgagaaacaccgctagagatctgctgtactacgccgtgacccaggatgccatgctgatcttcgccaacctgagccggggcttcggccggcagggcaagcggaccttcatggccgagagacagtacacacggatggaggactggctgaccgccaagctggcctacgagggcctgagcaagacctacctgtccaagacactggcccagtacacctccaagacatgcagcaactgtgggtttaccatcaccagcgccgactacgacagggtgctggagaagctgaagaagacagcaacaggctggatgaccacaattaacggcaaggagctgaaggtggagggccagattacctactacaacagatacaagagacagaacgtagtcaaggacctgtccgtcgagctggatagactgagcgaagaatctgtgaacaacgacatctcctcctggacaaagggcagaagcggagaagctctgagcctcctgaagaaaagattctcccatagacccgtgcaggagaagttcgtgtgcctgaactgcggcttcgagacacacgcagccgagcaagccgccctgaacatcgccagatcctggctgttcctgcggagccaggagtacaagaaataccagacaaacaagacaaccggcaacaccgataagagagccttcgtcgagacctggcagtccttttaccggaagaagcttaaggaggtgtggaaacctgccgtgcggtctggcggatctggcggaggctcctagcgagggcctggtgaccttcggcgacgtggccgtggacttcagccaggaggagtgggagtggctgaaccccgcccagaggagcctgtacaggaaggtgatgctggacaactacaggagcctggtgagcctgggcgtgagcgtgagcaagcccgacgtgatcagcctgctggagcagggcaaggagccctggctggtgaaggaggagggccccaggggcgccaggagcgactgggagtacgccggatctggctccggcagcggccccaagaaaaagagaaaagtctaagctgccttctgcggggcttgccttctggccatgcccttcttctctcccttgcacctgtacctcttggtctttgaataaagcctgagtaggaaggctagcaaaaaaaaaaaaaaaaaaaaaaaaaaaaaaaaaaaaaaaaaaaaaaaaaaaaaaaaaaaaaaaaaaaaaaaaaaaaaaaa

SEQ ID NO: 15743 - RNA, 9485 nt, synthetic construct
  source 1..9485: mol_type = other RNA
aggaaataagagagaaaagaagagtaagaagaaatataagagccaccatggcccctaagaagaagcgtaaagtgagccggatggaacgcctcgtctacgaggtgcggcagaagtgcagaaacatcgaggacatctgcatctcctgcggatctctgaacgtgaccctggagcacccactgttcatcggcggcatgtgccagaactgtaaaaactgttttctggagtgtgcctatcaatacgacgatgacggctaccagagctactgcaccatctgttgcggcggaagagaggtgctgatgtgtggaaataacaactgctgccggtgcttctgcgtggaatgcgtggacctgctggtgggccccggcgccgcccaggccgctattaaggaagatccttggaactgctacatgtgcggccacaagggcacatacggcctgctgagacggagagaggactggcctagcagactgcagatgttcttcgccaataaccacgaccaggagttcgacccccctaaggtgtaccctcccgtccccgccgagaagagaaagcccatccgggtcctgagcctgttcgatggcatcgccaccggtctgctggtgctgaaggacctgggcatccaggtggataggtacattgcctccgaggtgtgcgaggactccatcaccgtgggaatggtgcgtcatcagggcaagatcatgtacgtgggcgacgtgcggagcgtgacacagaagcatatccaggagtggggccctttcgacctggtgatcggcggcagcccttgcaatgacctgagcatcgtgaacccagcccggaagggcctgtacgagggaaccggcagactgttcttcgagttttacagactgctgcacgacgcccggcctaaggaaggcgacgaccggcccttcttttggctgttcgagaatgtggtggccatgggagtcagcgacaagcgggatattagccggttcctggagagcaaccccgtgatgatcgatgccaaggaagtgagcgccgcccaccgggccagatacttctggggcaatctgcctggcatgaacagacccctggccagcaccgtgaacgacaagctggagctgcaggagtgcctggagcacggccggatcgccaagttcagcaaggtgagaaccatcaccacccgaagcaacagcatcaaacaaggcaaggaccagcactttcctgtgttcatgaacgagaaggaggacatcctgtggtgtaccgagatggagagagtgttcgggttcccagtccactacacagatgtcagcaacatgtctagactggccagacagagactgctgggaagaagctggtccgtccctgtgatcagacacctgttcgcccctctgaaggagtacttcgcctgcgtgagcagcggcaacagcaacgccaacagccggggccccagcttctctagcggcctggtgccactgtccctgagagggagccacatgggccccatggagatctacaaaaccgtgagcgcctggaagcggcagcctgtgcgcgtgctgagcctgtttcggaatatcgataaagtcctgaaaagcctgggattcctggagagcggctctggctccggcggtggcaccctgaagtacgtggaggatgtgacaaacgtggtcagacgggatgtggagaagtggggccccttcgatctggtgtacggcagcacccaacccctgggcagctcttgtgaccggtgccctggctggtacatgtttcagttccaccggatcctgcagtacgccctgccgagacaggagtcccagcggccattcttttggattttcatggacaacttgctgctgaccgaggatgaccaggaaactaccactcggttcctgcagaccgaagccgtgaccctgcaggacgtgagaggccgggactaccagaacgccatgcgggtgtggtccaacatccctggactgaaaagcaagcacgcacctctgacccctaaagaagaggagtacctgcaggcccaggtgcggagcagaagcaagctggacgcccctaaggtggatctgctggtgaagaattgcctcctgcccctgagagagtacttcaagtatttcagccagaatagtctgcccctgggaggcagcggcggcggcgccctggtgacatttgaggacgtcgccgtgcggttcacccaggaggaatgggctctgctggatccttctcagaaaatcctgtaccgggacgtgatgagagagacataccggaatctgacctccgtgggcatcaactgggaatgttgggaccttgaagcctgcttcagaagcctgggaagaaacctgagagtgcaggtggtgaagagaaagtgcgagctgaccaacagcggcccctgcgccgagggcggcccaagcagcggcgcccctcctcccagcggcggcagcccagccggctccccaacctctaccgaggagggcacctctgagtccgccacccccgagagcggccctggcacctccaccgagcccagcgagggcagcgcacccggcagccctgccggcagccccacctccacagaggagggaaccagcaccgagcccagcgaaggcagcgccccaggcaccagcaccgagcctagtgagcaggagattaaacggatcaacaagatcagaagaagacttgtgaaagacagcaacaccaagaaggccggcaagacaggccccatgaaaaccctgctggttagagtgatgacacccgatctgagagagcggctggaaaacctgagaaagaagcctgaaaatatcccccagcccatcagcaatacatctagagccaacctgaataagctgctgaccgattacaccgaaatgaagaaggcgatcctgcatgtgtactgggaagagttccagaaggaccctgtgggcctgatgagccgggtggcccagcctgccagcaagaagatcgatcagaacaagctgaaacctgagatggacgagaagggcaacctgaccaccgccggctttgcctgctctcagtgtggccagcccctgttcgtgtacaagctggagcaggtgtctgagaagggcaaggcttacaccaactacttcggacggtgcaatgtggccgagcacgaaaagctgatcctgctggcccagctgaagcccgagaaggatagcgacgaagccgtgacatatagcctgggaaagtttgggcagagggccctggatttctacagcattcatgtgaccaaggagtccacccaccccgtgaagcccctggcccagatcgccggaaacagatacgcctccggacctgtgggaaaggccctgagcgacgcatgtatgggcacaatcgcctccttcctgtctaagtaccaggacatcatcatcgaacaccagaaggtggtgaagggcaaccagaagagactggagagcctgcgggagctggccggcaaggaaaacctggaataccctagcgtgaccctgccacctcagcctcacaccaaggagggcgttgatgcctacaacgaagtgatcgcccgggtgcgaatgtgggtgaacctgaacctgtggcagaagctgaagctaagcagagatgatgccaagcctctgctgagactgaagggattcccttcctttcctctggtcgagagacaggccaacgaagtggactggtgggacatggtgtgtaacgtgaagaagctgatcaacgagaaaaaggaggatggcaaggtgttttggcagaatctggctggctacaagagacaggaagccctgagaccatacctgagcagcgaggaagatcggaagaagggaaagaaattcgctcggtaccagctgggcgacctgctgctgcacctggaaaagaagcacggcgaggactggggaaaggtgtacgacgaggcctgggagcggattgacaagaaagtggaaggcctgagcaagcacatcaagctggaagaggaacggagaagcgaggacgcccagagcaaggccgccctgaccgactggctgcgggctaaggccagcttcgtgatcgagggcctgaaggaggccgacaaggacgagttctgcagatgcgagctgaagctgcagaagtggtacggggacctgcggggaaagcccttcgccatcgaagccgagaacagcatcctggacatcagcggcttcagcaagcagtacaactgtgccttcatctggcagaaggacggcgtgaagaagctgaacctgtacctgatcatcaactacttcaagggcggcaagctgcggttcaagaagatcaaacctgaagccttcgaagccaacagattctacaccgtgatcaacaaaaagagcggcgagatcgtgcccatggaggtgaacttcaacttcgacgaccccaacctgatcatcctgcctctggcctttggcaagagacagggcagagaattcatctggaacgacctgctgtccctggaaaccggcagcctgaagctggccaacggaagagtgatcgagaagacactgtacaacagaagaacccggcaggatgagcctgccctgttcgtggccctgaccttcgagcggcgggaggtcctggactcctccaatatcaaaccaatgaacctgatcggcgtggcaagaggcgaaaacatccccgccgtgatcgccctgaccgaccccgagggctgcccactgagccggtttaaggatagcctgggaaacccaacccacatcctgagaatcggcgagagctataaggagaagcagcggaccatccaggccaagaaggaggtggagcagcggagagccggcggctacagccggaagtacgccagcaaagccaagaatctggcagacgatatggtgagaaacaccgctagagatctgctgtactacgccgtgacccaggatgccatgctgatcttcgccaacctgagccggggcttcggccggcagggcaagcggaccttcatggccgagagacagtacacacggatggaggactggctgaccgccaagctggcctacgagggcctgagcaagacctacctgtccaagacactggcccagtacacctccaagacatgcagcaactgtgggtttaccatcaccagcgccgactacgacagggtgctggagaagctgaagaagacagcaacaggctggatgaccacaattaacggcaaggagctgaaggtggagggccagattacctactacaacagatacaagagacagaacgtagtcaaggacctgtccgtcgagctggatagactgagcgaagaatctgtgaacaacgacatctcctcctggacaaagggcagaagcggagaagctctgagcctcctgaagaaaagattctcccatagacccgtgcaggagaagttcgtgtgcctgaactgcggcttcgagacacacgcagccgagcaagccgccctgaacatcgccagatcctggctgttcctgcggagccaggagtacaagaaataccagacaaacaagacaaccggcaacaccgataagagagccttcgtcgagacctggcagtccttttaccggaagaagcttaaggaggtgtggaaacctgccgtgcggtctggcggatctggcggaggctccgaggagctgcccgtggtgttcgaggacgtggccgtgtacttcaccagggaggagtggggcatgctggtgaagaggcagaaggagctgtacagggacgtgatgaggatgaactacgagctgctggccagcctgggccccgccgccgccaagcccgacctgatcctgaagctggagaggagggccgccccctggatcaaggaccccaacggccccaagtggggcaagggcaggccccccggcaagggcggcccaagcagcggcgcccctcctcccagcggcggcagcccagccggctccccaacctctaccgaggagggcacctctgagtccgccacccccgagagcggccctggcacctccaccgagcccagcgagggcagcgcacccggcagccctgccggcagccccacctccacagaggagggaaccagcaccgagcccagcgaaggcagcgccccaggcaccagcaccgagcctagtgagcaggagattaaacggatcaacaagatcagaagaagacttgtgaaagacagcaacaccaagaaggccggcaagacaggccccatgaaaaccctgctggttagagtgatgacacccgatctgagagagcggctggaaaacctgagaaagaagcctgaaaatatcccccagcccatcagcaatacatctagagccaacctgaataagctgctgaccgattacaccgaaatgaagaaggcgatcctgcatgtgtactgggaagagttccagaaggaccctgtgggcctgatgagccgggtggcccagcctgccagcaagaagatcgatcagaacaagctgaaacctgagatggacgagaagggcaacctgaccaccgccggctttgcctgctctcagtgtggccagcccctgttcgtgtacaagctggagcaggtgtctgagaagggcaaggcttacaccaactacttcggacggtgcaatgtggccgagcacgaaaagctgatcctgctggcccagctgaagcccgagaaggatagcgacgaagccgtgacatatagcctgggaaagtttgggcagagggccctggatttctacagcattcatgtgaccaaggagtccacccaccccgtgaagcccctggcccagatcgccggaaacagatacgcctccggacctgtgggaaaggccctgagcgacgcatgtatgggcacaatcgcctccttcctgtctaagtaccaggacatcatcatcgaacaccagaaggtggtgaagggcaaccagaagagactggagagcctgcgggagctggccggcaaggaaaacctggaataccctagcgtgaccctgccacctcagcctcacaccaaggagggcgttgatgcctacaacgaagtgatcgcccgggtgcgaatgtgggtgaacctgaacctgtggcagaagctgaagctaagcagagatgatgccaagcctctgctgagactgaagggattcccttcctttcctctggtcgagagacaggccaacgaagtggactggtgggacatggtgtgtaacgtgaagaagctgatcaacgagaaaaaggaggatggcaaggtgttttggcagaatctggctggctacaagagacaggaagccctgagaccatacctgagcagcgaggaagatcggaagaagggaaagaaattcgctcggtaccagctgggcgacctgctgctgcacctggaaaagaagcacggcgaggactggggaaaggtgtacgacgaggcctgggagcggattgacaagaaagtggaaggcctgagcaagcacatcaagctggaagaggaacggagaagcgaggacgcccagagcaaggccgccctgaccgactggctgcgggctaaggccagcttcgtgatcgagggcctgaaggaggccgacaaggacgagttctgcagatgcgagctgaagctgcagaagtggtacggggacctgcggggaaagcccttcgccatcgaagccgagaacagcatcctggacatcagcggcttcagcaagcagtacaactgtgccttcatctggcagaaggacggcgtgaagaagctgaacctgtacctgatcatcaactacttcaagggcggcaagctgcggttcaagaagatcaaacctgaagccttcgaagccaacagattctacaccgtgatcaacaaaaagagcggcgagatcgtgcccatggaggtgaacttcaacttcgacgaccccaacctgatcatcctgcctctggcctttggcaagagacagggcagagaattcatctggaacgacctgctgtccctggaaaccggcagcctgaagctggccaacggaagagtgatcgagaagacactgtacaacagaagaacccggcaggatgagcctgccctgttcgtggccctgaccttcgagcggcgggaggtcctggactcctccaatatcaaaccaatgaacctgatcggcgtggcaagaggcgaaaacatccccgccgtgatcgccctgaccgaccccgagggctgcccactgagccggtttaaggatagcctgggaaacccaacccacatcctgagaatcggcgagagctataaggagaagcagcggaccatccaggccaagaaggaggtggagcagcggagagccggcggctacagccggaagtacgccagcaaagccaagaatctggcagacgatatggtgagaaacaccgctagagatctgctgtactacgccgtgacccaggatgccatgctgatcttcgccaacctgagccggggcttcggccggcagggcaagcggaccttcatggccgagagacagtacacacggatggaggactggctgaccgccaagctggcctacgagggcctgagcaagacctacctgtccaagacactggcccagtacacctccaagacatgcagcaactgtgggtttaccatcaccagcgccgactacgacagggtgctggagaagctgaagaagacagcaacaggctggatgaccacaattaacggcaaggagctgaaggtggagggccagattacctactacaacagatacaagagacagaacgtagtcaaggacctgtccgtcgagctggatagactgagcgaagaatctgtgaacaacgacatctcctcctggacaaagggcagaagcggagaagctctgagcctcctgaagaaaagattctcccatagacccgtgcaggagaagttcgtgtgcctgaactgcggcttcgagacacacgcagccgagcaagccgccctgaacatcgccagatcctggctgttcctgcggagccaggagtacaagaaataccagacaaacaagacaaccggcaacaccgataagagagccttcgtcgagacctggcagtccttttaccggaagaagcttaaggaggtgtggaaacctgccgtgcggtctggcggatctggcggaggctcctgaggagctgcccgtggtgttcgaggacgtggccgtgtacttcaccagggaggagtggggcatgctggtgaagaggcagaaggagctgtacagggacgtgatgaggatgaactacgagctgctggccagcctgggccccgccgccgccaagcccgacctgatcctgaagctggagaggagggccgccccctggatcaaggaccccaacggccccaagtggggcaagggcaggccccccggcaagggatctggctccggcagcggccccaagaaaaagagaaaagtctaagctgccttctgcggggcttgccttctggccatgcccttcttctctcccttgcacctgtacctcttggtctttgaataaagcctgagtaggaaggctagcaaaaaaaaaaaaaaaaaaaaaaaaaaaaaaaaaaaaaaaaaaaaaaaaaaaaaaaaaaaaaaaaaaaaaaaaaaaaaaaa

SEQ ID NO: 15744 - RNA, 9485 nt, synthetic construct
  source 1..9485: mol_type = other RNA
aggaaataagagagaaaagaagagtaagaagaaatataagagccaccatggcccctaagaagaagcgtaaagtgagccggatggaacgcctcgtctacgaggtgcggcagaagtgcagaaacatcgaggacatctgcatctcctgcggatctctgaacgtgaccctggagcacccactgttcatcggcggcatgtgccagaactgtaaaaactgttttctggagtgtgcctatcaatacgacgatgacggctaccagagctactgcaccatctgttgcggcggaagagaggtgctgatgtgtggaaataacaactgctgccggtgcttctgcgtggaatgcgtggacctgctggtgggccccggcgccgcccaggccgctattaaggaagatccttggaactgctacatgtgcggccacaagggcacatacggcctgctgagacggagagaggactggcctagcagactgcagatgttcttcgccaataaccacgaccaggagttcgacccccctaaggtgtaccctcccgtccccgccgagaagagaaagcccatccgggtcctgagcctgttcgatggcatcgccaccggtctgctggtgctgaaggacctgggcatccaggtggataggtacattgcctccgaggtgtgcgaggactccatcaccgtgggaatggtgcgtcatcagggcaagatcatgtacgtgggcgacgtgcggagcgtgacacagaagcatatccaggagtggggccctttcgacctggtgatcggcggcagcccttgcaatgacctgagcatcgtgaacccagcccggaagggcctgtacgagggaaccggcagactgttcttcgagttttacagactgctgcacgacgcccggcctaaggaaggcgacgaccggcccttcttttggctgttcgagaatgtggtggccatgggagtcagcgacaagcgggatattagccggttcctggagagcaaccccgtgatgatcgatgccaaggaagtgagcgccgcccaccgggccagatacttctggggcaatctgcctggcatgaacagacccctggccagcaccgtgaacgacaagctggagctgcaggagtgcctggagcacggccggatcgccaagttcagcaaggtgagaaccatcaccacccgaagcaacagcatcaaacaaggcaaggaccagcactttcctgtgttcatgaacgagaaggaggacatcctgtggtgtaccgagatggagagagtgttcgggttcccagtccactacacagatgtcagcaacatgtctagactggccagacagagactgctgggaagaagctggtccgtccctgtgatcagacacctgttcgcccctctgaaggagtacttcgcctgcgtgagcagcggcaacagcaacgccaacagccggggccccagcttctctagcggcctggtgccactgtccctgagagggagccacatgggccccatggagatctacaaaaccgtgagcgcctggaagcggcagcctgtgcgcgtgctgagcctgtttcggaatatcgataaagtcctgaaaagcctgggattcctggagagcggctctggctccggcggtggcaccctgaagtacgtggaggatgtgacaaacgtggtcagacgggatgtggagaagtggggccccttcgatctggtgtacggcagcacccaacccctgggcagctcttgtgaccggtgccctggctggtacatgtttcagttccaccggatcctgcagtacgccctgccgagacaggagtcccagcggccattcttttggattttcatggacaacttgctgctgaccgaggatgaccaggaaactaccactcggttcctgcagaccgaagccgtgaccctgcaggacgtgagaggccgggactaccagaacgccatgcgggtgtggtccaacatccctggactgaaaagcaagcacgcacctctgacccctaaagaagaggagtacctgcaggcccaggtgcggagcagaagcaagctggacgcccctaaggtggatctgctggtgaagaattgcctcctgcccctgagagagtacttcaagtatttcagccagaatagtctgcccctgggaggcagcggcggcggcgccctggtgacatttgaggacgtcgccgtgcggttcacccaggaggaatgggctctgctggatccttctcagaaaatcctgtaccgggacgtgatgagagagacataccggaatctgacctccgtgggcatcaactgggaatgttgggaccttgaagcctgcttcagaagcctgggaagaaacctgagagtgcaggtggtgaagagaaagtgcgagctgaccaacagcggcccctgcgccgagggcggcccaagcagcggcgcccctcctcccagcggcggcagcccagccggctccccaacctctaccgaggagggcacctctgagtccgccacccccgagagcggccctggcacctccaccgagcccagcgagggcagcgcacccggcagccctgccggcagccccacctccacagaggagggaaccagcaccgagcccagcgaaggcagcgccccaggcaccagcaccgagcctagtgagcaggagattaaacggatcaacaagatcagaagaagacttgtgaaagacagcaacaccaagaaggccggcaagacaggccccatgaaaaccctgctggttagagtgatgacacccgatctgagagagcggctggaaaacctgagaaagaagcctgaaaatatcccccagcccatcagcaatacatctagagccaacctgaataagctgctgaccgattacaccgaaatgaagaaggcgatcctgcatgtgtactgggaagagttccagaaggaccctgtgggcctgatgagccgggtggcccagcctgccagcaagaagatcgatcagaacaagctgaaacctgagatggacgagaagggcaacctgaccaccgccggctttgcctgctctcagtgtggccagcccctgttcgtgtacaagctggagcaggtgtctgagaagggcaaggcttacaccaactacttcggacggtgcaatgtggccgagcacgaaaagctgatcctgctggcccagctgaagcccgagaaggatagcgacgaagccgtgacatatagcctgggaaagtttgggcagagggccctggatttctacagcattcatgtgaccaaggagtccacccaccccgtgaagcccctggcccagatcgccggaaacagatacgcctccggacctgtgggaaaggccctgagcgacgcatgtatgggcacaatcgcctccttcctgtctaagtaccaggacatcatcatcgaacaccagaaggtggtgaagggcaaccagaagagactggagagcctgcgggagctggccggcaaggaaaacctggaataccctagcgtgaccctgccacctcagcctcacaccaaggagggcgttgatgcctacaacgaagtgatcgcccgggtgcgaatgtgggtgaacctgaacctgtggcagaagctgaagctaagcagagatgatgccaagcctctgctgagactgaagggattcccttcctttcctctggtcgagagacaggccaacgaagtggactggtgggacatggtgtgtaacgtgaagaagctgatcaacgagaaaaaggaggatggcaaggtgttttggcagaatctggctggctacaagagacaggaagccctgagaccatacctgagcagcgaggaagatcggaagaagggaaagaaattcgctcggtaccagctgggcgacctgctgctgcacctggaaaagaagcacggcgaggactggggaaaggtgtacgacgaggcctgggagcggattgacaagaaagtggaaggcctgagcaagcacatcaagctggaagaggaacggagaagcgaggacgcccagagcaaggccgccctgaccgactggctgcgggctaaggccagcttcgtgatcgagggcctgaaggaggccgacaaggacgagttctgcagatgcgagctgaagctgcagaagtggtacggggacctgcggggaaagcccttcgccatcgaagccgagaacagcatcctggacatcagcggcttcagcaagcagtacaactgtgccttcatctggcagaaggacggcgtgaagaagctgaacctgtacctgatcatcaactacttcaagggcggcaagctgcggttcaagaagatcaaacctgaagccttcgaagccaacagattctacaccgtgatcaacaaaaagagcggcgagatcgtgcccatggaggtgaacttcaacttcgacgaccccaacctgatcatcctgcctctggcctttggcaagagacagggcagagaattcatctggaacgacctgctgtccctggaaaccggcagcctgaagctggccaacggaagagtgatcgagaagacactgtacaacagaagaacccggcaggatgagcctgccctgttcgtggccctgaccttcgagcggcgggaggtcctggactcctccaatatcaaaccaatgaacctgatcggcgtggcaagaggcgaaaacatccccgccgtgatcgccctgaccgaccccgagggctgcccactgagccggtttaaggatagcctgggaaacccaacccacatcctgagaatcggcgagagctataaggagaagcagcggaccatccaggccaagaaggaggtggagcagcggagagccggcggctacagccggaagtacgccagcaaagccaagaatctggcagacgatatggtgagaaacaccgctagagatctgctgtactacgccgtgacccaggatgccatgctgatcttcgccaacctgagccggggcttcggccggcagggcaagcggaccttcatggccgagagacagtacacacggatggaggactggctgaccgccaagctggcctacgagggcctgagcaagacctacctgtccaagacactggcccagtacacctccaagacatgcagcaactgtgggtttaccatcaccagcgccgactacgacagggtgctggagaagctgaagaagacagcaacaggctggatgaccacaattaacggcaaggagctgaaggtggagggccagattacctactacaacagatacaagagacagaacgtagtcaaggacctgtccgtcgagctggatagactgagcgaagaatctgtgaacaacgacatctcctcctggacaaagggcagaagcggagaagctctgagcctcctgaagaaaagattctcccatagacccgtgcaggagaagttcgtgtgcctgaactgcggcttcgagacacacgcagccgagcaagccgccctgaacatcgccagatcctggctgttcctgcggagccaggagtacaagaaataccagacaaacaagacaaccggcaacaccgataagagagccttcgtcgagacctggcagtccttttaccggaagaagcttaaggaggtgtggaaacctgccgtgcggtctggcggatctggcggaggctccatggccgccgtgagccccaccaccaggtgccaggagagcgtgaccttcgaggacgtggccgtggtgttcaccgacgaggagtggagccacctggtgcccacccagagggacctgtacaaggaggtgatgctggagaactacaacagcatcgtgagcctgggcctgcccgtgccccagcccgacgtgatcttccagctgaagaggggcgacaagccctggatggtggacctgcacggcagcgagggcggcccaagcagcggcgcccctcctcccagcggcggcagcccagccggctccccaacctctaccgaggagggcacctctgagtccgccacccccgagagcggccctggcacctccaccgagcccagcgagggcagcgcacccggcagccctgccggcagccccacctccacagaggagggaaccagcaccgagcccagcgaaggcagcgccccaggcaccagcaccgagcctagtgagcaggagattaaacggatcaacaagatcagaagaagacttgtgaaagacagcaacaccaagaaggccggcaagacaggccccatgaaaaccctgctggttagagtgatgacacccgatctgagagagcggctggaaaacctgagaaagaagcctgaaaatatcccccagcccatcagcaatacatctagagccaacctgaataagctgctgaccgattacaccgaaatgaagaaggcgatcctgcatgtgtactgggaagagttccagaaggaccctgtgggcctgatgagccgggtggcccagcctgccagcaagaagatcgatcagaacaagctgaaacctgagatggacgagaagggcaacctgaccaccgccggctttgcctgctctcagtgtggccagcccctgttcgtgtacaagctggagcaggtgtctgagaagggcaaggcttacaccaactacttcggacggtgcaatgtggccgagcacgaaaagctgatcctgctggcccagctgaagcccgagaaggatagcgacgaagccgtgacatatagcctgggaaagtttgggcagagggccctggatttctacagcattcatgtgaccaaggagtccacccaccccgtgaagcccctggcccagatcgccggaaacagatacgcctccggacctgtgggaaaggccctgagcgacgcatgtatgggcacaatcgcctccttcctgtctaagtaccaggacatcatcatcgaacaccagaaggtggtgaagggcaaccagaagagactggagagcctgcgggagctggccggcaaggaaaacctggaataccctagcgtgaccctgccacctcagcctcacaccaaggagggcgttgatgcctacaacgaagtgatcgcccgggtgcgaatgtgggtgaacctgaacctgtggcagaagctgaagctaagcagagatgatgccaagcctctgctgagactgaagggattcccttcctttcctctggtcgagagacaggccaacgaagtggactggtgggacatggtgtgtaacgtgaagaagctgatcaacgagaaaaaggaggatggcaaggtgttttggcagaatctggctggctacaagagacaggaagccctgagaccatacctgagcagcgaggaagatcggaagaagggaaagaaattcgctcggtaccagctgggcgacctgctgctgcacctggaaaagaagcacggcgaggactggggaaaggtgtacgacgaggcctgggagcggattgacaagaaagtggaaggcctgagcaagcacatcaagctggaagaggaacggagaagcgaggacgcccagagcaaggccgccctgaccgactggctgcgggctaaggccagcttcgtgatcgagggcctgaaggaggccgacaaggacgagttctgcagatgcgagctgaagctgcagaagtggtacggggacctgcggggaaagcccttcgccatcgaagccgagaacagcatcctggacatcagcggcttcagcaagcagtacaactgtgccttcatctggcagaaggacggcgtgaagaagctgaacctgtacctgatcatcaactacttcaagggcggcaagctgcggttcaagaagatcaaacctgaagccttcgaagccaacagattctacaccgtgatcaacaaaaagagcggcgagatcgtgcccatggaggtgaacttcaacttcgacgaccccaacctgatcatcctgcctctggcctttggcaagagacagggcagagaattcatctggaacgacctgctgtccctggaaaccggcagcctgaagctggccaacggaagagtgatcgagaagacactgtacaacagaagaacccggcaggatgagcctgccctgttcgtggccctgaccttcgagcggcgggaggtcctggactcctccaatatcaaaccaatgaacctgatcggcgtggcaagaggcgaaaacatccccgccgtgatcgccctgaccgaccccgagggctgcccactgagccggtttaaggatagcctgggaaacccaacccacatcctgagaatcggcgagagctataaggagaagcagcggaccatccaggccaagaaggaggtggagcagcggagagccggcggctacagccggaagtacgccagcaaagccaagaatctggcagacgatatggtgagaaacaccgctagagatctgctgtactacgccgtgacccaggatgccatgctgatcttcgccaacctgagccggggcttcggccggcagggcaagcggaccttcatggccgagagacagtacacacggatggaggactggctgaccgccaagctggcctacgagggcctgagcaagacctacctgtccaagacactggcccagtacacctccaagacatgcagcaactgtgggtttaccatcaccagcgccgactacgacagggtgctggagaagctgaagaagacagcaacaggctggatgaccacaattaacggcaaggagctgaaggtggagggccagattacctactacaacagatacaagagacagaacgtagtcaaggacctgtccgtcgagctggatagactgagcgaagaatctgtgaacaacgacatctcctcctggacaaagggcagaagcggagaagctctgagcctcctgaagaaaagattctcccatagacccgtgcaggagaagttcgtgtgcctgaactgcggcttcgagacacacgcagccgagcaagccgccctgaacatcgccagatcctggctgttcctgcggagccaggagtacaagaaataccagacaaacaagacaaccggcaacaccgataagagagccttcgtcgagacctggcagtccttttaccggaagaagcttaaggaggtgtggaaacctgccgtgcggtctggcggatctggcggaggctcctatggccgccgtgagccccaccaccaggtgccaggagagcgtgaccttcgaggacgtggccgtggtgttcaccgacgaggagtggagccacctggtgcccacccagagggacctgtacaaggaggtgatgctggagaactacaacagcatcgtgagcctgggcctgcccgtgccccagcccgacgtgatcttccagctgaagaggggcgacaagccctggatggtggacctgcacggcagcgagggatctggctccggcagcggccccaagaaaaagagaaaagtctaagctgccttctgcggggcttgccttctggccatgcccttcttctctcccttgcacctgtacctcttggtctttgaataaagcctgagtaggaaggctagcaaaaaaaaaaaaaaaaaaaaaaaaaaaaaaaaaaaaaaaaaaaaaaaaaaaaaaaaaaaaaaaaaaaaaaaaaaaaaaaa

SEQ ID NO: 15745 - RNA, 9485 nt, synthetic construct
  source 1..9485: mol_type = other RNA
aggaaataagagagaaaagaagagtaagaagaaatataagagccaccatggcccctaagaagaagcgtaaagtgagccggatggaacgcctcgtctacgaggtgcggcagaagtgcagaaacatcgaggacatctgcatctcctgcggatctctgaacgtgaccctggagcacccactgttcatcggcggcatgtgccagaactgtaaaaactgttttctggagtgtgcctatcaatacgacgatgacggctaccagagctactgcaccatctgttgcggcggaagagaggtgctgatgtgtggaaataacaactgctgccggtgcttctgcgtggaatgcgtggacctgctggtgggccccggcgccgcccaggccgctattaaggaagatccttggaactgctacatgtgcggccacaagggcacatacggcctgctgagacggagagaggactggcctagcagactgcagatgttcttcgccaataaccacgaccaggagttcgacccccctaaggtgtaccctcccgtccccgccgagaagagaaagcccatccgggtcctgagcctgttcgatggcatcgccaccggtctgctggtgctgaaggacctgggcatccaggtggataggtacattgcctccgaggtgtgcgaggactccatcaccgtgggaatggtgcgtcatcagggcaagatcatgtacgtgggcgacgtgcggagcgtgacacagaagcatatccaggagtggggccctttcgacctggtgatcggcggcagcccttgcaatgacctgagcatcgtgaacccagcccggaagggcctgtacgagggaaccggcagactgttcttcgagttttacagactgctgcacgacgcccggcctaaggaaggcgacgaccggcccttcttttggctgttcgagaatgtggtggccatgggagtcagcgacaagcgggatattagccggttcctggagagcaaccccgtgatgatcgatgccaaggaagtgagcgccgcccaccgggccagatacttctggggcaatctgcctggcatgaacagacccctggccagcaccgtgaacgacaagctggagctgcaggagtgcctggagcacggccggatcgccaagttcagcaaggtgagaaccatcaccacccgaagcaacagcatcaaacaaggcaaggaccagcactttcctgtgttcatgaacgagaaggaggacatcctgtggtgtaccgagatggagagagtgttcgggttcccagtccactacacagatgtcagcaacatgtctagactggccagacagagactgctgggaagaagctggtccgtccctgtgatcagacacctgttcgcccctctgaaggagtacttcgcctgcgtgagcagcggcaacagcaacgccaacagccggggccccagcttctctagcggcctggtgccactgtccctgagagggagccacatgggccccatggagatctacaaaaccgtgagcgcctggaagcggcagcctgtgcgcgtgctgagcctgtttcggaatatcgataaagtcctgaaaagcctgggattcctggagagcggctctggctccggcggtggcaccctgaagtacgtggaggatgtgacaaacgtggtcagacgggatgtggagaagtggggccccttcgatctggtgtacggcagcacccaacccctgggcagctcttgtgaccggtgccctggctggtacatgtttcagttccaccggatcctgcagtacgccctgccgagacaggagtcccagcggccattcttttggattttcatggacaacttgctgctgaccgaggatgaccaggaaactaccactcggttcctgcagaccgaagccgtgaccctgcaggacgtgagaggccgggactaccagaacgccatgcgggtgtggtccaacatccctggactgaaaagcaagcacgcacctctgacccctaaagaagaggagtacctgcaggcccaggtgcggagcagaagcaagctggacgcccctaaggtggatctgctggtgaagaattgcctcctgcccctgagagagtacttcaagtatttcagccagaatagtctgcccctgggaggcagcggcggcggcgccctggtgacatttgaggacgtcgccgtgcggttcacccaggaggaatgggctctgctggatccttctcagaaaatcctgtaccgggacgtgatgagagagacataccggaatctgacctccgtgggcatcaactgggaatgttgggaccttgaagcctgcttcagaagcctgggaagaaacctgagagtgcaggtggtgaagagaaagtgcgagctgaccaacagcggcccctgcgccgagggcggcccaagcagcggcgcccctcctcccagcggcggcagcccagccggctccccaacctctaccgaggagggcacctctgagtccgccacccccgagagcggccctggcacctccaccgagcccagcgagggcagcgcacccggcagccctgccggcagccccacctccacagaggagggaaccagcaccgagcccagcgaaggcagcgccccaggcaccagcaccgagcctagtgagcaggagattaaacggatcaacaagatcagaagaagacttgtgaaagacagcaacaccaagaaggccggcaagacaggccccatgaaaaccctgctggttagagtgatgacacccgatctgagagagcggctggaaaacctgagaaagaagcctgaaaatatcccccagcccatcagcaatacatctagagccaacctgaataagctgctgaccgattacaccgaaatgaagaaggcgatcctgcatgtgtactgggaagagttccagaaggaccctgtgggcctgatgagccgggtggcccagcctgccagcaagaagatcgatcagaacaagctgaaacctgagatggacgagaagggcaacctgaccaccgccggctttgcctgctctcagtgtggccagcccctgttcgtgtacaagctggagcaggtgtctgagaagggcaaggcttacaccaactacttcggacggtgcaatgtggccgagcacgaaaagctgatcctgctggcccagctgaagcccgagaaggatagcgacgaagccgtgacatatagcctgggaaagtttgggcagagggccctggatttctacagcattcatgtgaccaaggagtccacccaccccgtgaagcccctggcccagatcgccggaaacagatacgcctccggacctgtgggaaaggccctgagcgacgcatgtatgggcacaatcgcctccttcctgtctaagtaccaggacatcatcatcgaacaccagaaggtggtgaagggcaaccagaagagactggagagcctgcgggagctggccggcaaggaaaacctggaataccctagcgtgaccctgccacctcagcctcacaccaaggagggcgttgatgcctacaacgaagtgatcgcccgggtgcgaatgtgggtgaacctgaacctgtggcagaagctgaagctaagcagagatgatgccaagcctctgctgagactgaagggattcccttcctttcctctggtcgagagacaggccaacgaagtggactggtgggacatggtgtgtaacgtgaagaagctgatcaacgagaaaaaggaggatggcaaggtgttttggcagaatctggctggctacaagagacaggaagccctgagaccatacctgagcagcgaggaagatcggaagaagggaaagaaattcgctcggtaccagctgggcgacctgctgctgcacctggaaaagaagcacggcgaggactggggaaaggtgtacgacgaggcctgggagcggattgacaagaaagtggaaggcctgagcaagcacatcaagctggaagaggaacggagaagcgaggacgcccagagcaaggccgccctgaccgactggctgcgggctaaggccagcttcgtgatcgagggcctgaaggaggccgacaaggacgagttctgcagatgcgagctgaagctgcagaagtggtacggggacctgcggggaaagcccttcgccatcgaagccgagaacagcatcctggacatcagcggcttcagcaagcagtacaactgtgccttcatctggcagaaggacggcgtgaagaagctgaacctgtacctgatcatcaactacttcaagggcggcaagctgcggttcaagaagatcaaacctgaagccttcgaagccaacagattctacaccgtgatcaacaaaaagagcggcgagatcgtgcccatggaggtgaacttcaacttcgacgaccccaacctgatcatcctgcctctggcctttggcaagagacagggcagagaattcatctggaacgacctgctgtccctggaaaccggcagcctgaagctggccaacggaagagtgatcgagaagacactgtacaacagaagaacccggcaggatgagcctgccctgttcgtggccctgaccttcgagcggcgggaggtcctggactcctccaatatcaaaccaatgaacctgatcggcgtggcaagaggcgaaaacatccccgccgtgatcgccctgaccgaccccgagggctgcccactgagccggtttaaggatagcctgggaaacccaacccacatcctgagaatcggcgagagctataaggagaagcagcggaccatccaggccaagaaggaggtggagcagcggagagccggcggctacagccggaagtacgccagcaaagccaagaatctggcagacgatatggtgagaaacaccgctagagatctgctgtactacgccgtgacccaggatgccatgctgatcttcgccaacctgagccggggcttcggccggcagggcaagcggaccttcatggccgagagacagtacacacggatggaggactggctgaccgccaagctggcctacgagggcctgagcaagacctacctgtccaagacactggcccagtacacctccaagacatgcagcaactgtgggtttaccatcaccagcgccgactacgacagggtgctggagaagctgaagaagacagcaacaggctggatgaccacaattaacggcaaggagctgaaggtggagggccagattacctactacaacagatacaagagacagaacgtagtcaaggacctgtccgtcgagctggatagactgagcgaagaatctgtgaacaacgacatctcctcctggacaaagggcagaagcggagaagctctgagcctcctgaagaaaagattctcccatagacccgtgcaggagaagttcgtgtgcctgaactgcggcttcgagacacacgcagccgagcaagccgccctgaacatcgccagatcctggctgttcctgcggagccaggagtacaagaaataccagacaaacaagacaaccggcaacaccgataagagagccttcgtcgagacctggcagtccttttaccggaagaagcttaaggaggtgtggaaacctgccgtgcggtctggcggatctggcggaggctccgcccaggtgagcgtgaccttcgacgacgtggccgtgaccttcacccaggaggagtggggccacctggagcccgcccagaggaccctgtaccaggaggtgatgctggagacctgcaggctgctgatgagcctgggctgccccgtgcccaggcccgagctgatctaccagctggagcacggccaggagctgtggaccgtgaagagggacctgagcaggagcacctgccccggctacagcagcgagggcggcccaagcagcggcgcccctcctcccagcggcggcagcccagccggctccccaacctctaccgaggagggcacctctgagtccgccacccccgagagcggccctggcacctccaccgagcccagcgagggcagcgcacccggcagccctgccggcagccccacctccacagaggagggaaccagcaccgagcccagcgaaggcagcgccccaggcaccagcaccgagcctagtgagcaggagattaaacggatcaacaagatcagaagaagacttgtgaaagacagcaacaccaagaaggccggcaagacaggccccatgaaaaccctgctggttagagtgatgacacccgatctgagagagcggctggaaaacctgagaaagaagcctgaaaatatcccccagcccatcagcaatacatctagagccaacctgaataagctgctgaccgattacaccgaaatgaagaaggcgatcctgcatgtgtactgggaagagttccagaaggaccctgtgggcctgatgagccgggtggcccagcctgccagcaagaagatcgatcagaacaagctgaaacctgagatggacgagaagggcaacctgaccaccgccggctttgcctgctctcagtgtggccagcccctgttcgtgtacaagctggagcaggtgtctgagaagggcaaggcttacaccaactacttcggacggtgcaatgtggccgagcacgaaaagctgatcctgctggcccagctgaagcccgagaaggatagcgacgaagccgtgacatatagcctgggaaagtttgggcagagggccctggatttctacagcattcatgtgaccaaggagtccacccaccccgtgaagcccctggcccagatcgccggaaacagatacgcctccggacctgtgggaaaggccctgagcgacgcatgtatgggcacaatcgcctccttcctgtctaagtaccaggacatcatcatcgaacaccagaaggtggtgaagggcaaccagaagagactggagagcctgcgggagctggccggcaaggaaaacctggaataccctagcgtgaccctgccacctcagcctcacaccaaggagggcgttgatgcctacaacgaagtgatcgcccgggtgcgaatgtgggtgaacctgaacctgtggcagaagctgaagctaagcagagatgatgccaagcctctgctgagactgaagggattcccttcctttcctctggtcgagagacaggccaacgaagtggactggtgggacatggtgtgtaacgtgaagaagctgatcaacgagaaaaaggaggatggcaaggtgttttggcagaatctggctggctacaagagacaggaagccctgagaccatacctgagcagcgaggaagatcggaagaagggaaagaaattcgctcggtaccagctgggcgacctgctgctgcacctggaaaagaagcacggcgaggactggggaaaggtgtacgacgaggcctgggagcggattgacaagaaagtggaaggcctgagcaagcacatcaagctggaagaggaacggagaagcgaggacgcccagagcaaggccgccctgaccgactggctgcgggctaaggccagcttcgtgatcgagggcctgaaggaggccgacaaggacgagttctgcagatgcgagctgaagctgcagaagtggtacggggacctgcggggaaagcccttcgccatcgaagccgagaacagcatcctggacatcagcggcttcagcaagcagtacaactgtgccttcatctggcagaaggacggcgtgaagaagctgaacctgtacctgatcatcaactacttcaagggcggcaagctgcggttcaagaagatcaaacctgaagccttcgaagccaacagattctacaccgtgatcaacaaaaagagcggcgagatcgtgcccatggaggtgaacttcaacttcgacgaccccaacctgatcatcctgcctctggcctttggcaagagacagggcagagaattcatctggaacgacctgctgtccctggaaaccggcagcctgaagctggccaacggaagagtgatcgagaagacactgtacaacagaagaacccggcaggatgagcctgccctgttcgtggccctgaccttcgagcggcgggaggtcctggactcctccaatatcaaaccaatgaacctgatcggcgtggcaagaggcgaaaacatccccgccgtgatcgccctgaccgaccccgagggctgcccactgagccggtttaaggatagcctgggaaacccaacccacatcctgagaatcggcgagagctataaggagaagcagcggaccatccaggccaagaaggaggtggagcagcggagagccggcggctacagccggaagtacgccagcaaagccaagaatctggcagacgatatggtgagaaacaccgctagagatctgctgtactacgccgtgacccaggatgccatgctgatcttcgccaacctgagccggggcttcggccggcagggcaagcggaccttcatggccgagagacagtacacacggatggaggactggctgaccgccaagctggcctacgagggcctgagcaagacctacctgtccaagacactggcccagtacacctccaagacatgcagcaactgtgggtttaccatcaccagcgccgactacgacagggtgctggagaagctgaagaagacagcaacaggctggatgaccacaattaacggcaaggagctgaaggtggagggccagattacctactacaacagatacaagagacagaacgtagtcaaggacctgtccgtcgagctggatagactgagcgaagaatctgtgaacaacgacatctcctcctggacaaagggcagaagcggagaagctctgagcctcctgaagaaaagattctcccatagacccgtgcaggagaagttcgtgtgcctgaactgcggcttcgagacacacgcagccgagcaagccgccctgaacatcgccagatcctggctgttcctgcggagccaggagtacaagaaataccagacaaacaagacaaccggcaacaccgataagagagccttcgtcgagacctggcagtccttttaccggaagaagcttaaggaggtgtggaaacctgccgtgcggtctggcggatctggcggaggctcctgcccaggtgagcgtgaccttcgacgacgtggccgtgaccttcacccaggaggagtggggccacctggagcccgcccagaggaccctgtaccaggaggtgatgctggagacctgcaggctgctgatgagcctgggctgccccgtgcccaggcccgagctgatctaccagctggagcacggccaggagctgtggaccgtgaagagggacctgagcaggagcacctgccccggctacagcagcgagggatctggctccggcagcggccccaagaaaaagagaaaagtctaagctgccttctgcggggcttgccttctggccatgcccttcttctctcccttgcacctgtacctcttggtctttgaataaagcctgagtaggaaggctagcaaaaaaaaaaaaaaaaaaaaaaaaaaaaaaaaaaaaaaaaaaaaaaaaaaaaaaaaaaaaaaaaaaaaaaaaaaaaaaaa

SEQ ID NO: 15746 - RNA, 9485 nt, synthetic construct
  source 1..9485: mol_type = other RNA
aggaaataagagagaaaagaagagtaagaagaaatataagagccaccatggcccctaagaagaagcgtaaagtgagccggatggaacgcctcgtctacgaggtgcggcagaagtgcagaaacatcgaggacatctgcatctcctgcggatctctgaacgtgaccctggagcacccactgttcatcggcggcatgtgccagaactgtaaaaactgttttctggagtgtgcctatcaatacgacgatgacggctaccagagctactgcaccatctgttgcggcggaagagaggtgctgatgtgtggaaataacaactgctgccggtgcttctgcgtggaatgcgtggacctgctggtgggccccggcgccgcccaggccgctattaaggaagatccttggaactgctacatgtgcggccacaagggcacatacggcctgctgagacggagagaggactggcctagcagactgcagatgttcttcgccaataaccacgaccaggagttcgacccccctaaggtgtaccctcccgtccccgccgagaagagaaagcccatccgggtcctgagcctgttcgatggcatcgccaccggtctgctggtgctgaaggacctgggcatccaggtggataggtacattgcctccgaggtgtgcgaggactccatcaccgtgggaatggtgcgtcatcagggcaagatcatgtacgtgggcgacgtgcggagcgtgacacagaagcatatccaggagtggggccctttcgacctggtgatcggcggcagcccttgcaatgacctgagcatcgtgaacccagcccggaagggcctgtacgagggaaccggcagactgttcttcgagttttacagactgctgcacgacgcccggcctaaggaaggcgacgaccggcccttcttttggctgttcgagaatgtggtggccatgggagtcagcgacaagcgggatattagccggttcctggagagcaaccccgtgatgatcgatgccaaggaagtgagcgccgcccaccgggccagatacttctggggcaatctgcctggcatgaacagacccctggccagcaccgtgaacgacaagctggagctgcaggagtgcctggagcacggccggatcgccaagttcagcaaggtgagaaccatcaccacccgaagcaacagcatcaaacaaggcaaggaccagcactttcctgtgttcatgaacgagaaggaggacatcctgtggtgtaccgagatggagagagtgttcgggttcccagtccactacacagatgtcagcaacatgtctagactggccagacagagactgctgggaagaagctggtccgtccctgtgatcagacacctgttcgcccctctgaaggagtacttcgcctgcgtgagcagcggcaacagcaacgccaacagccggggccccagcttctctagcggcctggtgccactgtccctgagagggagccacatgggccccatggagatctacaaaaccgtgagcgcctggaagcggcagcctgtgcgcgtgctgagcctgtttcggaatatcgataaagtcctgaaaagcctgggattcctggagagcggctctggctccggcggtggcaccctgaagtacgtggaggatgtgacaaacgtggtcagacgggatgtggagaagtggggccccttcgatctggtgtacggcagcacccaacccctgggcagctcttgtgaccggtgccctggctggtacatgtttcagttccaccggatcctgcagtacgccctgccgagacaggagtcccagcggccattcttttggattttcatggacaacttgctgctgaccgaggatgaccaggaaactaccactcggttcctgcagaccgaagccgtgaccctgcaggacgtgagaggccgggactaccagaacgccatgcgggtgtggtccaacatccctggactgaaaagcaagcacgcacctctgacccctaaagaagaggagtacctgcaggcccaggtgcggagcagaagcaagctggacgcccctaaggtggatctgctggtgaagaattgcctcctgcccctgagagagtacttcaagtatttcagccagaatagtctgcccctgggaggcagcggcggcggcgccctggtgacatttgaggacgtcgccgtgcggttcacccaggaggaatgggctctgctggatccttctcagaaaatcctgtaccgggacgtgatgagagagacataccggaatctgacctccgtgggcatcaactgggaatgttgggaccttgaagcctgcttcagaagcctgggaagaaacctgagagtgcaggtggtgaagagaaagtgcgagctgaccaacagcggcccctgcgccgagggcggcccaagcagcggcgcccctcctcccagcggcggcagcccagccggctccccaacctctaccgaggagggcacctctgagtccgccacccccgagagcggccctggcacctccaccgagcccagcgagggcagcgcacccggcagccctgccggcagccccacctccacagaggagggaaccagcaccgagcccagcgaaggcagcgccccaggcaccagcaccgagcctagtgagcaggagattaaacggatcaacaagatcagaagaagacttgtgaaagacagcaacaccaagaaggccggcaagacaggccccatgaaaaccctgctggttagagtgatgacacccgatctgagagagcggctggaaaacctgagaaagaagcctgaaaatatcccccagcccatcagcaatacatctagagccaacctgaataagctgctgaccgattacaccgaaatgaagaaggcgatcctgcatgtgtactgggaagagttccagaaggaccctgtgggcctgatgagccgggtggcccagcctgccagcaagaagatcgatcagaacaagctgaaacctgagatggacgagaagggcaacctgaccaccgccggctttgcctgctctcagtgtggccagcccctgttcgtgtacaagctggagcaggtgtctgagaagggcaaggcttacaccaactacttcggacggtgcaatgtggccgagcacgaaaagctgatcctgctggcccagctgaagcccgagaaggatagcgacgaagccgtgacatatagcctgggaaagtttgggcagagggccctggatttctacagcattcatgtgaccaaggagtccacccaccccgtgaagcccctggcccagatcgccggaaacagatacgcctccggacctgtgggaaaggccctgagcgacgcatgtatgggcacaatcgcctccttcctgtctaagtaccaggacatcatcatcgaacaccagaaggtggtgaagggcaaccagaagagactggagagcctgcgggagctggccggcaaggaaaacctggaataccctagcgtgaccctgccacctcagcctcacaccaaggagggcgttgatgcctacaacgaagtgatcgcccgggtgcgaatgtgggtgaacctgaacctgtggcagaagctgaagctaagcagagatgatgccaagcctctgctgagactgaagggattcccttcctttcctctggtcgagagacaggccaacgaagtggactggtgggacatggtgtgtaacgtgaagaagctgatcaacgagaaaaaggaggatggcaaggtgttttggcagaatctggctggctacaagagacaggaagccctgagaccatacctgagcagcgaggaagatcggaagaagggaaagaaattcgctcggtaccagctgggcgacctgctgctgcacctggaaaagaagcacggcgaggactggggaaaggtgtacgacgaggcctgggagcggattgacaagaaagtggaaggcctgagcaagcacatcaagctggaagaggaacggagaagcgaggacgcccagagcaaggccgccctgaccgactggctgcgggctaaggccagcttcgtgatcgagggcctgaaggaggccgacaaggacgagttctgcagatgcgagctgaagctgcagaagtggtacggggacctgcggggaaagcccttcgccatcgaagccgagaacagcatcctggacatcagcggcttcagcaagcagtacaactgtgccttcatctggcagaaggacggcgtgaagaagctgaacctgtacctgatcatcaactacttcaagggcggcaagctgcggttcaagaagatcaaacctgaagccttcgaagccaacagattctacaccgtgatcaacaaaaagagcggcgagatcgtgcccatggaggtgaacttcaacttcgacgaccccaacctgatcatcctgcctctggcctttggcaagagacagggcagagaattcatctggaacgacctgctgtccctggaaaccggcagcctgaagctggccaacggaagagtgatcgagaagacactgtacaacagaagaacccggcaggatgagcctgccctgttcgtggccctgaccttcgagcggcgggaggtcctggactcctccaatatcaaaccaatgaacctgatcggcgtggcaagaggcgaaaacatccccgccgtgatcgccctgaccgaccccgagggctgcccactgagccggtttaaggatagcctgggaaacccaacccacatcctgagaatcggcgagagctataaggagaagcagcggaccatccaggccaagaaggaggtggagcagcggagagccggcggctacagccggaagtacgccagcaaagccaagaatctggcagacgatatggtgagaaacaccgctagagatctgctgtactacgccgtgacccaggatgccatgctgatcttcgccaacctgagccggggcttcggccggcagggcaagcggaccttcatggccgagagacagtacacacggatggaggactggctgaccgccaagctggcctacgagggcctgagcaagacctacctgtccaagacactggcccagtacacctccaagacatgcagcaactgtgggtttaccatcaccagcgccgactacgacagggtgctggagaagctgaagaagacagcaacaggctggatgaccacaattaacggcaaggagctgaaggtggagggccagattacctactacaacagatacaagagacagaacgtagtcaaggacctgtccgtcgagctggatagactgagcgaagaatctgtgaacaacgacatctcctcctggacaaagggcagaagcggagaagctctgagcctcctgaagaaaagattctcccatagacccgtgcaggagaagttcgtgtgcctgaactgcggcttcgagacacacgcagccgagcaagccgccctgaacatcgccagatcctggctgttcctgcggagccaggagtacaagaaataccagacaaacaagacaaccggcaacaccgataagagagccttcgtcgagacctggcagtccttttaccggaagaagcttaaggaggtgtggaaacctgccgtgcggtctggcggatctggcggaggctccccccaggtgctggtgagcttcgaggacgtggccgtgttcctgagcagggaggagtggggctgcctgggccccgcccagaggggcctgtacagcaacgtgatgctggagacctacaggaacctgatcagcctgggcctgcagggcagcaagcccgacgtgatcagcaggctggagaagggcgaggagccctgggccccctacagccccaagatcgaggagggctggatcaggagccacaggagcggcggcccaagcagcggcgcccctcctcccagcggcggcagcccagccggctccccaacctctaccgaggagggcacctctgagtccgccacccccgagagcggccctggcacctccaccgagcccagcgagggcagcgcacccggcagccctgccggcagccccacctccacagaggagggaaccagcaccgagcccagcgaaggcagcgccccaggcaccagcaccgagcctagtgagcaggagattaaacggatcaacaagatcagaagaagacttgtgaaagacagcaacaccaagaaggccggcaagacaggccccatgaaaaccctgctggttagagtgatgacacccgatctgagagagcggctggaaaacctgagaaagaagcctgaaaatatcccccagcccatcagcaatacatctagagccaacctgaataagctgctgaccgattacaccgaaatgaagaaggcgatcctgcatgtgtactgggaagagttccagaaggaccctgtgggcctgatgagccgggtggcccagcctgccagcaagaagatcgatcagaacaagctgaaacctgagatggacgagaagggcaacctgaccaccgccggctttgcctgctctcagtgtggccagcccctgttcgtgtacaagctggagcaggtgtctgagaagggcaaggcttacaccaactacttcggacggtgcaatgtggccgagcacgaaaagctgatcctgctggcccagctgaagcccgagaaggatagcgacgaagccgtgacatatagcctgggaaagtttgggcagagggccctggatttctacagcattcatgtgaccaaggagtccacccaccccgtgaagcccctggcccagatcgccggaaacagatacgcctccggacctgtgggaaaggccctgagcgacgcatgtatgggcacaatcgcctccttcctgtctaagtaccaggacatcatcatcgaacaccagaaggtggtgaagggcaaccagaagagactggagagcctgcgggagctggccggcaaggaaaacctggaataccctagcgtgaccctgccacctcagcctcacaccaaggagggcgttgatgcctacaacgaagtgatcgcccgggtgcgaatgtgggtgaacctgaacctgtggcagaagctgaagctaagcagagatgatgccaagcctctgctgagactgaagggattcccttcctttcctctggtcgagagacaggccaacgaagtggactggtgggacatggtgtgtaacgtgaagaagctgatcaacgagaaaaaggaggatggcaaggtgttttggcagaatctggctggctacaagagacaggaagccctgagaccatacctgagcagcgaggaagatcggaagaagggaaagaaattcgctcggtaccagctgggcgacctgctgctgcacctggaaaagaagcacggcgaggactggggaaaggtgtacgacgaggcctgggagcggattgacaagaaagtggaaggcctgagcaagcacatcaagctggaagaggaacggagaagcgaggacgcccagagcaaggccgccctgaccgactggctgcgggctaaggccagcttcgtgatcgagggcctgaaggaggccgacaaggacgagttctgcagatgcgagctgaagctgcagaagtggtacggggacctgcggggaaagcccttcgccatcgaagccgagaacagcatcctggacatcagcggcttcagcaagcagtacaactgtgccttcatctggcagaaggacggcgtgaagaagctgaacctgtacctgatcatcaactacttcaagggcggcaagctgcggttcaagaagatcaaacctgaagccttcgaagccaacagattctacaccgtgatcaacaaaaagagcggcgagatcgtgcccatggaggtgaacttcaacttcgacgaccccaacctgatcatcctgcctctggcctttggcaagagacagggcagagaattcatctggaacgacctgctgtccctggaaaccggcagcctgaagctggccaacggaagagtgatcgagaagacactgtacaacagaagaacccggcaggatgagcctgccctgttcgtggccctgaccttcgagcggcgggaggtcctggactcctccaatatcaaaccaatgaacctgatcggcgtggcaagaggcgaaaacatccccgccgtgatcgccctgaccgaccccgagggctgcccactgagccggtttaaggatagcctgggaaacccaacccacatcctgagaatcggcgagagctataaggagaagcagcggaccatccaggccaagaaggaggtggagcagcggagagccggcggctacagccggaagtacgccagcaaagccaagaatctggcagacgatatggtgagaaacaccgctagagatctgctgtactacgccgtgacccaggatgccatgctgatcttcgccaacctgagccggggcttcggccggcagggcaagcggaccttcatggccgagagacagtacacacggatggaggactggctgaccgccaagctggcctacgagggcctgagcaagacctacctgtccaagacactggcccagtacacctccaagacatgcagcaactgtgggtttaccatcaccagcgccgactacgacagggtgctggagaagctgaagaagacagcaacaggctggatgaccacaattaacggcaaggagctgaaggtggagggccagattacctactacaacagatacaagagacagaacgtagtcaaggacctgtccgtcgagctggatagactgagcgaagaatctgtgaacaacgacatctcctcctggacaaagggcagaagcggagaagctctgagcctcctgaagaaaagattctcccatagacccgtgcaggagaagttcgtgtgcctgaactgcggcttcgagacacacgcagccgagcaagccgccctgaacatcgccagatcctggctgttcctgcggagccaggagtacaagaaataccagacaaacaagacaaccggcaacaccgataagagagccttcgtcgagacctggcagtccttttaccggaagaagcttaaggaggtgtggaaacctgccgtgcggtctggcggatctggcggaggctcctccccaggtgctggtgagcttcgaggacgtggccgtgttcctgagcagggaggagtggggctgcctgggccccgcccagaggggcctgtacagcaacgtgatgctggagacctacaggaacctgatcagcctgggcctgcagggcagcaagcccgacgtgatcagcaggctggagaagggcgaggagccctgggccccctacagccccaagatcgaggagggctggatcaggagccacaggagcggatctggctccggcagcggccccaagaaaaagagaaaagtctaagctgccttctgcggggcttgccttctggccatgcccttcttctctcccttgcacctgtacctcttggtctttgaataaagcctgagtaggaaggctagcaaaaaaaaaaaaaaaaaaaaaaaaaaaaaaaaaaaaaaaaaaaaaaaaaaaaaaaaaaaaaaaaaaaaaaaaaaaaaaaa

SEQ ID NO: 15747 - RNA, 9485 nt, synthetic construct
  source 1..9485: mol_type = other RNA
aggaaataagagagaaaagaagagtaagaagaaatataagagccaccatggcccctaagaagaagcgtaaagtgagccggatggaacgcctcgtctacgaggtgcggcagaagtgcagaaacatcgaggacatctgcatctcctgcggatctctgaacgtgaccctggagcacccactgttcatcggcggcatgtgccagaactgtaaaaactgttttctggagtgtgcctatcaatacgacgatgacggctaccagagctactgcaccatctgttgcggcggaagagaggtgctgatgtgtggaaataacaactgctgccggtgcttctgcgtggaatgcgtggacctgctggtgggccccggcgccgcccaggccgctattaaggaagatccttggaactgctacatgtgcggccacaagggcacatacggcctgctgagacggagagaggactggcctagcagactgcagatgttcttcgccaataaccacgaccaggagttcgacccccctaaggtgtaccctcccgtccccgccgagaagagaaagcccatccgggtcctgagcctgttcgatggcatcgccaccggtctgctggtgctgaaggacctgggcatccaggtggataggtacattgcctccgaggtgtgcgaggactccatcaccgtgggaatggtgcgtcatcagggcaagatcatgtacgtgggcgacgtgcggagcgtgacacagaagcatatccaggagtggggccctttcgacctggtgatcggcggcagcccttgcaatgacctgagcatcgtgaacccagcccggaagggcctgtacgagggaaccggcagactgttcttcgagttttacagactgctgcacgacgcccggcctaaggaaggcgacgaccggcccttcttttggctgttcgagaatgtggtggccatgggagtcagcgacaagcgggatattagccggttcctggagagcaaccccgtgatgatcgatgccaaggaagtgagcgccgcccaccgggccagatacttctggggcaatctgcctggcatgaacagacccctggccagcaccgtgaacgacaagctggagctgcaggagtgcctggagcacggccggatcgccaagttcagcaaggtgagaaccatcaccacccgaagcaacagcatcaaacaaggcaaggaccagcactttcctgtgttcatgaacgagaaggaggacatcctgtggtgtaccgagatggagagagtgttcgggttcccagtccactacacagatgtcagcaacatgtctagactggccagacagagactgctgggaagaagctggtccgtccctgtgatcagacacctgttcgcccctctgaaggagtacttcgcctgcgtgagcagcggcaacagcaacgccaacagccggggccccagcttctctagcggcctggtgccactgtccctgagagggagccacatgggccccatggagatctacaaaaccgtgagcgcctggaagcggcagcctgtgcgcgtgctgagcctgtttcggaatatcgataaagtcctgaaaagcctgggattcctggagagcggctctggctccggcggtggcaccctgaagtacgtggaggatgtgacaaacgtggtcagacgggatgtggagaagtggggccccttcgatctggtgtacggcagcacccaacccctgggcagctcttgtgaccggtgccctggctggtacatgtttcagttccaccggatcctgcagtacgccctgccgagacaggagtcccagcggccattcttttggattttcatggacaacttgctgctgaccgaggatgaccaggaaactaccactcggttcctgcagaccgaagccgtgaccctgcaggacgtgagaggccgggactaccagaacgccatgcgggtgtggtccaacatccctggactgaaaagcaagcacgcacctctgacccctaaagaagaggagtacctgcaggcccaggtgcggagcagaagcaagctggacgcccctaaggtggatctgctggtgaagaattgcctcctgcccctgagagagtacttcaagtatttcagccagaatagtctgcccctgggaggcagcggcggcggcgccctggtgacatttgaggacgtcgccgtgcggttcacccaggaggaatgggctctgctggatccttctcagaaaatcctgtaccgggacgtgatgagagagacataccggaatctgacctccgtgggcatcaactgggaatgttgggaccttgaagcctgcttcagaagcctgggaagaaacctgagagtgcaggtggtgaagagaaagtgcgagctgaccaacagcggcccctgcgccgagggcggcccaagcagcggcgcccctcctcccagcggcggcagcccagccggctccccaacctctaccgaggagggcacctctgagtccgccacccccgagagcggccctggcacctccaccgagcccagcgagggcagcgcacccggcagccctgccggcagccccacctccacagaggagggaaccagcaccgagcccagcgaaggcagcgccccaggcaccagcaccgagcctagtgagcaggagattaaacggatcaacaagatcagaagaagacttgtgaaagacagcaacaccaagaaggccggcaagacaggccccatgaaaaccctgctggttagagtgatgacacccgatctgagagagcggctggaaaacctgagaaagaagcctgaaaatatcccccagcccatcagcaatacatctagagccaacctgaataagctgctgaccgattacaccgaaatgaagaaggcgatcctgcatgtgtactgggaagagttccagaaggaccctgtgggcctgatgagccgggtggcccagcctgccagcaagaagatcgatcagaacaagctgaaacctgagatggacgagaagggcaacctgaccaccgccggctttgcctgctctcagtgtggccagcccctgttcgtgtacaagctggagcaggtgtctgagaagggcaaggcttacaccaactacttcggacggtgcaatgtggccgagcacgaaaagctgatcctgctggcccagctgaagcccgagaaggatagcgacgaagccgtgacatatagcctgggaaagtttgggcagagggccctggatttctacagcattcatgtgaccaaggagtccacccaccccgtgaagcccctggcccagatcgccggaaacagatacgcctccggacctgtgggaaaggccctgagcgacgcatgtatgggcacaatcgcctccttcctgtctaagtaccaggacatcatcatcgaacaccagaaggtggtgaagggcaaccagaagagactggagagcctgcgggagctggccggcaaggaaaacctggaataccctagcgtgaccctgccacctcagcctcacaccaaggagggcgttgatgcctacaacgaagtgatcgcccgggtgcgaatgtgggtgaacctgaacctgtggcagaagctgaagctaagcagagatgatgccaagcctctgctgagactgaagggattcccttcctttcctctggtcgagagacaggccaacgaagtggactggtgggacatggtgtgtaacgtgaagaagctgatcaacgagaaaaaggaggatggcaaggtgttttggcagaatctggctggctacaagagacaggaagccctgagaccatacctgagcagcgaggaagatcggaagaagggaaagaaattcgctcggtaccagctgggcgacctgctgctgcacctggaaaagaagcacggcgaggactggggaaaggtgtacgacgaggcctgggagcggattgacaagaaagtggaaggcctgagcaagcacatcaagctggaagaggaacggagaagcgaggacgcccagagcaaggccgccctgaccgactggctgcgggctaaggccagcttcgtgatcgagggcctgaaggaggccgacaaggacgagttctgcagatgcgagctgaagctgcagaagtggtacggggacctgcggggaaagcccttcgccatcgaagccgagaacagcatcctggacatcagcggcttcagcaagcagtacaactgtgccttcatctggcagaaggacggcgtgaagaagctgaacctgtacctgatcatcaactacttcaagggcggcaagctgcggttcaagaagatcaaacctgaagccttcgaagccaacagattctacaccgtgatcaacaaaaagagcggcgagatcgtgcccatggaggtgaacttcaacttcgacgaccccaacctgatcatcctgcctctggcctttggcaagagacagggcagagaattcatctggaacgacctgctgtccctggaaaccggcagcctgaagctggccaacggaagagtgatcgagaagacactgtacaacagaagaacccggcaggatgagcctgccctgttcgtggccctgaccttcgagcggcgggaggtcctggactcctccaatatcaaaccaatgaacctgatcggcgtggcaagaggcgaaaacatccccgccgtgatcgccctgaccgaccccgagggctgcccactgagccggtttaaggatagcctgggaaacccaacccacatcctgagaatcggcgagagctataaggagaagcagcggaccatccaggccaagaaggaggtggagcagcggagagccggcggctacagccggaagtacgccagcaaagccaagaatctggcagacgatatggtgagaaacaccgctagagatctgctgtactacgccgtgacccaggatgccatgctgatcttcgccaacctgagccggggcttcggccggcagggcaagcggaccttcatggccgagagacagtacacacggatggaggactggctgaccgccaagctggcctacgagggcctgagcaagacctacctgtccaagacactggcccagtacacctccaagacatgcagcaactgtgggtttaccatcaccagcgccgactacgacagggtgctggagaagctgaagaagacagcaacaggctggatgaccacaattaacggcaaggagctgaaggtggagggccagattacctactacaacagatacaagagacagaacgtagtcaaggacctgtccgtcgagctggatagactgagcgaagaatctgtgaacaacgacatctcctcctggacaaagggcagaagcggagaagctctgagcctcctgaagaaaagattctcccatagacccgtgcaggagaagttcgtgtgcctgaactgcggcttcgagacacacgcagccgagcaagccgccctgaacatcgccagatcctggctgttcctgcggagccaggagtacaagaaataccagacaaacaagacaaccggcaacaccgataagagagccttcgtcgagacctggcagtccttttaccggaagaagcttaaggaggtgtggaaacctgccgtgcggtctggcggatctggcggaggctcccaggagatccccgtgagcttcaaggacgtggtggtgggcttcacccaggaggagtggcactggctgaaccccgtgcagagggccctgtacagggacgtgatgctggagacctacagcaacctggtgagcgtgggctacgagggcaccaagcccgacgtgatcctgaggctggagcaggaggaggccccctgggtgtgcgaggccccctgccccggctgctgctgctgggaggacatctggcagggcggcccaagcagcggcgcccctcctcccagcggcggcagcccagccggctccccaacctctaccgaggagggcacctctgagtccgccacccccgagagcggccctggcacctccaccgagcccagcgagggcagcgcacccggcagccctgccggcagccccacctccacagaggagggaaccagcaccgagcccagcgaaggcagcgccccaggcaccagcaccgagcctagtgagcaggagattaaacggatcaacaagatcagaagaagacttgtgaaagacagcaacaccaagaaggccggcaagacaggccccatgaaaaccctgctggttagagtgatgacacccgatctgagagagcggctggaaaacctgagaaagaagcctgaaaatatcccccagcccatcagcaatacatctagagccaacctgaataagctgctgaccgattacaccgaaatgaagaaggcgatcctgcatgtgtactgggaagagttccagaaggaccctgtgggcctgatgagccgggtggcccagcctgccagcaagaagatcgatcagaacaagctgaaacctgagatggacgagaagggcaacctgaccaccgccggctttgcctgctctcagtgtggccagcccctgttcgtgtacaagctggagcaggtgtctgagaagggcaaggcttacaccaactacttcggacggtgcaatgtggccgagcacgaaaagctgatcctgctggcccagctgaagcccgagaaggatagcgacgaagccgtgacatatagcctgggaaagtttgggcagagggccctggatttctacagcattcatgtgaccaaggagtccacccaccccgtgaagcccctggcccagatcgccggaaacagatacgcctccggacctgtgggaaaggccctgagcgacgcatgtatgggcacaatcgcctccttcctgtctaagtaccaggacatcatcatcgaacaccagaaggtggtgaagggcaaccagaagagactggagagcctgcgggagctggccggcaaggaaaacctggaataccctagcgtgaccctgccacctcagcctcacaccaaggagggcgttgatgcctacaacgaagtgatcgcccgggtgcgaatgtgggtgaacctgaacctgtggcagaagctgaagctaagcagagatgatgccaagcctctgctgagactgaagggattcccttcctttcctctggtcgagagacaggccaacgaagtggactggtgggacatggtgtgtaacgtgaagaagctgatcaacgagaaaaaggaggatggcaaggtgttttggcagaatctggctggctacaagagacaggaagccctgagaccatacctgagcagcgaggaagatcggaagaagggaaagaaattcgctcggtaccagctgggcgacctgctgctgcacctggaaaagaagcacggcgaggactggggaaaggtgtacgacgaggcctgggagcggattgacaagaaagtggaaggcctgagcaagcacatcaagctggaagaggaacggagaagcgaggacgcccagagcaaggccgccctgaccgactggctgcgggctaaggccagcttcgtgatcgagggcctgaaggaggccgacaaggacgagttctgcagatgcgagctgaagctgcagaagtggtacggggacctgcggggaaagcccttcgccatcgaagccgagaacagcatcctggacatcagcggcttcagcaagcagtacaactgtgccttcatctggcagaaggacggcgtgaagaagctgaacctgtacctgatcatcaactacttcaagggcggcaagctgcggttcaagaagatcaaacctgaagccttcgaagccaacagattctacaccgtgatcaacaaaaagagcggcgagatcgtgcccatggaggtgaacttcaacttcgacgaccccaacctgatcatcctgcctctggcctttggcaagagacagggcagagaattcatctggaacgacctgctgtccctggaaaccggcagcctgaagctggccaacggaagagtgatcgagaagacactgtacaacagaagaacccggcaggatgagcctgccctgttcgtggccctgaccttcgagcggcgggaggtcctggactcctccaatatcaaaccaatgaacctgatcggcgtggcaagaggcgaaaacatccccgccgtgatcgccctgaccgaccccgagggctgcccactgagccggtttaaggatagcctgggaaacccaacccacatcctgagaatcggcgagagctataaggagaagcagcggaccatccaggccaagaaggaggtggagcagcggagagccggcggctacagccggaagtacgccagcaaagccaagaatctggcagacgatatggtgagaaacaccgctagagatctgctgtactacgccgtgacccaggatgccatgctgatcttcgccaacctgagccggggcttcggccggcagggcaagcggaccttcatggccgagagacagtacacacggatggaggactggctgaccgccaagctggcctacgagggcctgagcaagacctacctgtccaagacactggcccagtacacctccaagacatgcagcaactgtgggtttaccatcaccagcgccgactacgacagggtgctggagaagctgaagaagacagcaacaggctggatgaccacaattaacggcaaggagctgaaggtggagggccagattacctactacaacagatacaagagacagaacgtagtcaaggacctgtccgtcgagctggatagactgagcgaagaatctgtgaacaacgacatctcctcctggacaaagggcagaagcggagaagctctgagcctcctgaagaaaagattctcccatagacccgtgcaggagaagttcgtgtgcctgaactgcggcttcgagacacacgcagccgagcaagccgccctgaacatcgccagatcctggctgttcctgcggagccaggagtacaagaaataccagacaaacaagacaaccggcaacaccgataagagagccttcgtcgagacctggcagtccttttaccggaagaagcttaaggaggtgtggaaacctgccgtgcggtctggcggatctggcggaggctcctcaggagatccccgtgagcttcaaggacgtggtggtgggcttcacccaggaggagtggcactggctgaaccccgtgcagagggccctgtacagggacgtgatgctggagacctacagcaacctggtgagcgtgggctacgagggcaccaagcccgacgtgatcctgaggctggagcaggaggaggccccctgggtgtgcgaggccccctgccccggctgctgctgctgggaggacatctggcagggatctggctccggcagcggccccaagaaaaagagaaaagtctaagctgccttctgcggggcttgccttctggccatgcccttcttctctcccttgcacctgtacctcttggtctttgaataaagcctgagtaggaaggctagcaaaaaaaaaaaaaaaaaaaaaaaaaaaaaaaaaaaaaaaaaaaaaaaaaaaaaaaaaaaaaaaaaaaaaaaaaaaaaaaa

SEQ ID NO: 15748 - RNA, 9485 nt, synthetic construct
  source 1..9485: mol_type = other RNA
aggaaataagagagaaaagaagagtaagaagaaatataagagccaccatggcccctaagaagaagcgtaaagtgagccggatggaacgcctcgtctacgaggtgcggcagaagtgcagaaacatcgaggacatctgcatctcctgcggatctctgaacgtgaccctggagcacccactgttcatcggcggcatgtgccagaactgtaaaaactgttttctggagtgtgcctatcaatacgacgatgacggctaccagagctactgcaccatctgttgcggcggaagagaggtgctgatgtgtggaaataacaactgctgccggtgcttctgcgtggaatgcgtggacctgctggtgggccccggcgccgcccaggccgctattaaggaagatccttggaactgctacatgtgcggccacaagggcacatacggcctgctgagacggagagaggactggcctagcagactgcagatgttcttcgccaataaccacgaccaggagttcgacccccctaaggtgtaccctcccgtccccgccgagaagagaaagcccatccgggtcctgagcctgttcgatggcatcgccaccggtctgctggtgctgaaggacctgggcatccaggtggataggtacattgcctccgaggtgtgcgaggactccatcaccgtgggaatggtgcgtcatcagggcaagatcatgtacgtgggcgacgtgcggagcgtgacacagaagcatatccaggagtggggccctttcgacctggtgatcggcggcagcccttgcaatgacctgagcatcgtgaacccagcccggaagggcctgtacgagggaaccggcagactgttcttcgagttttacagactgctgcacgacgcccggcctaaggaaggcgacgaccggcccttcttttggctgttcgagaatgtggtggccatgggagtcagcgacaagcgggatattagccggttcctggagagcaaccccgtgatgatcgatgccaaggaagtgagcgccgcccaccgggccagatacttctggggcaatctgcctggcatgaacagacccctggccagcaccgtgaacgacaagctggagctgcaggagtgcctggagcacggccggatcgccaagttcagcaaggtgagaaccatcaccacccgaagcaacagcatcaaacaaggcaaggaccagcactttcctgtgttcatgaacgagaaggaggacatcctgtggtgtaccgagatggagagagtgttcgggttcccagtccactacacagatgtcagcaacatgtctagactggccagacagagactgctgggaagaagctggtccgtccctgtgatcagacacctgttcgcccctctgaaggagtacttcgcctgcgtgagcagcggcaacagcaacgccaacagccggggccccagcttctctagcggcctggtgccactgtccctgagagggagccacatgggccccatggagatctacaaaaccgtgagcgcctggaagcggcagcctgtgcgcgtgctgagcctgtttcggaatatcgataaagtcctgaaaagcctgggattcctggagagcggctctggctccggcggtggcaccctgaagtacgtggaggatgtgacaaacgtggtcagacgggatgtggagaagtggggccccttcgatctggtgtacggcagcacccaacccctgggcagctcttgtgaccggtgccctggctggtacatgtttcagttccaccggatcctgcagtacgccctgccgagacaggagtcccagcggccattcttttggattttcatggacaacttgctgctgaccgaggatgaccaggaaactaccactcggttcctgcagaccgaagccgtgaccctgcaggacgtgagaggccgggactaccagaacgccatgcgggtgtggtccaacatccctggactgaaaagcaagcacgcacctctgacccctaaagaagaggagtacctgcaggcccaggtgcggagcagaagcaagctggacgcccctaaggtggatctgctggtgaagaattgcctcctgcccctgagagagtacttcaagtatttcagccagaatagtctgcccctgggaggcagcggcggcggcgccctggtgacatttgaggacgtcgccgtgcggttcacccaggaggaatgggctctgctggatccttctcagaaaatcctgtaccgggacgtgatgagagagacataccggaatctgacctccgtgggcatcaactgggaatgttgggaccttgaagcctgcttcagaagcctgggaagaaacctgagagtgcaggtggtgaagagaaagtgcgagctgaccaacagcggcccctgcgccgagggcggcccaagcagcggcgcccctcctcccagcggcggcagcccagccggctccccaacctctaccgaggagggcacctctgagtccgccacccccgagagcggccctggcacctccaccgagcccagcgagggcagcgcacccggcagccctgccggcagccccacctccacagaggagggaaccagcaccgagcccagcgaaggcagcgccccaggcaccagcaccgagcctagtgagcaggagattaaacggatcaacaagatcagaagaagacttgtgaaagacagcaacaccaagaaggccggcaagacaggccccatgaaaaccctgctggttagagtgatgacacccgatctgagagagcggctggaaaacctgagaaagaagcctgaaaatatcccccagcccatcagcaatacatctagagccaacctgaataagctgctgaccgattacaccgaaatgaagaaggcgatcctgcatgtgtactgggaagagttccagaaggaccctgtgggcctgatgagccgggtggcccagcctgccagcaagaagatcgatcagaacaagctgaaacctgagatggacgagaagggcaacctgaccaccgccggctttgcctgctctcagtgtggccagcccctgttcgtgtacaagctggagcaggtgtctgagaagggcaaggcttacaccaactacttcggacggtgcaatgtggccgagcacgaaaagctgatcctgctggcccagctgaagcccgagaaggatagcgacgaagccgtgacatatagcctgggaaagtttgggcagagggccctggatttctacagcattcatgtgaccaaggagtccacccaccccgtgaagcccctggcccagatcgccggaaacagatacgcctccggacctgtgggaaaggccctgagcgacgcatgtatgggcacaatcgcctccttcctgtctaagtaccaggacatcatcatcgaacaccagaaggtggtgaagggcaaccagaagagactggagagcctgcgggagctggccggcaaggaaaacctggaataccctagcgtgaccctgccacctcagcctcacaccaaggagggcgttgatgcctacaacgaagtgatcgcccgggtgcgaatgtgggtgaacctgaacctgtggcagaagctgaagctaagcagagatgatgccaagcctctgctgagactgaagggattcccttcctttcctctggtcgagagacaggccaacgaagtggactggtgggacatggtgtgtaacgtgaagaagctgatcaacgagaaaaaggaggatggcaaggtgttttggcagaatctggctggctacaagagacaggaagccctgagaccatacctgagcagcgaggaagatcggaagaagggaaagaaattcgctcggtaccagctgggcgacctgctgctgcacctggaaaagaagcacggcgaggactggggaaaggtgtacgacgaggcctgggagcggattgacaagaaagtggaaggcctgagcaagcacatcaagctggaagaggaacggagaagcgaggacgcccagagcaaggccgccctgaccgactggctgcgggctaaggccagcttcgtgatcgagggcctgaaggaggccgacaaggacgagttctgcagatgcgagctgaagctgcagaagtggtacggggacctgcggggaaagcccttcgccatcgaagccgagaacagcatcctggacatcagcggcttcagcaagcagtacaactgtgccttcatctggcagaaggacggcgtgaagaagctgaacctgtacctgatcatcaactacttcaagggcggcaagctgcggttcaagaagatcaaacctgaagccttcgaagccaacagattctacaccgtgatcaacaaaaagagcggcgagatcgtgcccatggaggtgaacttcaacttcgacgaccccaacctgatcatcctgcctctggcctttggcaagagacagggcagagaattcatctggaacgacctgctgtccctggaaaccggcagcctgaagctggccaacggaagagtgatcgagaagacactgtacaacagaagaacccggcaggatgagcctgccctgttcgtggccctgaccttcgagcggcgggaggtcctggactcctccaatatcaaaccaatgaacctgatcggcgtggcaagaggcgaaaacatccccgccgtgatcgccctgaccgaccccgagggctgcccactgagccggtttaaggatagcctgggaaacccaacccacatcctgagaatcggcgagagctataaggagaagcagcggaccatccaggccaagaaggaggtggagcagcggagagccggcggctacagccggaagtacgccagcaaagccaagaatctggcagacgatatggtgagaaacaccgctagagatctgctgtactacgccgtgacccaggatgccatgctgatcttcgccaacctgagccggggcttcggccggcagggcaagcggaccttcatggccgagagacagtacacacggatggaggactggctgaccgccaagctggcctacgagggcctgagcaagacctacctgtccaagacactggcccagtacacctccaagacatgcagcaactgtgggtttaccatcaccagcgccgactacgacagggtgctggagaagctgaagaagacagcaacaggctggatgaccacaattaacggcaaggagctgaaggtggagggccagattacctactacaacagatacaagagacagaacgtagtcaaggacctgtccgtcgagctggatagactgagcgaagaatctgtgaacaacgacatctcctcctggacaaagggcagaagcggagaagctctgagcctcctgaagaaaagattctcccatagacccgtgcaggagaagttcgtgtgcctgaactgcggcttcgagacacacgcagccgagcaagccgccctgaacatcgccagatcctggctgttcctgcggagccaggagtacaagaaataccagacaaacaagacaaccggcaacaccgataagagagccttcgtcgagacctggcagtccttttaccggaagaagcttaaggaggtgtggaaacctgccgtgcggtctggcggatctggcggaggctccagccagggcagcgtgaccttcagggacgtggccatcgacttcagccaggaggagtggaagtggctgcagcccgcccagagggacctgtacaggtgcgtgatgctggagaactacggccacctggtgagcctgggcctgagcatcagcaagcccgacgtggtgagcctgctggagcagggcaaggagccctggctgggcaagagggacgtgaagagggacctgttccccgccctgagcccccagggcggcccaagcagcggcgcccctcctcccagcggcggcagcccagccggctccccaacctctaccgaggagggcacctctgagtccgccacccccgagagcggccctggcacctccaccgagcccagcgagggcagcgcacccggcagccctgccggcagccccacctccacagaggagggaaccagcaccgagcccagcgaaggcagcgccccaggcaccagcaccgagcctagtgagcaggagattaaacggatcaacaagatcagaagaagacttgtgaaagacagcaacaccaagaaggccggcaagacaggccccatgaaaaccctgctggttagagtgatgacacccgatctgagagagcggctggaaaacctgagaaagaagcctgaaaatatcccccagcccatcagcaatacatctagagccaacctgaataagctgctgaccgattacaccgaaatgaagaaggcgatcctgcatgtgtactgggaagagttccagaaggaccctgtgggcctgatgagccgggtggcccagcctgccagcaagaagatcgatcagaacaagctgaaacctgagatggacgagaagggcaacctgaccaccgccggctttgcctgctctcagtgtggccagcccctgttcgtgtacaagctggagcaggtgtctgagaagggcaaggcttacaccaactacttcggacggtgcaatgtggccgagcacgaaaagctgatcctgctggcccagctgaagcccgagaaggatagcgacgaagccgtgacatatagcctgggaaagtttgggcagagggccctggatttctacagcattcatgtgaccaaggagtccacccaccccgtgaagcccctggcccagatcgccggaaacagatacgcctccggacctgtgggaaaggccctgagcgacgcatgtatgggcacaatcgcctccttcctgtctaagtaccaggacatcatcatcgaacaccagaaggtggtgaagggcaaccagaagagactggagagcctgcgggagctggccggcaaggaaaacctggaataccctagcgtgaccctgccacctcagcctcacaccaaggagggcgttgatgcctacaacgaagtgatcgcccgggtgcgaatgtgggtgaacctgaacctgtggcagaagctgaagctaagcagagatgatgccaagcctctgctgagactgaagggattcccttcctttcctctggtcgagagacaggccaacgaagtggactggtgggacatggtgtgtaacgtgaagaagctgatcaacgagaaaaaggaggatggcaaggtgttttggcagaatctggctggctacaagagacaggaagccctgagaccatacctgagcagcgaggaagatcggaagaagggaaagaaattcgctcggtaccagctgggcgacctgctgctgcacctggaaaagaagcacggcgaggactggggaaaggtgtacgacgaggcctgggagcggattgacaagaaagtggaaggcctgagcaagcacatcaagctggaagaggaacggagaagcgaggacgcccagagcaaggccgccctgaccgactggctgcgggctaaggccagcttcgtgatcgagggcctgaaggaggccgacaaggacgagttctgcagatgcgagctgaagctgcagaagtggtacggggacctgcggggaaagcccttcgccatcgaagccgagaacagcatcctggacatcagcggcttcagcaagcagtacaactgtgccttcatctggcagaaggacggcgtgaagaagctgaacctgtacctgatcatcaactacttcaagggcggcaagctgcggttcaagaagatcaaacctgaagccttcgaagccaacagattctacaccgtgatcaacaaaaagagcggcgagatcgtgcccatggaggtgaacttcaacttcgacgaccccaacctgatcatcctgcctctggcctttggcaagagacagggcagagaattcatctggaacgacctgctgtccctggaaaccggcagcctgaagctggccaacggaagagtgatcgagaagacactgtacaacagaagaacccggcaggatgagcctgccctgttcgtggccctgaccttcgagcggcgggaggtcctggactcctccaatatcaaaccaatgaacctgatcggcgtggcaagaggcgaaaacatccccgccgtgatcgccctgaccgaccccgagggctgcccactgagccggtttaaggatagcctgggaaacccaacccacatcctgagaatcggcgagagctataaggagaagcagcggaccatccaggccaagaaggaggtggagcagcggagagccggcggctacagccggaagtacgccagcaaagccaagaatctggcagacgatatggtgagaaacaccgctagagatctgctgtactacgccgtgacccaggatgccatgctgatcttcgccaacctgagccggggcttcggccggcagggcaagcggaccttcatggccgagagacagtacacacggatggaggactggctgaccgccaagctggcctacgagggcctgagcaagacctacctgtccaagacactggcccagtacacctccaagacatgcagcaactgtgggtttaccatcaccagcgccgactacgacagggtgctggagaagctgaagaagacagcaacaggctggatgaccacaattaacggcaaggagctgaaggtggagggccagattacctactacaacagatacaagagacagaacgtagtcaaggacctgtccgtcgagctggatagactgagcgaagaatctgtgaacaacgacatctcctcctggacaaagggcagaagcggagaagctctgagcctcctgaagaaaagattctcccatagacccgtgcaggagaagttcgtgtgcctgaactgcggcttcgagacacacgcagccgagcaagccgccctgaacatcgccagatcctggctgttcctgcggagccaggagtacaagaaataccagacaaacaagacaaccggcaacaccgataagagagccttcgtcgagacctggcagtccttttaccggaagaagcttaaggaggtgtggaaacctgccgtgcggtctggcggatctggcggaggctcctagccagggcagcgtgaccttcagggacgtggccatcgacttcagccaggaggagtggaagtggctgcagcccgcccagagggacctgtacaggtgcgtgatgctggagaactacggccacctggtgagcctgggcctgagcatcagcaagcccgacgtggtgagcctgctggagcagggcaaggagccctggctgggcaagagggacgtgaagagggacctgttccccgccctgagcccccagggatctggctccggcagcggccccaagaaaaagagaaaagtctaagctgccttctgcggggcttgccttctggccatgcccttcttctctcccttgcacctgtacctcttggtctttgaataaagcctgagtaggaaggctagcaaaaaaaaaaaaaaaaaaaaaaaaaaaaaaaaaaaaaaaaaaaaaaaaaaaaaaaaaaaaaaaaaaaaaaaaaaaaaaaa

SEQ ID NO: 15749 - RNA, 9485 nt, synthetic construct
  source 1..9485: mol_type = other RNA
aggaaataagagagaaaagaagagtaagaagaaatataagagccaccatggcccctaagaagaagcgtaaagtgagccggatggaacgcctcgtctacgaggtgcggcagaagtgcagaaacatcgaggacatctgcatctcctgcggatctctgaacgtgaccctggagcacccactgttcatcggcggcatgtgccagaactgtaaaaactgttttctggagtgtgcctatcaatacgacgatgacggctaccagagctactgcaccatctgttgcggcggaagagaggtgctgatgtgtggaaataacaactgctgccggtgcttctgcgtggaatgcgtggacctgctggtgggccccggcgccgcccaggccgctattaaggaagatccttggaactgctacatgtgcggccacaagggcacatacggcctgctgagacggagagaggactggcctagcagactgcagatgttcttcgccaataaccacgaccaggagttcgacccccctaaggtgtaccctcccgtccccgccgagaagagaaagcccatccgggtcctgagcctgttcgatggcatcgccaccggtctgctggtgctgaaggacctgggcatccaggtggataggtacattgcctccgaggtgtgcgaggactccatcaccgtgggaatggtgcgtcatcagggcaagatcatgtacgtgggcgacgtgcggagcgtgacacagaagcatatccaggagtggggccctttcgacctggtgatcggcggcagcccttgcaatgacctgagcatcgtgaacccagcccggaagggcctgtacgagggaaccggcagactgttcttcgagttttacagactgctgcacgacgcccggcctaaggaaggcgacgaccggcccttcttttggctgttcgagaatgtggtggccatgggagtcagcgacaagcgggatattagccggttcctggagagcaaccccgtgatgatcgatgccaaggaagtgagcgccgcccaccgggccagatacttctggggcaatctgcctggcatgaacagacccctggccagcaccgtgaacgacaagctggagctgcaggagtgcctggagcacggccggatcgccaagttcagcaaggtgagaaccatcaccacccgaagcaacagcatcaaacaaggcaaggaccagcactttcctgtgttcatgaacgagaaggaggacatcctgtggtgtaccgagatggagagagtgttcgggttcccagtccactacacagatgtcagcaacatgtctagactggccagacagagactgctgggaagaagctggtccgtccctgtgatcagacacctgttcgcccctctgaaggagtacttcgcctgcgtgagcagcggcaacagcaacgccaacagccggggccccagcttctctagcggcctggtgccactgtccctgagagggagccacatgggccccatggagatctacaaaaccgtgagcgcctggaagcggcagcctgtgcgcgtgctgagcctgtttcggaatatcgataaagtcctgaaaagcctgggattcctggagagcggctctggctccggcggtggcaccctgaagtacgtggaggatgtgacaaacgtggtcagacgggatgtggagaagtggggccccttcgatctggtgtacggcagcacccaacccctgggcagctcttgtgaccggtgccctggctggtacatgtttcagttccaccggatcctgcagtacgccctgccgagacaggagtcccagcggccattcttttggattttcatggacaacttgctgctgaccgaggatgaccaggaaactaccactcggttcctgcagaccgaagccgtgaccctgcaggacgtgagaggccgggactaccagaacgccatgcgggtgtggtccaacatccctggactgaaaagcaagcacgcacctctgacccctaaagaagaggagtacctgcaggcccaggtgcggagcagaagcaagctggacgcccctaaggtggatctgctggtgaagaattgcctcctgcccctgagagagtacttcaagtatttcagccagaatagtctgcccctgggaggcagcggcggcggcgccctggtgacatttgaggacgtcgccgtgcggttcacccaggaggaatgggctctgctggatccttctcagaaaatcctgtaccgggacgtgatgagagagacataccggaatctgacctccgtgggcatcaactgggaatgttgggaccttgaagcctgcttcagaagcctgggaagaaacctgagagtgcaggtggtgaagagaaagtgcgagctgaccaacagcggcccctgcgccgagggcggcccaagcagcggcgcccctcctcccagcggcggcagcccagccggctccccaacctctaccgaggagggcacctctgagtccgccacccccgagagcggccctggcacctccaccgagcccagcgagggcagcgcacccggcagccctgccggcagccccacctccacagaggagggaaccagcaccgagcccagcgaaggcagcgccccaggcaccagcaccgagcctagtgagcaggagattaaacggatcaacaagatcagaagaagacttgtgaaagacagcaacaccaagaaggccggcaagacaggccccatgaaaaccctgctggttagagtgatgacacccgatctgagagagcggctggaaaacctgagaaagaagcctgaaaatatcccccagcccatcagcaatacatctagagccaacctgaataagctgctgaccgattacaccgaaatgaagaaggcgatcctgcatgtgtactgggaagagttccagaaggaccctgtgggcctgatgagccgggtggcccagcctgccagcaagaagatcgatcagaacaagctgaaacctgagatggacgagaagggcaacctgaccaccgccggctttgcctgctctcagtgtggccagcccctgttcgtgtacaagctggagcaggtgtctgagaagggcaaggcttacaccaactacttcggacggtgcaatgtggccgagcacgaaaagctgatcctgctggcccagctgaagcccgagaaggatagcgacgaagccgtgacatatagcctgggaaagtttgggcagagggccctggatttctacagcattcatgtgaccaaggagtccacccaccccgtgaagcccctggcccagatcgccggaaacagatacgcctccggacctgtgggaaaggccctgagcgacgcatgtatgggcacaatcgcctccttcctgtctaagtaccaggacatcatcatcgaacaccagaaggtggtgaagggcaaccagaagagactggagagcctgcgggagctggccggcaaggaaaacctggaataccctagcgtgaccctgccacctcagcctcacaccaaggagggcgttgatgcctacaacgaagtgatcgcccgggtgcgaatgtgggtgaacctgaacctgtggcagaagctgaagctaagcagagatgatgccaagcctctgctgagactgaagggattcccttcctttcctctggtcgagagacaggccaacgaagtggactggtgggacatggtgtgtaacgtgaagaagctgatcaacgagaaaaaggaggatggcaaggtgttttggcagaatctggctggctacaagagacaggaagccctgagaccatacctgagcagcgaggaagatcggaagaagggaaagaaattcgctcggtaccagctgggcgacctgctgctgcacctggaaaagaagcacggcgaggactggggaaaggtgtacgacgaggcctgggagcggattgacaagaaagtggaaggcctgagcaagcacatcaagctggaagaggaacggagaagcgaggacgcccagagcaaggccgccctgaccgactggctgcgggctaaggccagcttcgtgatcgagggcctgaaggaggccgacaaggacgagttctgcagatgcgagctgaagctgcagaagtggtacggggacctgcggggaaagcccttcgccatcgaagccgagaacagcatcctggacatcagcggcttcagcaagcagtacaactgtgccttcatctggcagaaggacggcgtgaagaagctgaacctgtacctgatcatcaactacttcaagggcggcaagctgcggttcaagaagatcaaacctgaagccttcgaagccaacagattctacaccgtgatcaacaaaaagagcggcgagatcgtgcccatggaggtgaacttcaacttcgacgaccccaacctgatcatcctgcctctggcctttggcaagagacagggcagagaattcatctggaacgacctgctgtccctggaaaccggcagcctgaagctggccaacggaagagtgatcgagaagacactgtacaacagaagaacccggcaggatgagcctgccctgttcgtggccctgaccttcgagcggcgggaggtcctggactcctccaatatcaaaccaatgaacctgatcggcgtggcaagaggcgaaaacatccccgccgtgatcgccctgaccgaccccgagggctgcccactgagccggtttaaggatagcctgggaaacccaacccacatcctgagaatcggcgagagctataaggagaagcagcggaccatccaggccaagaaggaggtggagcagcggagagccggcggctacagccggaagtacgccagcaaagccaagaatctggcagacgatatggtgagaaacaccgctagagatctgctgtactacgccgtgacccaggatgccatgctgatcttcgccaacctgagccggggcttcggccggcagggcaagcggaccttcatggccgagagacagtacacacggatggaggactggctgaccgccaagctggcctacgagggcctgagcaagacctacctgtccaagacactggcccagtacacctccaagacatgcagcaactgtgggtttaccatcaccagcgccgactacgacagggtgctggagaagctgaagaagacagcaacaggctggatgaccacaattaacggcaaggagctgaaggtggagggccagattacctactacaacagatacaagagacagaacgtagtcaaggacctgtccgtcgagctggatagactgagcgaagaatctgtgaacaacgacatctcctcctggacaaagggcagaagcggagaagctctgagcctcctgaagaaaagattctcccatagacccgtgcaggagaagttcgtgtgcctgaactgcggcttcgagacacacgcagccgagcaagccgccctgaacatcgccagatcctggctgttcctgcggagccaggagtacaagaaataccagacaaacaagacaaccggcaacaccgataagagagccttcgtcgagacctggcagtccttttaccggaagaagcttaaggaggtgtggaaacctgccgtgcggtctggcggatctggcggaggctccaggcccggcgccgtgagcttcgccgacgtggccgtgtacttcagccccgaggagtggggctgcctgaggcccgcccagagggccctgtacagggacgtgatgagggagacctacggccacctgggcgccctgggcttcgccgacgccaagcccgtgctgatcgcctggctggagaggaaggccgaggtgtggacccccgaggccgaggaccccgaggagggcgccaggcaccccggcagcggcggcggcccaagcagcggcgcccctcctcccagcggcggcagcccagccggctccccaacctctaccgaggagggcacctctgagtccgccacccccgagagcggccctggcacctccaccgagcccagcgagggcagcgcacccggcagccctgccggcagccccacctccacagaggagggaaccagcaccgagcccagcgaaggcagcgccccaggcaccagcaccgagcctagtgagcaggagattaaacggatcaacaagatcagaagaagacttgtgaaagacagcaacaccaagaaggccggcaagacaggccccatgaaaaccctgctggttagagtgatgacacccgatctgagagagcggctggaaaacctgagaaagaagcctgaaaatatcccccagcccatcagcaatacatctagagccaacctgaataagctgctgaccgattacaccgaaatgaagaaggcgatcctgcatgtgtactgggaagagttccagaaggaccctgtgggcctgatgagccgggtggcccagcctgccagcaagaagatcgatcagaacaagctgaaacctgagatggacgagaagggcaacctgaccaccgccggctttgcctgctctcagtgtggccagcccctgttcgtgtacaagctggagcaggtgtctgagaagggcaaggcttacaccaactacttcggacggtgcaatgtggccgagcacgaaaagctgatcctgctggcccagctgaagcccgagaaggatagcgacgaagccgtgacatatagcctgggaaagtttgggcagagggccctggatttctacagcattcatgtgaccaaggagtccacccaccccgtgaagcccctggcccagatcgccggaaacagatacgcctccggacctgtgggaaaggccctgagcgacgcatgtatgggcacaatcgcctccttcctgtctaagtaccaggacatcatcatcgaacaccagaaggtggtgaagggcaaccagaagagactggagagcctgcgggagctggccggcaaggaaaacctggaataccctagcgtgaccctgccacctcagcctcacaccaaggagggcgttgatgcctacaacgaagtgatcgcccgggtgcgaatgtgggtgaacctgaacctgtggcagaagctgaagctaagcagagatgatgccaagcctctgctgagactgaagggattcccttcctttcctctggtcgagagacaggccaacgaagtggactggtgggacatggtgtgtaacgtgaagaagctgatcaacgagaaaaaggaggatggcaaggtgttttggcagaatctggctggctacaagagacaggaagccctgagaccatacctgagcagcgaggaagatcggaagaagggaaagaaattcgctcggtaccagctgggcgacctgctgctgcacctggaaaagaagcacggcgaggactggggaaaggtgtacgacgaggcctgggagcggattgacaagaaagtggaaggcctgagcaagcacatcaagctggaagaggaacggagaagcgaggacgcccagagcaaggccgccctgaccgactggctgcgggctaaggccagcttcgtgatcgagggcctgaaggaggccgacaaggacgagttctgcagatgcgagctgaagctgcagaagtggtacggggacctgcggggaaagcccttcgccatcgaagccgagaacagcatcctggacatcagcggcttcagcaagcagtacaactgtgccttcatctggcagaaggacggcgtgaagaagctgaacctgtacctgatcatcaactacttcaagggcggcaagctgcggttcaagaagatcaaacctgaagccttcgaagccaacagattctacaccgtgatcaacaaaaagagcggcgagatcgtgcccatggaggtgaacttcaacttcgacgaccccaacctgatcatcctgcctctggcctttggcaagagacagggcagagaattcatctggaacgacctgctgtccctggaaaccggcagcctgaagctggccaacggaagagtgatcgagaagacactgtacaacagaagaacccggcaggatgagcctgccctgttcgtggccctgaccttcgagcggcgggaggtcctggactcctccaatatcaaaccaatgaacctgatcggcgtggcaagaggcgaaaacatccccgccgtgatcgccctgaccgaccccgagggctgcccactgagccggtttaaggatagcctgggaaacccaacccacatcctgagaatcggcgagagctataaggagaagcagcggaccatccaggccaagaaggaggtggagcagcggagagccggcggctacagccggaagtacgccagcaaagccaagaatctggcagacgatatggtgagaaacaccgctagagatctgctgtactacgccgtgacccaggatgccatgctgatcttcgccaacctgagccggggcttcggccggcagggcaagcggaccttcatggccgagagacagtacacacggatggaggactggctgaccgccaagctggcctacgagggcctgagcaagacctacctgtccaagacactggcccagtacacctccaagacatgcagcaactgtgggtttaccatcaccagcgccgactacgacagggtgctggagaagctgaagaagacagcaacaggctggatgaccacaattaacggcaaggagctgaaggtggagggccagattacctactacaacagatacaagagacagaacgtagtcaaggacctgtccgtcgagctggatagactgagcgaagaatctgtgaacaacgacatctcctcctggacaaagggcagaagcggagaagctctgagcctcctgaagaaaagattctcccatagacccgtgcaggagaagttcgtgtgcctgaactgcggcttcgagacacacgcagccgagcaagccgccctgaacatcgccagatcctggctgttcctgcggagccaggagtacaagaaataccagacaaacaagacaaccggcaacaccgataagagagccttcgtcgagacctggcagtccttttaccggaagaagcttaaggaggtgtggaaacctgccgtgcggtctggcggatctggcggaggctcctaggcccggcgccgtgagcttcgccgacgtggccgtgtacttcagccccgaggagtggggctgcctgaggcccgcccagagggccctgtacagggacgtgatgagggagacctacggccacctgggcgccctgggcttcgccgacgccaagcccgtgctgatcgcctggctggagaggaaggccgaggtgtggacccccgaggccgaggaccccgaggagggcgccaggcaccccggcagcggcggatctggctccggcagcggccccaagaaaaagagaaaagtctaagctgccttctgcggggcttgccttctggccatgcccttcttctctcccttgcacctgtacctcttggtctttgaataaagcctgagtaggaaggctagcaaaaaaaaaaaaaaaaaaaaaaaaaaaaaaaaaaaaaaaaaaaaaaaaaaaaaaaaaaaaaaaaaaaaaaaaaaaaaaaa

SEQ ID NO: 15750 - RNA, 9485 nt, synthetic construct
  source 1..9485: mol_type = other RNA
aggaaataagagagaaaagaagagtaagaagaaatataagagccaccatggcccctaagaagaagcgtaaagtgagccggatggaacgcctcgtctacgaggtgcggcagaagtgcagaaacatcgaggacatctgcatctcctgcggatctctgaacgtgaccctggagcacccactgttcatcggcggcatgtgccagaactgtaaaaactgttttctggagtgtgcctatcaatacgacgatgacggctaccagagctactgcaccatctgttgcggcggaagagaggtgctgatgtgtggaaataacaactgctgccggtgcttctgcgtggaatgcgtggacctgctggtgggccccggcgccgcccaggccgctattaaggaagatccttggaactgctacatgtgcggccacaagggcacatacggcctgctgagacggagagaggactggcctagcagactgcagatgttcttcgccaataaccacgaccaggagttcgacccccctaaggtgtaccctcccgtccccgccgagaagagaaagcccatccgggtcctgagcctgttcgatggcatcgccaccggtctgctggtgctgaaggacctgggcatccaggtggataggtacattgcctccgaggtgtgcgaggactccatcaccgtgggaatggtgcgtcatcagggcaagatcatgtacgtgggcgacgtgcggagcgtgacacagaagcatatccaggagtggggccctttcgacctggtgatcggcggcagcccttgcaatgacctgagcatcgtgaacccagcccggaagggcctgtacgagggaaccggcagactgttcttcgagttttacagactgctgcacgacgcccggcctaaggaaggcgacgaccggcccttcttttggctgttcgagaatgtggtggccatgggagtcagcgacaagcgggatattagccggttcctggagagcaaccccgtgatgatcgatgccaaggaagtgagcgccgcccaccgggccagatacttctggggcaatctgcctggcatgaacagacccctggccagcaccgtgaacgacaagctggagctgcaggagtgcctggagcacggccggatcgccaagttcagcaaggtgagaaccatcaccacccgaagcaacagcatcaaacaaggcaaggaccagcactttcctgtgttcatgaacgagaaggaggacatcctgtggtgtaccgagatggagagagtgttcgggttcccagtccactacacagatgtcagcaacatgtctagactggccagacagagactgctgggaagaagctggtccgtccctgtgatcagacacctgttcgcccctctgaaggagtacttcgcctgcgtgagcagcggcaacagcaacgccaacagccggggccccagcttctctagcggcctggtgccactgtccctgagagggagccacatgggccccatggagatctacaaaaccgtgagcgcctggaagcggcagcctgtgcgcgtgctgagcctgtttcggaatatcgataaagtcctgaaaagcctgggattcctggagagcggctctggctccggcggtggcaccctgaagtacgtggaggatgtgacaaacgtggtcagacgggatgtggagaagtggggccccttcgatctggtgtacggcagcacccaacccctgggcagctcttgtgaccggtgccctggctggtacatgtttcagttccaccggatcctgcagtacgccctgccgagacaggagtcccagcggccattcttttggattttcatggacaacttgctgctgaccgaggatgaccaggaaactaccactcggttcctgcagaccgaagccgtgaccctgcaggacgtgagaggccgggactaccagaacgccatgcgggtgtggtccaacatccctggactgaaaagcaagcacgcacctctgacccctaaagaagaggagtacctgcaggcccaggtgcggagcagaagcaagctggacgcccctaaggtggatctgctggtgaagaattgcctcctgcccctgagagagtacttcaagtatttcagccagaatagtctgcccctgggaggcagcggcggcggcgccctggtgacatttgaggacgtcgccgtgcggttcacccaggaggaatgggctctgctggatccttctcagaaaatcctgtaccgggacgtgatgagagagacataccggaatctgacctccgtgggcatcaactgggaatgttgggaccttgaagcctgcttcagaagcctgggaagaaacctgagagtgcaggtggtgaagagaaagtgcgagctgaccaacagcggcccctgcgccgagggcggcccaagcagcggcgcccctcctcccagcggcggcagcccagccggctccccaacctctaccgaggagggcacctctgagtccgccacccccgagagcggccctggcacctccaccgagcccagcgagggcagcgcacccggcagccctgccggcagccccacctccacagaggagggaaccagcaccgagcccagcgaaggcagcgccccaggcaccagcaccgagcctagtgagcaggagattaaacggatcaacaagatcagaagaagacttgtgaaagacagcaacaccaagaaggccggcaagacaggccccatgaaaaccctgctggttagagtgatgacacccgatctgagagagcggctggaaaacctgagaaagaagcctgaaaatatcccccagcccatcagcaatacatctagagccaacctgaataagctgctgaccgattacaccgaaatgaagaaggcgatcctgcatgtgtactgggaagagttccagaaggaccctgtgggcctgatgagccgggtggcccagcctgccagcaagaagatcgatcagaacaagctgaaacctgagatggacgagaagggcaacctgaccaccgccggctttgcctgctctcagtgtggccagcccctgttcgtgtacaagctggagcaggtgtctgagaagggcaaggcttacaccaactacttcggacggtgcaatgtggccgagcacgaaaagctgatcctgctggcccagctgaagcccgagaaggatagcgacgaagccgtgacatatagcctgggaaagtttgggcagagggccctggatttctacagcattcatgtgaccaaggagtccacccaccccgtgaagcccctggcccagatcgccggaaacagatacgcctccggacctgtgggaaaggccctgagcgacgcatgtatgggcacaatcgcctccttcctgtctaagtaccaggacatcatcatcgaacaccagaaggtggtgaagggcaaccagaagagactggagagcctgcgggagctggccggcaaggaaaacctggaataccctagcgtgaccctgccacctcagcctcacaccaaggagggcgttgatgcctacaacgaagtgatcgcccgggtgcgaatgtgggtgaacctgaacctgtggcagaagctgaagctaagcagagatgatgccaagcctctgctgagactgaagggattcccttcctttcctctggtcgagagacaggccaacgaagtggactggtgggacatggtgtgtaacgtgaagaagctgatcaacgagaaaaaggaggatggcaaggtgttttggcagaatctggctggctacaagagacaggaagccctgagaccatacctgagcagcgaggaagatcggaagaagggaaagaaattcgctcggtaccagctgggcgacctgctgctgcacctggaaaagaagcacggcgaggactggggaaaggtgtacgacgaggcctgggagcggattgacaagaaagtggaaggcctgagcaagcacatcaagctggaagaggaacggagaagcgaggacgcccagagcaaggccgccctgaccgactggctgcgggctaaggccagcttcgtgatcgagggcctgaaggaggccgacaaggacgagttctgcagatgcgagctgaagctgcagaagtggtacggggacctgcggggaaagcccttcgccatcgaagccgagaacagcatcctggacatcagcggcttcagcaagcagtacaactgtgccttcatctggcagaaggacggcgtgaagaagctgaacctgtacctgatcatcaactacttcaagggcggcaagctgcggttcaagaagatcaaacctgaagccttcgaagccaacagattctacaccgtgatcaacaaaaagagcggcgagatcgtgcccatggaggtgaacttcaacttcgacgaccccaacctgatcatcctgcctctggcctttggcaagagacagggcagagaattcatctggaacgacctgctgtccctggaaaccggcagcctgaagctggccaacggaagagtgatcgagaagacactgtacaacagaagaacccggcaggatgagcctgccctgttcgtggccctgaccttcgagcggcgggaggtcctggactcctccaatatcaaaccaatgaacctgatcggcgtggcaagaggcgaaaacatccccgccgtgatcgccctgaccgaccccgagggctgcccactgagccggtttaaggatagcctgggaaacccaacccacatcctgagaatcggcgagagctataaggagaagcagcggaccatccaggccaagaaggaggtggagcagcggagagccggcggctacagccggaagtacgccagcaaagccaagaatctggcagacgatatggtgagaaacaccgctagagatctgctgtactacgccgtgacccaggatgccatgctgatcttcgccaacctgagccggggcttcggccggcagggcaagcggaccttcatggccgagagacagtacacacggatggaggactggctgaccgccaagctggcctacgagggcctgagcaagacctacctgtccaagacactggcccagtacacctccaagacatgcagcaactgtgggtttaccatcaccagcgccgactacgacagggtgctggagaagctgaagaagacagcaacaggctggatgaccacaattaacggcaaggagctgaaggtggagggccagattacctactacaacagatacaagagacagaacgtagtcaaggacctgtccgtcgagctggatagactgagcgaagaatctgtgaacaacgacatctcctcctggacaaagggcagaagcggagaagctctgagcctcctgaagaaaagattctcccatagacccgtgcaggagaagttcgtgtgcctgaactgcggcttcgagacacacgcagccgagcaagccgccctgaacatcgccagatcctggctgttcctgcggagccaggagtacaagaaataccagacaaacaagacaaccggcaacaccgataagagagccttcgtcgagacctggcagtccttttaccggaagaagcttaaggaggtgtggaaacctgccgtgcggtctggcggatctggcggaggctccagcctgggcagcgagctgttcagggacgtggccatcgtgttcagccaggaggagtggcagtggctggcccccgcccagagggacctgtacagggacgtgatgctggagacctacagcaacctggtgagcctgggcctggccgtgagcaagcccgacgtgatcagcttcctggagcagggcaaggagccctggatggtggagagggtggtgagcggcggcctgtgccccgtgctggagagcaggggcggcccaagcagcggcgcccctcctcccagcggcggcagcccagccggctccccaacctctaccgaggagggcacctctgagtccgccacccccgagagcggccctggcacctccaccgagcccagcgagggcagcgcacccggcagccctgccggcagccccacctccacagaggagggaaccagcaccgagcccagcgaaggcagcgccccaggcaccagcaccgagcctagtgagcaggagattaaacggatcaacaagatcagaagaagacttgtgaaagacagcaacaccaagaaggccggcaagacaggccccatgaaaaccctgctggttagagtgatgacacccgatctgagagagcggctggaaaacctgagaaagaagcctgaaaatatcccccagcccatcagcaatacatctagagccaacctgaataagctgctgaccgattacaccgaaatgaagaaggcgatcctgcatgtgtactgggaagagttccagaaggaccctgtgggcctgatgagccgggtggcccagcctgccagcaagaagatcgatcagaacaagctgaaacctgagatggacgagaagggcaacctgaccaccgccggctttgcctgctctcagtgtggccagcccctgttcgtgtacaagctggagcaggtgtctgagaagggcaaggcttacaccaactacttcggacggtgcaatgtggccgagcacgaaaagctgatcctgctggcccagctgaagcccgagaaggatagcgacgaagccgtgacatatagcctgggaaagtttgggcagagggccctggatttctacagcattcatgtgaccaaggagtccacccaccccgtgaagcccctggcccagatcgccggaaacagatacgcctccggacctgtgggaaaggccctgagcgacgcatgtatgggcacaatcgcctccttcctgtctaagtaccaggacatcatcatcgaacaccagaaggtggtgaagggcaaccagaagagactggagagcctgcgggagctggccggcaaggaaaacctggaataccctagcgtgaccctgccacctcagcctcacaccaaggagggcgttgatgcctacaacgaagtgatcgcccgggtgcgaatgtgggtgaacctgaacctgtggcagaagctgaagctaagcagagatgatgccaagcctctgctgagactgaagggattcccttcctttcctctggtcgagagacaggccaacgaagtggactggtgggacatggtgtgtaacgtgaagaagctgatcaacgagaaaaaggaggatggcaaggtgttttggcagaatctggctggctacaagagacaggaagccctgagaccatacctgagcagcgaggaagatcggaagaagggaaagaaattcgctcggtaccagctgggcgacctgctgctgcacctggaaaagaagcacggcgaggactggggaaaggtgtacgacgaggcctgggagcggattgacaagaaagtggaaggcctgagcaagcacatcaagctggaagaggaacggagaagcgaggacgcccagagcaaggccgccctgaccgactggctgcgggctaaggccagcttcgtgatcgagggcctgaaggaggccgacaaggacgagttctgcagatgcgagctgaagctgcagaagtggtacggggacctgcggggaaagcccttcgccatcgaagccgagaacagcatcctggacatcagcggcttcagcaagcagtacaactgtgccttcatctggcagaaggacggcgtgaagaagctgaacctgtacctgatcatcaactacttcaagggcggcaagctgcggttcaagaagatcaaacctgaagccttcgaagccaacagattctacaccgtgatcaacaaaaagagcggcgagatcgtgcccatggaggtgaacttcaacttcgacgaccccaacctgatcatcctgcctctggcctttggcaagagacagggcagagaattcatctggaacgacctgctgtccctggaaaccggcagcctgaagctggccaacggaagagtgatcgagaagacactgtacaacagaagaacccggcaggatgagcctgccctgttcgtggccctgaccttcgagcggcgggaggtcctggactcctccaatatcaaaccaatgaacctgatcggcgtggcaagaggcgaaaacatccccgccgtgatcgccctgaccgaccccgagggctgcccactgagccggtttaaggatagcctgggaaacccaacccacatcctgagaatcggcgagagctataaggagaagcagcggaccatccaggccaagaaggaggtggagcagcggagagccggcggctacagccggaagtacgccagcaaagccaagaatctggcagacgatatggtgagaaacaccgctagagatctgctgtactacgccgtgacccaggatgccatgctgatcttcgccaacctgagccggggcttcggccggcagggcaagcggaccttcatggccgagagacagtacacacggatggaggactggctgaccgccaagctggcctacgagggcctgagcaagacctacctgtccaagacactggcccagtacacctccaagacatgcagcaactgtgggtttaccatcaccagcgccgactacgacagggtgctggagaagctgaagaagacagcaacaggctggatgaccacaattaacggcaaggagctgaaggtggagggccagattacctactacaacagatacaagagacagaacgtagtcaaggacctgtccgtcgagctggatagactgagcgaagaatctgtgaacaacgacatctcctcctggacaaagggcagaagcggagaagctctgagcctcctgaagaaaagattctcccatagacccgtgcaggagaagttcgtgtgcctgaactgcggcttcgagacacacgcagccgagcaagccgccctgaacatcgccagatcctggctgttcctgcggagccaggagtacaagaaataccagacaaacaagacaaccggcaacaccgataagagagccttcgtcgagacctggcagtccttttaccggaagaagcttaaggaggtgtggaaacctgccgtgcggtctggcggatctggcggaggctcctagcctgggcagcgagctgttcagggacgtggccatcgtgttcagccaggaggagtggcagtggctggcccccgcccagagggacctgtacagggacgtgatgctggagacctacagcaacctggtgagcctgggcctggccgtgagcaagcccgacgtgatcagcttcctggagcagggcaaggagccctggatggtggagagggtggtgagcggcggcctgtgccccgtgctggagagcaggggatctggctccggcagcggccccaagaaaaagagaaaagtctaagctgccttctgcggggcttgccttctggccatgcccttcttctctcccttgcacctgtacctcttggtctttgaataaagcctgagtaggaaggctagcaaaaaaaaaaaaaaaaaaaaaaaaaaaaaaaaaaaaaaaaaaaaaaaaaaaaaaaaaaaaaaaaaaaaaaaaaaaaaaaa

SEQ ID NO: 15751 - RNA, 9485 nt, synthetic construct
  source 1..9485: mol_type = other RNA
aggaaataagagagaaaagaagagtaagaagaaatataagagccaccatggcccctaagaagaagcgtaaagtgagccggatggaacgcctcgtctacgaggtgcggcagaagtgcagaaacatcgaggacatctgcatctcctgcggatctctgaacgtgaccctggagcacccactgttcatcggcggcatgtgccagaactgtaaaaactgttttctggagtgtgcctatcaatacgacgatgacggctaccagagctactgcaccatctgttgcggcggaagagaggtgctgatgtgtggaaataacaactgctgccggtgcttctgcgtggaatgcgtggacctgctggtgggccccggcgccgcccaggccgctattaaggaagatccttggaactgctacatgtgcggccacaagggcacatacggcctgctgagacggagagaggactggcctagcagactgcagatgttcttcgccaataaccacgaccaggagttcgacccccctaaggtgtaccctcccgtccccgccgagaagagaaagcccatccgggtcctgagcctgttcgatggcatcgccaccggtctgctggtgctgaaggacctgggcatccaggtggataggtacattgcctccgaggtgtgcgaggactccatcaccgtgggaatggtgcgtcatcagggcaagatcatgtacgtgggcgacgtgcggagcgtgacacagaagcatatccaggagtggggccctttcgacctggtgatcggcggcagcccttgcaatgacctgagcatcgtgaacccagcccggaagggcctgtacgagggaaccggcagactgttcttcgagttttacagactgctgcacgacgcccggcctaaggaaggcgacgaccggcccttcttttggctgttcgagaatgtggtggccatgggagtcagcgacaagcgggatattagccggttcctggagagcaaccccgtgatgatcgatgccaaggaagtgagcgccgcccaccgggccagatacttctggggcaatctgcctggcatgaacagacccctggccagcaccgtgaacgacaagctggagctgcaggagtgcctggagcacggccggatcgccaagttcagcaaggtgagaaccatcaccacccgaagcaacagcatcaaacaaggcaaggaccagcactttcctgtgttcatgaacgagaaggaggacatcctgtggtgtaccgagatggagagagtgttcgggttcccagtccactacacagatgtcagcaacatgtctagactggccagacagagactgctgggaagaagctggtccgtccctgtgatcagacacctgttcgcccctctgaaggagtacttcgcctgcgtgagcagcggcaacagcaacgccaacagccggggccccagcttctctagcggcctggtgccactgtccctgagagggagccacatgggccccatggagatctacaaaaccgtgagcgcctggaagcggcagcctgtgcgcgtgctgagcctgtttcggaatatcgataaagtcctgaaaagcctgggattcctggagagcggctctggctccggcggtggcaccctgaagtacgtggaggatgtgacaaacgtggtcagacgggatgtggagaagtggggccccttcgatctggtgtacggcagcacccaacccctgggcagctcttgtgaccggtgccctggctggtacatgtttcagttccaccggatcctgcagtacgccctgccgagacaggagtcccagcggccattcttttggattttcatggacaacttgctgctgaccgaggatgaccaggaaactaccactcggttcctgcagaccgaagccgtgaccctgcaggacgtgagaggccgggactaccagaacgccatgcgggtgtggtccaacatccctggactgaaaagcaagcacgcacctctgacccctaaagaagaggagtacctgcaggcccaggtgcggagcagaagcaagctggacgcccctaaggtggatctgctggtgaagaattgcctcctgcccctgagagagtacttcaagtatttcagccagaatagtctgcccctgggaggcagcggcggcggcgccctggtgacatttgaggacgtcgccgtgcggttcacccaggaggaatgggctctgctggatccttctcagaaaatcctgtaccgggacgtgatgagagagacataccggaatctgacctccgtgggcatcaactgggaatgttgggaccttgaagcctgcttcagaagcctgggaagaaacctgagagtgcaggtggtgaagagaaagtgcgagctgaccaacagcggcccctgcgccgagggcggcccaagcagcggcgcccctcctcccagcggcggcagcccagccggctccccaacctctaccgaggagggcacctctgagtccgccacccccgagagcggccctggcacctccaccgagcccagcgagggcagcgcacccggcagccctgccggcagccccacctccacagaggagggaaccagcaccgagcccagcgaaggcagcgccccaggcaccagcaccgagcctagtgagcaggagattaaacggatcaacaagatcagaagaagacttgtgaaagacagcaacaccaagaaggccggcaagacaggccccatgaaaaccctgctggttagagtgatgacacccgatctgagagagcggctggaaaacctgagaaagaagcctgaaaatatcccccagcccatcagcaatacatctagagccaacctgaataagctgctgaccgattacaccgaaatgaagaaggcgatcctgcatgtgtactgggaagagttccagaaggaccctgtgggcctgatgagccgggtggcccagcctgccagcaagaagatcgatcagaacaagctgaaacctgagatggacgagaagggcaacctgaccaccgccggctttgcctgctctcagtgtggccagcccctgttcgtgtacaagctggagcaggtgtctgagaagggcaaggcttacaccaactacttcggacggtgcaatgtggccgagcacgaaaagctgatcctgctggcccagctgaagcccgagaaggatagcgacgaagccgtgacatatagcctgggaaagtttgggcagagggccctggatttctacagcattcatgtgaccaaggagtccacccaccccgtgaagcccctggcccagatcgccggaaacagatacgcctccggacctgtgggaaaggccctgagcgacgcatgtatgggcacaatcgcctccttcctgtctaagtaccaggacatcatcatcgaacaccagaaggtggtgaagggcaaccagaagagactggagagcctgcgggagctggccggcaaggaaaacctggaataccctagcgtgaccctgccacctcagcctcacaccaaggagggcgttgatgcctacaacgaagtgatcgcccgggtgcgaatgtgggtgaacctgaacctgtggcagaagctgaagctaagcagagatgatgccaagcctctgctgagactgaagggattcccttcctttcctctggtcgagagacaggccaacgaagtggactggtgggacatggtgtgtaacgtgaagaagctgatcaacgagaaaaaggaggatggcaaggtgttttggcagaatctggctggctacaagagacaggaagccctgagaccatacctgagcagcgaggaagatcggaagaagggaaagaaattcgctcggtaccagctgggcgacctgctgctgcacctggaaaagaagcacggcgaggactggggaaaggtgtacgacgaggcctgggagcggattgacaagaaagtggaaggcctgagcaagcacatcaagctggaagaggaacggagaagcgaggacgcccagagcaaggccgccctgaccgactggctgcgggctaaggccagcttcgtgatcgagggcctgaaggaggccgacaaggacgagttctgcagatgcgagctgaagctgcagaagtggtacggggacctgcggggaaagcccttcgccatcgaagccgagaacagcatcctggacatcagcggcttcagcaagcagtacaactgtgccttcatctggcagaaggacggcgtgaagaagctgaacctgtacctgatcatcaactacttcaagggcggcaagctgcggttcaagaagatcaaacctgaagccttcgaagccaacagattctacaccgtgatcaacaaaaagagcggcgagatcgtgcccatggaggtgaacttcaacttcgacgaccccaacctgatcatcctgcctctggcctttggcaagagacagggcagagaattcatctggaacgacctgctgtccctggaaaccggcagcctgaagctggccaacggaagagtgatcgagaagacactgtacaacagaagaacccggcaggatgagcctgccctgttcgtggccctgaccttcgagcggcgggaggtcctggactcctccaatatcaaaccaatgaacctgatcggcgtggcaagaggcgaaaacatccccgccgtgatcgccctgaccgaccccgagggctgcccactgagccggtttaaggatagcctgggaaacccaacccacatcctgagaatcggcgagagctataaggagaagcagcggaccatccaggccaagaaggaggtggagcagcggagagccggcggctacagccggaagtacgccagcaaagccaagaatctggcagacgatatggtgagaaacaccgctagagatctgctgtactacgccgtgacccaggatgccatgctgatcttcgccaacctgagccggggcttcggccggcagggcaagcggaccttcatggccgagagacagtacacacggatggaggactggctgaccgccaagctggcctacgagggcctgagcaagacctacctgtccaagacactggcccagtacacctccaagacatgcagcaactgtgggtttaccatcaccagcgccgactacgacagggtgctggagaagctgaagaagacagcaacaggctggatgaccacaattaacggcaaggagctgaaggtggagggccagattacctactacaacagatacaagagacagaacgtagtcaaggacctgtccgtcgagctggatagactgagcgaagaatctgtgaacaacgacatctcctcctggacaaagggcagaagcggagaagctctgagcctcctgaagaaaagattctcccatagacccgtgcaggagaagttcgtgtgcctgaactgcggcttcgagacacacgcagccgagcaagccgccctgaacatcgccagatcctggctgttcctgcggagccaggagtacaagaaataccagacaaacaagacaaccggcaacaccgataagagagccttcgtcgagacctggcagtccttttaccggaagaagcttaaggaggtgtggaaacctgccgtgcggtctggcggatctggcggaggctcccccctgggcagcgagctgttcagggacgtggccatcgtgttcagccaggaggagtggcagtggctggcccccgcccagagggacctgtacagggacgtgatgctggagacctacagcaacctggtgagcctgggcctggccatcagcaagcccgacgtgatcagcttcctggagcagggcaaggagccctggatggtggagagggtggtggccggcggcctgtgccccgtgctggagagcaggggcggcccaagcagcggcgcccctcctcccagcggcggcagcccagccggctccccaacctctaccgaggagggcacctctgagtccgccacccccgagagcggccctggcacctccaccgagcccagcgagggcagcgcacccggcagccctgccggcagccccacctccacagaggagggaaccagcaccgagcccagcgaaggcagcgccccaggcaccagcaccgagcctagtgagcaggagattaaacggatcaacaagatcagaagaagacttgtgaaagacagcaacaccaagaaggccggcaagacaggccccatgaaaaccctgctggttagagtgatgacacccgatctgagagagcggctggaaaacctgagaaagaagcctgaaaatatcccccagcccatcagcaatacatctagagccaacctgaataagctgctgaccgattacaccgaaatgaagaaggcgatcctgcatgtgtactgggaagagttccagaaggaccctgtgggcctgatgagccgggtggcccagcctgccagcaagaagatcgatcagaacaagctgaaacctgagatggacgagaagggcaacctgaccaccgccggctttgcctgctctcagtgtggccagcccctgttcgtgtacaagctggagcaggtgtctgagaagggcaaggcttacaccaactacttcggacggtgcaatgtggccgagcacgaaaagctgatcctgctggcccagctgaagcccgagaaggatagcgacgaagccgtgacatatagcctgggaaagtttgggcagagggccctggatttctacagcattcatgtgaccaaggagtccacccaccccgtgaagcccctggcccagatcgccggaaacagatacgcctccggacctgtgggaaaggccctgagcgacgcatgtatgggcacaatcgcctccttcctgtctaagtaccaggacatcatcatcgaacaccagaaggtggtgaagggcaaccagaagagactggagagcctgcgggagctggccggcaaggaaaacctggaataccctagcgtgaccctgccacctcagcctcacaccaaggagggcgttgatgcctacaacgaagtgatcgcccgggtgcgaatgtgggtgaacctgaacctgtggcagaagctgaagctaagcagagatgatgccaagcctctgctgagactgaagggattcccttcctttcctctggtcgagagacaggccaacgaagtggactggtgggacatggtgtgtaacgtgaagaagctgatcaacgagaaaaaggaggatggcaaggtgttttggcagaatctggctggctacaagagacaggaagccctgagaccatacctgagcagcgaggaagatcggaagaagggaaagaaattcgctcggtaccagctgggcgacctgctgctgcacctggaaaagaagcacggcgaggactggggaaaggtgtacgacgaggcctgggagcggattgacaagaaagtggaaggcctgagcaagcacatcaagctggaagaggaacggagaagcgaggacgcccagagcaaggccgccctgaccgactggctgcgggctaaggccagcttcgtgatcgagggcctgaaggaggccgacaaggacgagttctgcagatgcgagctgaagctgcagaagtggtacggggacctgcggggaaagcccttcgccatcgaagccgagaacagcatcctggacatcagcggcttcagcaagcagtacaactgtgccttcatctggcagaaggacggcgtgaagaagctgaacctgtacctgatcatcaactacttcaagggcggcaagctgcggttcaagaagatcaaacctgaagccttcgaagccaacagattctacaccgtgatcaacaaaaagagcggcgagatcgtgcccatggaggtgaacttcaacttcgacgaccccaacctgatcatcctgcctctggcctttggcaagagacagggcagagaattcatctggaacgacctgctgtccctggaaaccggcagcctgaagctggccaacggaagagtgatcgagaagacactgtacaacagaagaacccggcaggatgagcctgccctgttcgtggccctgaccttcgagcggcgggaggtcctggactcctccaatatcaaaccaatgaacctgatcggcgtggcaagaggcgaaaacatccccgccgtgatcgccctgaccgaccccgagggctgcccactgagccggtttaaggatagcctgggaaacccaacccacatcctgagaatcggcgagagctataaggagaagcagcggaccatccaggccaagaaggaggtggagcagcggagagccggcggctacagccggaagtacgccagcaaagccaagaatctggcagacgatatggtgagaaacaccgctagagatctgctgtactacgccgtgacccaggatgccatgctgatcttcgccaacctgagccggggcttcggccggcagggcaagcggaccttcatggccgagagacagtacacacggatggaggactggctgaccgccaagctggcctacgagggcctgagcaagacctacctgtccaagacactggcccagtacacctccaagacatgcagcaactgtgggtttaccatcaccagcgccgactacgacagggtgctggagaagctgaagaagacagcaacaggctggatgaccacaattaacggcaaggagctgaaggtggagggccagattacctactacaacagatacaagagacagaacgtagtcaaggacctgtccgtcgagctggatagactgagcgaagaatctgtgaacaacgacatctcctcctggacaaagggcagaagcggagaagctctgagcctcctgaagaaaagattctcccatagacccgtgcaggagaagttcgtgtgcctgaactgcggcttcgagacacacgcagccgagcaagccgccctgaacatcgccagatcctggctgttcctgcggagccaggagtacaagaaataccagacaaacaagacaaccggcaacaccgataagagagccttcgtcgagacctggcagtccttttaccggaagaagcttaaggaggtgtggaaacctgccgtgcggtctggcggatctggcggaggctcctcccctgggcagcgagctgttcagggacgtggccatcgtgttcagccaggaggagtggcagtggctggcccccgcccagagggacctgtacagggacgtgatgctggagacctacagcaacctggtgagcctgggcctggccatcagcaagcccgacgtgatcagcttcctggagcagggcaaggagccctggatggtggagagggtggtggccggcggcctgtgccccgtgctggagagcaggggatctggctccggcagcggccccaagaaaaagagaaaagtctaagctgccttctgcggggcttgccttctggccatgcccttcttctctcccttgcacctgtacctcttggtctttgaataaagcctgagtaggaaggctagcaaaaaaaaaaaaaaaaaaaaaaaaaaaaaaaaaaaaaaaaaaaaaaaaaaaaaaaaaaaaaaaaaaaaaaaaaaaaaaaa

SEQ ID NO: 15752 - RNA, 9485 nt, synthetic construct
  source 1..9485: mol_type = other RNA
aggaaataagagagaaaagaagagtaagaagaaatataagagccaccatggcccctaagaagaagcgtaaagtgagccggatggaacgcctcgtctacgaggtgcggcagaagtgcagaaacatcgaggacatctgcatctcctgcggatctctgaacgtgaccctggagcacccactgttcatcggcggcatgtgccagaactgtaaaaactgttttctggagtgtgcctatcaatacgacgatgacggctaccagagctactgcaccatctgttgcggcggaagagaggtgctgatgtgtggaaataacaactgctgccggtgcttctgcgtggaatgcgtggacctgctggtgggccccggcgccgcccaggccgctattaaggaagatccttggaactgctacatgtgcggccacaagggcacatacggcctgctgagacggagagaggactggcctagcagactgcagatgttcttcgccaataaccacgaccaggagttcgacccccctaaggtgtaccctcccgtccccgccgagaagagaaagcccatccgggtcctgagcctgttcgatggcatcgccaccggtctgctggtgctgaaggacctgggcatccaggtggataggtacattgcctccgaggtgtgcgaggactccatcaccgtgggaatggtgcgtcatcagggcaagatcatgtacgtgggcgacgtgcggagcgtgacacagaagcatatccaggagtggggccctttcgacctggtgatcggcggcagcccttgcaatgacctgagcatcgtgaacccagcccggaagggcctgtacgagggaaccggcagactgttcttcgagttttacagactgctgcacgacgcccggcctaaggaaggcgacgaccggcccttcttttggctgttcgagaatgtggtggccatgggagtcagcgacaagcgggatattagccggttcctggagagcaaccccgtgatgatcgatgccaaggaagtgagcgccgcccaccgggccagatacttctggggcaatctgcctggcatgaacagacccctggccagcaccgtgaacgacaagctggagctgcaggagtgcctggagcacggccggatcgccaagttcagcaaggtgagaaccatcaccacccgaagcaacagcatcaaacaaggcaaggaccagcactttcctgtgttcatgaacgagaaggaggacatcctgtggtgtaccgagatggagagagtgttcgggttcccagtccactacacagatgtcagcaacatgtctagactggccagacagagactgctgggaagaagctggtccgtccctgtgatcagacacctgttcgcccctctgaaggagtacttcgcctgcgtgagcagcggcaacagcaacgccaacagccggggccccagcttctctagcggcctggtgccactgtccctgagagggagccacatgggccccatggagatctacaaaaccgtgagcgcctggaagcggcagcctgtgcgcgtgctgagcctgtttcggaatatcgataaagtcctgaaaagcctgggattcctggagagcggctctggctccggcggtggcaccctgaagtacgtggaggatgtgacaaacgtggtcagacgggatgtggagaagtggggccccttcgatctggtgtacggcagcacccaacccctgggcagctcttgtgaccggtgccctggctggtacatgtttcagttccaccggatcctgcagtacgccctgccgagacaggagtcccagcggccattcttttggattttcatggacaacttgctgctgaccgaggatgaccaggaaactaccactcggttcctgcagaccgaagccgtgaccctgcaggacgtgagaggccgggactaccagaacgccatgcgggtgtggtccaacatccctggactgaaaagcaagcacgcacctctgacccctaaagaagaggagtacctgcaggcccaggtgcggagcagaagcaagctggacgcccctaaggtggatctgctggtgaagaattgcctcctgcccctgagagagtacttcaagtatttcagccagaatagtctgcccctgggaggcagcggcggcggcgccctggtgacatttgaggacgtcgccgtgcggttcacccaggaggaatgggctctgctggatccttctcagaaaatcctgtaccgggacgtgatgagagagacataccggaatctgacctccgtgggcatcaactgggaatgttgggaccttgaagcctgcttcagaagcctgggaagaaacctgagagtgcaggtggtgaagagaaagtgcgagctgaccaacagcggcccctgcgccgagggcggcccaagcagcggcgcccctcctcccagcggcggcagcccagccggctccccaacctctaccgaggagggcacctctgagtccgccacccccgagagcggccctggcacctccaccgagcccagcgagggcagcgcacccggcagccctgccggcagccccacctccacagaggagggaaccagcaccgagcccagcgaaggcagcgccccaggcaccagcaccgagcctagtgagcaggagattaaacggatcaacaagatcagaagaagacttgtgaaagacagcaacaccaagaaggccggcaagacaggccccatgaaaaccctgctggttagagtgatgacacccgatctgagagagcggctggaaaacctgagaaagaagcctgaaaatatcccccagcccatcagcaatacatctagagccaacctgaataagctgctgaccgattacaccgaaatgaagaaggcgatcctgcatgtgtactgggaagagttccagaaggaccctgtgggcctgatgagccgggtggcccagcctgccagcaagaagatcgatcagaacaagctgaaacctgagatggacgagaagggcaacctgaccaccgccggctttgcctgctctcagtgtggccagcccctgttcgtgtacaagctggagcaggtgtctgagaagggcaaggcttacaccaactacttcggacggtgcaatgtggccgagcacgaaaagctgatcctgctggcccagctgaagcccgagaaggatagcgacgaagccgtgacatatagcctgggaaagtttgggcagagggccctggatttctacagcattcatgtgaccaaggagtccacccaccccgtgaagcccctggcccagatcgccggaaacagatacgcctccggacctgtgggaaaggccctgagcgacgcatgtatgggcacaatcgcctccttcctgtctaagtaccaggacatcatcatcgaacaccagaaggtggtgaagggcaaccagaagagactggagagcctgcgggagctggccggcaaggaaaacctggaataccctagcgtgaccctgccacctcagcctcacaccaaggagggcgttgatgcctacaacgaagtgatcgcccgggtgcgaatgtgggtgaacctgaacctgtggcagaagctgaagctaagcagagatgatgccaagcctctgctgagactgaagggattcccttcctttcctctggtcgagagacaggccaacgaagtggactggtgggacatggtgtgtaacgtgaagaagctgatcaacgagaaaaaggaggatggcaaggtgttttggcagaatctggctggctacaagagacaggaagccctgagaccatacctgagcagcgaggaagatcggaagaagggaaagaaattcgctcggtaccagctgggcgacctgctgctgcacctggaaaagaagcacggcgaggactggggaaaggtgtacgacgaggcctgggagcggattgacaagaaagtggaaggcctgagcaagcacatcaagctggaagaggaacggagaagcgaggacgcccagagcaaggccgccctgaccgactggctgcgggctaaggccagcttcgtgatcgagggcctgaaggaggccgacaaggacgagttctgcagatgcgagctgaagctgcagaagtggtacggggacctgcggggaaagcccttcgccatcgaagccgagaacagcatcctggacatcagcggcttcagcaagcagtacaactgtgccttcatctggcagaaggacggcgtgaagaagctgaacctgtacctgatcatcaactacttcaagggcggcaagctgcggttcaagaagatcaaacctgaagccttcgaagccaacagattctacaccgtgatcaacaaaaagagcggcgagatcgtgcccatggaggtgaacttcaacttcgacgaccccaacctgatcatcctgcctctggcctttggcaagagacagggcagagaattcatctggaacgacctgctgtccctggaaaccggcagcctgaagctggccaacggaagagtgatcgagaagacactgtacaacagaagaacccggcaggatgagcctgccctgttcgtggccctgaccttcgagcggcgggaggtcctggactcctccaatatcaaaccaatgaacctgatcggcgtggcaagaggcgaaaacatccccgccgtgatcgccctgaccgaccccgagggctgcccactgagccggtttaaggatagcctgggaaacccaacccacatcctgagaatcggcgagagctataaggagaagcagcggaccatccaggccaagaaggaggtggagcagcggagagccggcggctacagccggaagtacgccagcaaagccaagaatctggcagacgatatggtgagaaacaccgctagagatctgctgtactacgccgtgacccaggatgccatgctgatcttcgccaacctgagccggggcttcggccggcagggcaagcggaccttcatggccgagagacagtacacacggatggaggactggctgaccgccaagctggcctacgagggcctgagcaagacctacctgtccaagacactggcccagtacacctccaagacatgcagcaactgtgggtttaccatcaccagcgccgactacgacagggtgctggagaagctgaagaagacagcaacaggctggatgaccacaattaacggcaaggagctgaaggtggagggccagattacctactacaacagatacaagagacagaacgtagtcaaggacctgtccgtcgagctggatagactgagcgaagaatctgtgaacaacgacatctcctcctggacaaagggcagaagcggagaagctctgagcctcctgaagaaaagattctcccatagacccgtgcaggagaagttcgtgtgcctgaactgcggcttcgagacacacgcagccgagcaagccgccctgaacatcgccagatcctggctgttcctgcggagccaggagtacaagaaataccagacaaacaagacaaccggcaacaccgataagagagccttcgtcgagacctggcagtccttttaccggaagaagcttaaggaggtgtggaaacctgccgtgcggtctggcggatctggcggaggctccctgctgaccttcgaggacgtggccgtgagcttcagcgaggaggagtggaggctgctggaccccacccagaagagcctgtacaacgacgtgatgcaggagaactacgagaccgtggtgagcctgggcctgaagctgaagaacgacaccggcaacgaccagcccatcagcctgagcgccctggagatccaggccagcggctgcagggtgctgaggaaggccaggatgaaggtggcccagaagaccggcggcccaagcagcggcgcccctcctcccagcggcggcagcccagccggctccccaacctctaccgaggagggcacctctgagtccgccacccccgagagcggccctggcacctccaccgagcccagcgagggcagcgcacccggcagccctgccggcagccccacctccacagaggagggaaccagcaccgagcccagcgaaggcagcgccccaggcaccagcaccgagcctagtgagcaggagattaaacggatcaacaagatcagaagaagacttgtgaaagacagcaacaccaagaaggccggcaagacaggccccatgaaaaccctgctggttagagtgatgacacccgatctgagagagcggctggaaaacctgagaaagaagcctgaaaatatcccccagcccatcagcaatacatctagagccaacctgaataagctgctgaccgattacaccgaaatgaagaaggcgatcctgcatgtgtactgggaagagttccagaaggaccctgtgggcctgatgagccgggtggcccagcctgccagcaagaagatcgatcagaacaagctgaaacctgagatggacgagaagggcaacctgaccaccgccggctttgcctgctctcagtgtggccagcccctgttcgtgtacaagctggagcaggtgtctgagaagggcaaggcttacaccaactacttcggacggtgcaatgtggccgagcacgaaaagctgatcctgctggcccagctgaagcccgagaaggatagcgacgaagccgtgacatatagcctgggaaagtttgggcagagggccctggatttctacagcattcatgtgaccaaggagtccacccaccccgtgaagcccctggcccagatcgccggaaacagatacgcctccggacctgtgggaaaggccctgagcgacgcatgtatgggcacaatcgcctccttcctgtctaagtaccaggacatcatcatcgaacaccagaaggtggtgaagggcaaccagaagagactggagagcctgcgggagctggccggcaaggaaaacctggaataccctagcgtgaccctgccacctcagcctcacaccaaggagggcgttgatgcctacaacgaagtgatcgcccgggtgcgaatgtgggtgaacctgaacctgtggcagaagctgaagctaagcagagatgatgccaagcctctgctgagactgaagggattcccttcctttcctctggtcgagagacaggccaacgaagtggactggtgggacatggtgtgtaacgtgaagaagctgatcaacgagaaaaaggaggatggcaaggtgttttggcagaatctggctggctacaagagacaggaagccctgagaccatacctgagcagcgaggaagatcggaagaagggaaagaaattcgctcggtaccagctgggcgacctgctgctgcacctggaaaagaagcacggcgaggactggggaaaggtgtacgacgaggcctgggagcggattgacaagaaagtggaaggcctgagcaagcacatcaagctggaagaggaacggagaagcgaggacgcccagagcaaggccgccctgaccgactggctgcgggctaaggccagcttcgtgatcgagggcctgaaggaggccgacaaggacgagttctgcagatgcgagctgaagctgcagaagtggtacggggacctgcggggaaagcccttcgccatcgaagccgagaacagcatcctggacatcagcggcttcagcaagcagtacaactgtgccttcatctggcagaaggacggcgtgaagaagctgaacctgtacctgatcatcaactacttcaagggcggcaagctgcggttcaagaagatcaaacctgaagccttcgaagccaacagattctacaccgtgatcaacaaaaagagcggcgagatcgtgcccatggaggtgaacttcaacttcgacgaccccaacctgatcatcctgcctctggcctttggcaagagacagggcagagaattcatctggaacgacctgctgtccctggaaaccggcagcctgaagctggccaacggaagagtgatcgagaagacactgtacaacagaagaacccggcaggatgagcctgccctgttcgtggccctgaccttcgagcggcgggaggtcctggactcctccaatatcaaaccaatgaacctgatcggcgtggcaagaggcgaaaacatccccgccgtgatcgccctgaccgaccccgagggctgcccactgagccggtttaaggatagcctgggaaacccaacccacatcctgagaatcggcgagagctataaggagaagcagcggaccatccaggccaagaaggaggtggagcagcggagagccggcggctacagccggaagtacgccagcaaagccaagaatctggcagacgatatggtgagaaacaccgctagagatctgctgtactacgccgtgacccaggatgccatgctgatcttcgccaacctgagccggggcttcggccggcagggcaagcggaccttcatggccgagagacagtacacacggatggaggactggctgaccgccaagctggcctacgagggcctgagcaagacctacctgtccaagacactggcccagtacacctccaagacatgcagcaactgtgggtttaccatcaccagcgccgactacgacagggtgctggagaagctgaagaagacagcaacaggctggatgaccacaattaacggcaaggagctgaaggtggagggccagattacctactacaacagatacaagagacagaacgtagtcaaggacctgtccgtcgagctggatagactgagcgaagaatctgtgaacaacgacatctcctcctggacaaagggcagaagcggagaagctctgagcctcctgaagaaaagattctcccatagacccgtgcaggagaagttcgtgtgcctgaactgcggcttcgagacacacgcagccgagcaagccgccctgaacatcgccagatcctggctgttcctgcggagccaggagtacaagaaataccagacaaacaagacaaccggcaacaccgataagagagccttcgtcgagacctggcagtccttttaccggaagaagcttaaggaggtgtggaaacctgccgtgcggtctggcggatctggcggaggctcctctgctgaccttcgaggacgtggccgtgagcttcagcgaggaggagtggaggctgctggaccccacccagaagagcctgtacaacgacgtgatgcaggagaactacgagaccgtggtgagcctgggcctgaagctgaagaacgacaccggcaacgaccagcccatcagcctgagcgccctggagatccaggccagcggctgcagggtgctgaggaaggccaggatgaaggtggcccagaagaccggatctggctccggcagcggccccaagaaaaagagaaaagtctaagctgccttctgcggggcttgccttctggccatgcccttcttctctcccttgcacctgtacctcttggtctttgaataaagcctgagtaggaaggctagcaaaaaaaaaaaaaaaaaaaaaaaaaaaaaaaaaaaaaaaaaaaaaaaaaaaaaaaaaaaaaaaaaaaaaaaaaaaaaaaa

SEQ ID NO: 15753 - RNA, 9485 nt, synthetic construct
  source 1..9485: mol_type = other RNA
aggaaataagagagaaaagaagagtaagaagaaatataagagccaccatggcccctaagaagaagcgtaaagtgagccggatggaacgcctcgtctacgaggtgcggcagaagtgcagaaacatcgaggacatctgcatctcctgcggatctctgaacgtgaccctggagcacccactgttcatcggcggcatgtgccagaactgtaaaaactgttttctggagtgtgcctatcaatacgacgatgacggctaccagagctactgcaccatctgttgcggcggaagagaggtgctgatgtgtggaaataacaactgctgccggtgcttctgcgtggaatgcgtggacctgctggtgggccccggcgccgcccaggccgctattaaggaagatccttggaactgctacatgtgcggccacaagggcacatacggcctgctgagacggagagaggactggcctagcagactgcagatgttcttcgccaataaccacgaccaggagttcgacccccctaaggtgtaccctcccgtccccgccgagaagagaaagcccatccgggtcctgagcctgttcgatggcatcgccaccggtctgctggtgctgaaggacctgggcatccaggtggataggtacattgcctccgaggtgtgcgaggactccatcaccgtgggaatggtgcgtcatcagggcaagatcatgtacgtgggcgacgtgcggagcgtgacacagaagcatatccaggagtggggccctttcgacctggtgatcggcggcagcccttgcaatgacctgagcatcgtgaacccagcccggaagggcctgtacgagggaaccggcagactgttcttcgagttttacagactgctgcacgacgcccggcctaaggaaggcgacgaccggcccttcttttggctgttcgagaatgtggtggccatgggagtcagcgacaagcgggatattagccggttcctggagagcaaccccgtgatgatcgatgccaaggaagtgagcgccgcccaccgggccagatacttctggggcaatctgcctggcatgaacagacccctggccagcaccgtgaacgacaagctggagctgcaggagtgcctggagcacggccggatcgccaagttcagcaaggtgagaaccatcaccacccgaagcaacagcatcaaacaaggcaaggaccagcactttcctgtgttcatgaacgagaaggaggacatcctgtggtgtaccgagatggagagagtgttcgggttcccagtccactacacagatgtcagcaacatgtctagactggccagacagagactgctgggaagaagctggtccgtccctgtgatcagacacctgttcgcccctctgaaggagtacttcgcctgcgtgagcagcggcaacagcaacgccaacagccggggccccagcttctctagcggcctggtgccactgtccctgagagggagccacatgggccccatggagatctacaaaaccgtgagcgcctggaagcggcagcctgtgcgcgtgctgagcctgtttcggaatatcgataaagtcctgaaaagcctgggattcctggagagcggctctggctccggcggtggcaccctgaagtacgtggaggatgtgacaaacgtggtcagacgggatgtggagaagtggggccccttcgatctggtgtacggcagcacccaacccctgggcagctcttgtgaccggtgccctggctggtacatgtttcagttccaccggatcctgcagtacgccctgccgagacaggagtcccagcggccattcttttggattttcatggacaacttgctgctgaccgaggatgaccaggaaactaccactcggttcctgcagaccgaagccgtgaccctgcaggacgtgagaggccgggactaccagaacgccatgcgggtgtggtccaacatccctggactgaaaagcaagcacgcacctctgacccctaaagaagaggagtacctgcaggcccaggtgcggagcagaagcaagctggacgcccctaaggtggatctgctggtgaagaattgcctcctgcccctgagagagtacttcaagtatttcagccagaatagtctgcccctgggaggcagcggcggcggcgccctggtgacatttgaggacgtcgccgtgcggttcacccaggaggaatgggctctgctggatccttctcagaaaatcctgtaccgggacgtgatgagagagacataccggaatctgacctccgtgggcatcaactgggaatgttgggaccttgaagcctgcttcagaagcctgggaagaaacctgagagtgcaggtggtgaagagaaagtgcgagctgaccaacagcggcccctgcgccgagggcggcccaagcagcggcgcccctcctcccagcggcggcagcccagccggctccccaacctctaccgaggagggcacctctgagtccgccacccccgagagcggccctggcacctccaccgagcccagcgagggcagcgcacccggcagccctgccggcagccccacctccacagaggagggaaccagcaccgagcccagcgaaggcagcgccccaggcaccagcaccgagcctagtgagcaggagattaaacggatcaacaagatcagaagaagacttgtgaaagacagcaacaccaagaaggccggcaagacaggccccatgaaaaccctgctggttagagtgatgacacccgatctgagagagcggctggaaaacctgagaaagaagcctgaaaatatcccccagcccatcagcaatacatctagagccaacctgaataagctgctgaccgattacaccgaaatgaagaaggcgatcctgcatgtgtactgggaagagttccagaaggaccctgtgggcctgatgagccgggtggcccagcctgccagcaagaagatcgatcagaacaagctgaaacctgagatggacgagaagggcaacctgaccaccgccggctttgcctgctctcagtgtggccagcccctgttcgtgtacaagctggagcaggtgtctgagaagggcaaggcttacaccaactacttcggacggtgcaatgtggccgagcacgaaaagctgatcctgctggcccagctgaagcccgagaaggatagcgacgaagccgtgacatatagcctgggaaagtttgggcagagggccctggatttctacagcattcatgtgaccaaggagtccacccaccccgtgaagcccctggcccagatcgccggaaacagatacgcctccggacctgtgggaaaggccctgagcgacgcatgtatgggcacaatcgcctccttcctgtctaagtaccaggacatcatcatcgaacaccagaaggtggtgaagggcaaccagaagagactggagagcctgcgggagctggccggcaaggaaaacctggaataccctagcgtgaccctgccacctcagcctcacaccaaggagggcgttgatgcctacaacgaagtgatcgcccgggtgcgaatgtgggtgaacctgaacctgtggcagaagctgaagctaagcagagatgatgccaagcctctgctgagactgaagggattcccttcctttcctctggtcgagagacaggccaacgaagtggactggtgggacatggtgtgtaacgtgaagaagctgatcaacgagaaaaaggaggatggcaaggtgttttggcagaatctggctggctacaagagacaggaagccctgagaccatacctgagcagcgaggaagatcggaagaagggaaagaaattcgctcggtaccagctgggcgacctgctgctgcacctggaaaagaagcacggcgaggactggggaaaggtgtacgacgaggcctgggagcggattgacaagaaagtggaaggcctgagcaagcacatcaagctggaagaggaacggagaagcgaggacgcccagagcaaggccgccctgaccgactggctgcgggctaaggccagcttcgtgatcgagggcctgaaggaggccgacaaggacgagttctgcagatgcgagctgaagctgcagaagtggtacggggacctgcggggaaagcccttcgccatcgaagccgagaacagcatcctggacatcagcggcttcagcaagcagtacaactgtgccttcatctggcagaaggacggcgtgaagaagctgaacctgtacctgatcatcaactacttcaagggcggcaagctgcggttcaagaagatcaaacctgaagccttcgaagccaacagattctacaccgtgatcaacaaaaagagcggcgagatcgtgcccatggaggtgaacttcaacttcgacgaccccaacctgatcatcctgcctctggcctttggcaagagacagggcagagaattcatctggaacgacctgctgtccctggaaaccggcagcctgaagctggccaacggaagagtgatcgagaagacactgtacaacagaagaacccggcaggatgagcctgccctgttcgtggccctgaccttcgagcggcgggaggtcctggactcctccaatatcaaaccaatgaacctgatcggcgtggcaagaggcgaaaacatccccgccgtgatcgccctgaccgaccccgagggctgcccactgagccggtttaaggatagcctgggaaacccaacccacatcctgagaatcggcgagagctataaggagaagcagcggaccatccaggccaagaaggaggtggagcagcggagagccggcggctacagccggaagtacgccagcaaagccaagaatctggcagacgatatggtgagaaacaccgctagagatctgctgtactacgccgtgacccaggatgccatgctgatcttcgccaacctgagccggggcttcggccggcagggcaagcggaccttcatggccgagagacagtacacacggatggaggactggctgaccgccaagctggcctacgagggcctgagcaagacctacctgtccaagacactggcccagtacacctccaagacatgcagcaactgtgggtttaccatcaccagcgccgactacgacagggtgctggagaagctgaagaagacagcaacaggctggatgaccacaattaacggcaaggagctgaaggtggagggccagattacctactacaacagatacaagagacagaacgtagtcaaggacctgtccgtcgagctggatagactgagcgaagaatctgtgaacaacgacatctcctcctggacaaagggcagaagcggagaagctctgagcctcctgaagaaaagattctcccatagacccgtgcaggagaagttcgtgtgcctgaactgcggcttcgagacacacgcagccgagcaagccgccctgaacatcgccagatcctggctgttcctgcggagccaggagtacaagaaataccagacaaacaagacaaccggcaacaccgataagagagccttcgtcgagacctggcagtccttttaccggaagaagcttaaggaggtgtggaaacctgccgtgcggtctggcggatctggcggaggctccaccgagggccccctgaccttcagggacgtggccatcgagttcagccaggaggagtggaagttcctggtgcccgcccagagggccctgtacagggacgtgatgctggagacctacaggaacctggtgttcctgggcacctgccccagcgacctgagcgtgctgagctggctggagcagggcagggagctgtggaccgtgaacggccccgaggagatcagcaggcccgccaacgagtgggcctgcggcggcccaagcagcggcgcccctcctcccagcggcggcagcccagccggctccccaacctctaccgaggagggcacctctgagtccgccacccccgagagcggccctggcacctccaccgagcccagcgagggcagcgcacccggcagccctgccggcagccccacctccacagaggagggaaccagcaccgagcccagcgaaggcagcgccccaggcaccagcaccgagcctagtgagcaggagattaaacggatcaacaagatcagaagaagacttgtgaaagacagcaacaccaagaaggccggcaagacaggccccatgaaaaccctgctggttagagtgatgacacccgatctgagagagcggctggaaaacctgagaaagaagcctgaaaatatcccccagcccatcagcaatacatctagagccaacctgaataagctgctgaccgattacaccgaaatgaagaaggcgatcctgcatgtgtactgggaagagttccagaaggaccctgtgggcctgatgagccgggtggcccagcctgccagcaagaagatcgatcagaacaagctgaaacctgagatggacgagaagggcaacctgaccaccgccggctttgcctgctctcagtgtggccagcccctgttcgtgtacaagctggagcaggtgtctgagaagggcaaggcttacaccaactacttcggacggtgcaatgtggccgagcacgaaaagctgatcctgctggcccagctgaagcccgagaaggatagcgacgaagccgtgacatatagcctgggaaagtttgggcagagggccctggatttctacagcattcatgtgaccaaggagtccacccaccccgtgaagcccctggcccagatcgccggaaacagatacgcctccggacctgtgggaaaggccctgagcgacgcatgtatgggcacaatcgcctccttcctgtctaagtaccaggacatcatcatcgaacaccagaaggtggtgaagggcaaccagaagagactggagagcctgcgggagctggccggcaaggaaaacctggaataccctagcgtgaccctgccacctcagcctcacaccaaggagggcgttgatgcctacaacgaagtgatcgcccgggtgcgaatgtgggtgaacctgaacctgtggcagaagctgaagctaagcagagatgatgccaagcctctgctgagactgaagggattcccttcctttcctctggtcgagagacaggccaacgaagtggactggtgggacatggtgtgtaacgtgaagaagctgatcaacgagaaaaaggaggatggcaaggtgttttggcagaatctggctggctacaagagacaggaagccctgagaccatacctgagcagcgaggaagatcggaagaagggaaagaaattcgctcggtaccagctgggcgacctgctgctgcacctggaaaagaagcacggcgaggactggggaaaggtgtacgacgaggcctgggagcggattgacaagaaagtggaaggcctgagcaagcacatcaagctggaagaggaacggagaagcgaggacgcccagagcaaggccgccctgaccgactggctgcgggctaaggccagcttcgtgatcgagggcctgaaggaggccgacaaggacgagttctgcagatgcgagctgaagctgcagaagtggtacggggacctgcggggaaagcccttcgccatcgaagccgagaacagcatcctggacatcagcggcttcagcaagcagtacaactgtgccttcatctggcagaaggacggcgtgaagaagctgaacctgtacctgatcatcaactacttcaagggcggcaagctgcggttcaagaagatcaaacctgaagccttcgaagccaacagattctacaccgtgatcaacaaaaagagcggcgagatcgtgcccatggaggtgaacttcaacttcgacgaccccaacctgatcatcctgcctctggcctttggcaagagacagggcagagaattcatctggaacgacctgctgtccctggaaaccggcagcctgaagctggccaacggaagagtgatcgagaagacactgtacaacagaagaacccggcaggatgagcctgccctgttcgtggccctgaccttcgagcggcgggaggtcctggactcctccaatatcaaaccaatgaacctgatcggcgtggcaagaggcgaaaacatccccgccgtgatcgccctgaccgaccccgagggctgcccactgagccggtttaaggatagcctgggaaacccaacccacatcctgagaatcggcgagagctataaggagaagcagcggaccatccaggccaagaaggaggtggagcagcggagagccggcggctacagccggaagtacgccagcaaagccaagaatctggcagacgatatggtgagaaacaccgctagagatctgctgtactacgccgtgacccaggatgccatgctgatcttcgccaacctgagccggggcttcggccggcagggcaagcggaccttcatggccgagagacagtacacacggatggaggactggctgaccgccaagctggcctacgagggcctgagcaagacctacctgtccaagacactggcccagtacacctccaagacatgcagcaactgtgggtttaccatcaccagcgccgactacgacagggtgctggagaagctgaagaagacagcaacaggctggatgaccacaattaacggcaaggagctgaaggtggagggccagattacctactacaacagatacaagagacagaacgtagtcaaggacctgtccgtcgagctggatagactgagcgaagaatctgtgaacaacgacatctcctcctggacaaagggcagaagcggagaagctctgagcctcctgaagaaaagattctcccatagacccgtgcaggagaagttcgtgtgcctgaactgcggcttcgagacacacgcagccgagcaagccgccctgaacatcgccagatcctggctgttcctgcggagccaggagtacaagaaataccagacaaacaagacaaccggcaacaccgataagagagccttcgtcgagacctggcagtccttttaccggaagaagcttaaggaggtgtggaaacctgccgtgcggtctggcggatctggcggaggctcctaccgagggccccctgaccttcagggacgtggccatcgagttcagccaggaggagtggaagttcctggtgcccgcccagagggccctgtacagggacgtgatgctggagacctacaggaacctggtgttcctgggcacctgccccagcgacctgagcgtgctgagctggctggagcagggcagggagctgtggaccgtgaacggccccgaggagatcagcaggcccgccaacgagtgggcctgcggatctggctccggcagcggccccaagaaaaagagaaaagtctaagctgccttctgcggggcttgccttctggccatgcccttcttctctcccttgcacctgtacctcttggtctttgaataaagcctgagtaggaaggctagcaaaaaaaaaaaaaaaaaaaaaaaaaaaaaaaaaaaaaaaaaaaaaaaaaaaaaaaaaaaaaaaaaaaaaaaaaaaaaaaa

SEQ ID NO: 15754 - RNA, 9485 nt, synthetic construct
  source 1..9485: mol_type = other RNA
aggaaataagagagaaaagaagagtaagaagaaatataagagccaccatggcccctaagaagaagcgtaaagtgagccggatggaacgcctcgtctacgaggtgcggcagaagtgcagaaacatcgaggacatctgcatctcctgcggatctctgaacgtgaccctggagcacccactgttcatcggcggcatgtgccagaactgtaaaaactgttttctggagtgtgcctatcaatacgacgatgacggctaccagagctactgcaccatctgttgcggcggaagagaggtgctgatgtgtggaaataacaactgctgccggtgcttctgcgtggaatgcgtggacctgctggtgggccccggcgccgcccaggccgctattaaggaagatccttggaactgctacatgtgcggccacaagggcacatacggcctgctgagacggagagaggactggcctagcagactgcagatgttcttcgccaataaccacgaccaggagttcgacccccctaaggtgtaccctcccgtccccgccgagaagagaaagcccatccgggtcctgagcctgttcgatggcatcgccaccggtctgctggtgctgaaggacctgggcatccaggtggataggtacattgcctccgaggtgtgcgaggactccatcaccgtgggaatggtgcgtcatcagggcaagatcatgtacgtgggcgacgtgcggagcgtgacacagaagcatatccaggagtggggccctttcgacctggtgatcggcggcagcccttgcaatgacctgagcatcgtgaacccagcccggaagggcctgtacgagggaaccggcagactgttcttcgagttttacagactgctgcacgacgcccggcctaaggaaggcgacgaccggcccttcttttggctgttcgagaatgtggtggccatgggagtcagcgacaagcgggatattagccggttcctggagagcaaccccgtgatgatcgatgccaaggaagtgagcgccgcccaccgggccagatacttctggggcaatctgcctggcatgaacagacccctggccagcaccgtgaacgacaagctggagctgcaggagtgcctggagcacggccggatcgccaagttcagcaaggtgagaaccatcaccacccgaagcaacagcatcaaacaaggcaaggaccagcactttcctgtgttcatgaacgagaaggaggacatcctgtggtgtaccgagatggagagagtgttcgggttcccagtccactacacagatgtcagcaacatgtctagactggccagacagagactgctgggaagaagctggtccgtccctgtgatcagacacctgttcgcccctctgaaggagtacttcgcctgcgtgagcagcggcaacagcaacgccaacagccggggccccagcttctctagcggcctggtgccactgtccctgagagggagccacatgggccccatggagatctacaaaaccgtgagcgcctggaagcggcagcctgtgcgcgtgctgagcctgtttcggaatatcgataaagtcctgaaaagcctgggattcctggagagcggctctggctccggcggtggcaccctgaagtacgtggaggatgtgacaaacgtggtcagacgggatgtggagaagtggggccccttcgatctggtgtacggcagcacccaacccctgggcagctcttgtgaccggtgccctggctggtacatgtttcagttccaccggatcctgcagtacgccctgccgagacaggagtcccagcggccattcttttggattttcatggacaacttgctgctgaccgaggatgaccaggaaactaccactcggttcctgcagaccgaagccgtgaccctgcaggacgtgagaggccgggactaccagaacgccatgcgggtgtggtccaacatccctggactgaaaagcaagcacgcacctctgacccctaaagaagaggagtacctgcaggcccaggtgcggagcagaagcaagctggacgcccctaaggtggatctgctggtgaagaattgcctcctgcccctgagagagtacttcaagtatttcagccagaatagtctgcccctgggaggcagcggcggcggcgccctggtgacatttgaggacgtcgccgtgcggttcacccaggaggaatgggctctgctggatccttctcagaaaatcctgtaccgggacgtgatgagagagacataccggaatctgacctccgtgggcatcaactgggaatgttgggaccttgaagcctgcttcagaagcctgggaagaaacctgagagtgcaggtggtgaagagaaagtgcgagctgaccaacagcggcccctgcgccgagggcggcccaagcagcggcgcccctcctcccagcggcggcagcccagccggctccccaacctctaccgaggagggcacctctgagtccgccacccccgagagcggccctggcacctccaccgagcccagcgagggcagcgcacccggcagccctgccggcagccccacctccacagaggagggaaccagcaccgagcccagcgaaggcagcgccccaggcaccagcaccgagcctagtgagcaggagattaaacggatcaacaagatcagaagaagacttgtgaaagacagcaacaccaagaaggccggcaagacaggccccatgaaaaccctgctggttagagtgatgacacccgatctgagagagcggctggaaaacctgagaaagaagcctgaaaatatcccccagcccatcagcaatacatctagagccaacctgaataagctgctgaccgattacaccgaaatgaagaaggcgatcctgcatgtgtactgggaagagttccagaaggaccctgtgggcctgatgagccgggtggcccagcctgccagcaagaagatcgatcagaacaagctgaaacctgagatggacgagaagggcaacctgaccaccgccggctttgcctgctctcagtgtggccagcccctgttcgtgtacaagctggagcaggtgtctgagaagggcaaggcttacaccaactacttcggacggtgcaatgtggccgagcacgaaaagctgatcctgctggcccagctgaagcccgagaaggatagcgacgaagccgtgacatatagcctgggaaagtttgggcagagggccctggatttctacagcattcatgtgaccaaggagtccacccaccccgtgaagcccctggcccagatcgccggaaacagatacgcctccggacctgtgggaaaggccctgagcgacgcatgtatgggcacaatcgcctccttcctgtctaagtaccaggacatcatcatcgaacaccagaaggtggtgaagggcaaccagaagagactggagagcctgcgggagctggccggcaaggaaaacctggaataccctagcgtgaccctgccacctcagcctcacaccaaggagggcgttgatgcctacaacgaagtgatcgcccgggtgcgaatgtgggtgaacctgaacctgtggcagaagctgaagctaagcagagatgatgccaagcctctgctgagactgaagggattcccttcctttcctctggtcgagagacaggccaacgaagtggactggtgggacatggtgtgtaacgtgaagaagctgatcaacgagaaaaaggaggatggcaaggtgttttggcagaatctggctggctacaagagacaggaagccctgagaccatacctgagcagcgaggaagatcggaagaagggaaagaaattcgctcggtaccagctgggcgacctgctgctgcacctggaaaagaagcacggcgaggactggggaaaggtgtacgacgaggcctgggagcggattgacaagaaagtggaaggcctgagcaagcacatcaagctggaagaggaacggagaagcgaggacgcccagagcaaggccgccctgaccgactggctgcgggctaaggccagcttcgtgatcgagggcctgaaggaggccgacaaggacgagttctgcagatgcgagctgaagctgcagaagtggtacggggacctgcggggaaagcccttcgccatcgaagccgagaacagcatcctggacatcagcggcttcagcaagcagtacaactgtgccttcatctggcagaaggacggcgtgaagaagctgaacctgtacctgatcatcaactacttcaagggcggcaagctgcggttcaagaagatcaaacctgaagccttcgaagccaacagattctacaccgtgatcaacaaaaagagcggcgagatcgtgcccatggaggtgaacttcaacttcgacgaccccaacctgatcatcctgcctctggcctttggcaagagacagggcagagaattcatctggaacgacctgctgtccctggaaaccggcagcctgaagctggccaacggaagagtgatcgagaagacactgtacaacagaagaacccggcaggatgagcctgccctgttcgtggccctgaccttcgagcggcgggaggtcctggactcctccaatatcaaaccaatgaacctgatcggcgtggcaagaggcgaaaacatccccgccgtgatcgccctgaccgaccccgagggctgcccactgagccggtttaaggatagcctgggaaacccaacccacatcctgagaatcggcgagagctataaggagaagcagcggaccatccaggccaagaaggaggtggagcagcggagagccggcggctacagccggaagtacgccagcaaagccaagaatctggcagacgatatggtgagaaacaccgctagagatctgctgtactacgccgtgacccaggatgccatgctgatcttcgccaacctgagccggggcttcggccggcagggcaagcggaccttcatggccgagagacagtacacacggatggaggactggctgaccgccaagctggcctacgagggcctgagcaagacctacctgtccaagacactggcccagtacacctccaagacatgcagcaactgtgggtttaccatcaccagcgccgactacgacagggtgctggagaagctgaagaagacagcaacaggctggatgaccacaattaacggcaaggagctgaaggtggagggccagattacctactacaacagatacaagagacagaacgtagtcaaggacctgtccgtcgagctggatagactgagcgaagaatctgtgaacaacgacatctcctcctggacaaagggcagaagcggagaagctctgagcctcctgaagaaaagattctcccatagacccgtgcaggagaagttcgtgtgcctgaactgcggcttcgagacacacgcagccgagcaagccgccctgaacatcgccagatcctggctgttcctgcggagccaggagtacaagaaataccagacaaacaagacaaccggcaacaccgataagagagccttcgtcgagacctggcagtccttttaccggaagaagcttaaggaggtgtggaaacctgccgtgcggtctggcggatctggcggaggctccgccgagggccacgtgaccttcgaggacgtggccgtgtacttcagctgggaggagtggggcctgctggacgaggcccagaggctgctgtacagggacgtgatgctggagaacctggccctgatggccagcctgggcctggccagcagcaggacccacgagatcacccagctggagtggtggagggagcccttcctgcccccctgcggcgtggtgaccgccgccatgcccaggggctggaggaggggcggcccaagcagcggcgcccctcctcccagcggcggcagcccagccggctccccaacctctaccgaggagggcacctctgagtccgccacccccgagagcggccctggcacctccaccgagcccagcgagggcagcgcacccggcagccctgccggcagccccacctccacagaggagggaaccagcaccgagcccagcgaaggcagcgccccaggcaccagcaccgagcctagtgagcaggagattaaacggatcaacaagatcagaagaagacttgtgaaagacagcaacaccaagaaggccggcaagacaggccccatgaaaaccctgctggttagagtgatgacacccgatctgagagagcggctggaaaacctgagaaagaagcctgaaaatatcccccagcccatcagcaatacatctagagccaacctgaataagctgctgaccgattacaccgaaatgaagaaggcgatcctgcatgtgtactgggaagagttccagaaggaccctgtgggcctgatgagccgggtggcccagcctgccagcaagaagatcgatcagaacaagctgaaacctgagatggacgagaagggcaacctgaccaccgccggctttgcctgctctcagtgtggccagcccctgttcgtgtacaagctggagcaggtgtctgagaagggcaaggcttacaccaactacttcggacggtgcaatgtggccgagcacgaaaagctgatcctgctggcccagctgaagcccgagaaggatagcgacgaagccgtgacatatagcctgggaaagtttgggcagagggccctggatttctacagcattcatgtgaccaaggagtccacccaccccgtgaagcccctggcccagatcgccggaaacagatacgcctccggacctgtgggaaaggccctgagcgacgcatgtatgggcacaatcgcctccttcctgtctaagtaccaggacatcatcatcgaacaccagaaggtggtgaagggcaaccagaagagactggagagcctgcgggagctggccggcaaggaaaacctggaataccctagcgtgaccctgccacctcagcctcacaccaaggagggcgttgatgcctacaacgaagtgatcgcccgggtgcgaatgtgggtgaacctgaacctgtggcagaagctgaagctaagcagagatgatgccaagcctctgctgagactgaagggattcccttcctttcctctggtcgagagacaggccaacgaagtggactggtgggacatggtgtgtaacgtgaagaagctgatcaacgagaaaaaggaggatggcaaggtgttttggcagaatctggctggctacaagagacaggaagccctgagaccatacctgagcagcgaggaagatcggaagaagggaaagaaattcgctcggtaccagctgggcgacctgctgctgcacctggaaaagaagcacggcgaggactggggaaaggtgtacgacgaggcctgggagcggattgacaagaaagtggaaggcctgagcaagcacatcaagctggaagaggaacggagaagcgaggacgcccagagcaaggccgccctgaccgactggctgcgggctaaggccagcttcgtgatcgagggcctgaaggaggccgacaaggacgagttctgcagatgcgagctgaagctgcagaagtggtacggggacctgcggggaaagcccttcgccatcgaagccgagaacagcatcctggacatcagcggcttcagcaagcagtacaactgtgccttcatctggcagaaggacggcgtgaagaagctgaacctgtacctgatcatcaactacttcaagggcggcaagctgcggttcaagaagatcaaacctgaagccttcgaagccaacagattctacaccgtgatcaacaaaaagagcggcgagatcgtgcccatggaggtgaacttcaacttcgacgaccccaacctgatcatcctgcctctggcctttggcaagagacagggcagagaattcatctggaacgacctgctgtccctggaaaccggcagcctgaagctggccaacggaagagtgatcgagaagacactgtacaacagaagaacccggcaggatgagcctgccctgttcgtggccctgaccttcgagcggcgggaggtcctggactcctccaatatcaaaccaatgaacctgatcggcgtggcaagaggcgaaaacatccccgccgtgatcgccctgaccgaccccgagggctgcccactgagccggtttaaggatagcctgggaaacccaacccacatcctgagaatcggcgagagctataaggagaagcagcggaccatccaggccaagaaggaggtggagcagcggagagccggcggctacagccggaagtacgccagcaaagccaagaatctggcagacgatatggtgagaaacaccgctagagatctgctgtactacgccgtgacccaggatgccatgctgatcttcgccaacctgagccggggcttcggccggcagggcaagcggaccttcatggccgagagacagtacacacggatggaggactggctgaccgccaagctggcctacgagggcctgagcaagacctacctgtccaagacactggcccagtacacctccaagacatgcagcaactgtgggtttaccatcaccagcgccgactacgacagggtgctggagaagctgaagaagacagcaacaggctggatgaccacaattaacggcaaggagctgaaggtggagggccagattacctactacaacagatacaagagacagaacgtagtcaaggacctgtccgtcgagctggatagactgagcgaagaatctgtgaacaacgacatctcctcctggacaaagggcagaagcggagaagctctgagcctcctgaagaaaagattctcccatagacccgtgcaggagaagttcgtgtgcctgaactgcggcttcgagacacacgcagccgagcaagccgccctgaacatcgccagatcctggctgttcctgcggagccaggagtacaagaaataccagacaaacaagacaaccggcaacaccgataagagagccttcgtcgagacctggcagtccttttaccggaagaagcttaaggaggtgtggaaacctgccgtgcggtctggcggatctggcggaggctcctgccgagggccacgtgaccttcgaggacgtggccgtgtacttcagctgggaggagtggggcctgctggacgaggcccagaggctgctgtacagggacgtgatgctggagaacctggccctgatggccagcctgggcctggccagcagcaggacccacgagatcacccagctggagtggtggagggagcccttcctgcccccctgcggcgtggtgaccgccgccatgcccaggggctggaggaggggatctggctccggcagcggccccaagaaaaagagaaaagtctaagctgccttctgcggggcttgccttctggccatgcccttcttctctcccttgcacctgtacctcttggtctttgaataaagcctgagtaggaaggctagcaaaaaaaaaaaaaaaaaaaaaaaaaaaaaaaaaaaaaaaaaaaaaaaaaaaaaaaaaaaaaaaaaaaaaaaaaaaaaaaa

SEQ ID NO: 15755 - RNA, 9485 nt, synthetic construct
  source 1..9485: mol_type = other RNA
aggaaataagagagaaaagaagagtaagaagaaatataagagccaccatggcccctaagaagaagcgtaaagtgagccggatggaacgcctcgtctacgaggtgcggcagaagtgcagaaacatcgaggacatctgcatctcctgcggatctctgaacgtgaccctggagcacccactgttcatcggcggcatgtgccagaactgtaaaaactgttttctggagtgtgcctatcaatacgacgatgacggctaccagagctactgcaccatctgttgcggcggaagagaggtgctgatgtgtggaaataacaactgctgccggtgcttctgcgtggaatgcgtggacctgctggtgggccccggcgccgcccaggccgctattaaggaagatccttggaactgctacatgtgcggccacaagggcacatacggcctgctgagacggagagaggactggcctagcagactgcagatgttcttcgccaataaccacgaccaggagttcgacccccctaaggtgtaccctcccgtccccgccgagaagagaaagcccatccgggtcctgagcctgttcgatggcatcgccaccggtctgctggtgctgaaggacctgggcatccaggtggataggtacattgcctccgaggtgtgcgaggactccatcaccgtgggaatggtgcgtcatcagggcaagatcatgtacgtgggcgacgtgcggagcgtgacacagaagcatatccaggagtggggccctttcgacctggtgatcggcggcagcccttgcaatgacctgagcatcgtgaacccagcccggaagggcctgtacgagggaaccggcagactgttcttcgagttttacagactgctgcacgacgcccggcctaaggaaggcgacgaccggcccttcttttggctgttcgagaatgtggtggccatgggagtcagcgacaagcgggatattagccggttcctggagagcaaccccgtgatgatcgatgccaaggaagtgagcgccgcccaccgggccagatacttctggggcaatctgcctggcatgaacagacccctggccagcaccgtgaacgacaagctggagctgcaggagtgcctggagcacggccggatcgccaagttcagcaaggtgagaaccatcaccacccgaagcaacagcatcaaacaaggcaaggaccagcactttcctgtgttcatgaacgagaaggaggacatcctgtggtgtaccgagatggagagagtgttcgggttcccagtccactacacagatgtcagcaacatgtctagactggccagacagagactgctgggaagaagctggtccgtccctgtgatcagacacctgttcgcccctctgaaggagtacttcgcctgcgtgagcagcggcaacagcaacgccaacagccggggccccagcttctctagcggcctggtgccactgtccctgagagggagccacatgggccccatggagatctacaaaaccgtgagcgcctggaagcggcagcctgtgcgcgtgctgagcctgtttcggaatatcgataaagtcctgaaaagcctgggattcctggagagcggctctggctccggcggtggcaccctgaagtacgtggaggatgtgacaaacgtggtcagacgggatgtggagaagtggggccccttcgatctggtgtacggcagcacccaacccctgggcagctcttgtgaccggtgccctggctggtacatgtttcagttccaccggatcctgcagtacgccctgccgagacaggagtcccagcggccattcttttggattttcatggacaacttgctgctgaccgaggatgaccaggaaactaccactcggttcctgcagaccgaagccgtgaccctgcaggacgtgagaggccgggactaccagaacgccatgcgggtgtggtccaacatccctggactgaaaagcaagcacgcacctctgacccctaaagaagaggagtacctgcaggcccaggtgcggagcagaagcaagctggacgcccctaaggtggatctgctggtgaagaattgcctcctgcccctgagagagtacttcaagtatttcagccagaatagtctgcccctgggaggcagcggcggcggcgccctggtgacatttgaggacgtcgccgtgcggttcacccaggaggaatgggctctgctggatccttctcagaaaatcctgtaccgggacgtgatgagagagacataccggaatctgacctccgtgggcatcaactgggaatgttgggaccttgaagcctgcttcagaagcctgggaagaaacctgagagtgcaggtggtgaagagaaagtgcgagctgaccaacagcggcccctgcgccgagggcggcccaagcagcggcgcccctcctcccagcggcggcagcccagccggctccccaacctctaccgaggagggcacctctgagtccgccacccccgagagcggccctggcacctccaccgagcccagcgagggcagcgcacccggcagccctgccggcagccccacctccacagaggagggaaccagcaccgagcccagcgaaggcagcgccccaggcaccagcaccgagcctagtgagcaggagattaaacggatcaacaagatcagaagaagacttgtgaaagacagcaacaccaagaaggccggcaagacaggccccatgaaaaccctgctggttagagtgatgacacccgatctgagagagcggctggaaaacctgagaaagaagcctgaaaatatcccccagcccatcagcaatacatctagagccaacctgaataagctgctgaccgattacaccgaaatgaagaaggcgatcctgcatgtgtactgggaagagttccagaaggaccctgtgggcctgatgagccgggtggcccagcctgccagcaagaagatcgatcagaacaagctgaaacctgagatggacgagaagggcaacctgaccaccgccggctttgcctgctctcagtgtggccagcccctgttcgtgtacaagctggagcaggtgtctgagaagggcaaggcttacaccaactacttcggacggtgcaatgtggccgagcacgaaaagctgatcctgctggcccagctgaagcccgagaaggatagcgacgaagccgtgacatatagcctgggaaagtttgggcagagggccctggatttctacagcattcatgtgaccaaggagtccacccaccccgtgaagcccctggcccagatcgccggaaacagatacgcctccggacctgtgggaaaggccctgagcgacgcatgtatgggcacaatcgcctccttcctgtctaagtaccaggacatcatcatcgaacaccagaaggtggtgaagggcaaccagaagagactggagagcctgcgggagctggccggcaaggaaaacctggaataccctagcgtgaccctgccacctcagcctcacaccaaggagggcgttgatgcctacaacgaagtgatcgcccgggtgcgaatgtgggtgaacctgaacctgtggcagaagctgaagctaagcagagatgatgccaagcctctgctgagactgaagggattcccttcctttcctctggtcgagagacaggccaacgaagtggactggtgggacatggtgtgtaacgtgaagaagctgatcaacgagaaaaaggaggatggcaaggtgttttggcagaatctggctggctacaagagacaggaagccctgagaccatacctgagcagcgaggaagatcggaagaagggaaagaaattcgctcggtaccagctgggcgacctgctgctgcacctggaaaagaagcacggcgaggactggggaaaggtgtacgacgaggcctgggagcggattgacaagaaagtggaaggcctgagcaagcacatcaagctggaagaggaacggagaagcgaggacgcccagagcaaggccgccctgaccgactggctgcgggctaaggccagcttcgtgatcgagggcctgaaggaggccgacaaggacgagttctgcagatgcgagctgaagctgcagaagtggtacggggacctgcggggaaagcccttcgccatcgaagccgagaacagcatcctggacatcagcggcttcagcaagcagtacaactgtgccttcatctggcagaaggacggcgtgaagaagctgaacctgtacctgatcatcaactacttcaagggcggcaagctgcggttcaagaagatcaaacctgaagccttcgaagccaacagattctacaccgtgatcaacaaaaagagcggcgagatcgtgcccatggaggtgaacttcaacttcgacgaccccaacctgatcatcctgcctctggcctttggcaagagacagggcagagaattcatctggaacgacctgctgtccctggaaaccggcagcctgaagctggccaacggaagagtgatcgagaagacactgtacaacagaagaacccggcaggatgagcctgccctgttcgtggccctgaccttcgagcggcgggaggtcctggactcctccaatatcaaaccaatgaacctgatcggcgtggcaagaggcgaaaacatccccgccgtgatcgccctgaccgaccccgagggctgcccactgagccggtttaaggatagcctgggaaacccaacccacatcctgagaatcggcgagagctataaggagaagcagcggaccatccaggccaagaaggaggtggagcagcggagagccggcggctacagccggaagtacgccagcaaagccaagaatctggcagacgatatggtgagaaacaccgctagagatctgctgtactacgccgtgacccaggatgccatgctgatcttcgccaacctgagccggggcttcggccggcagggcaagcggaccttcatggccgagagacagtacacacggatggaggactggctgaccgccaagctggcctacgagggcctgagcaagacctacctgtccaagacactggcccagtacacctccaagacatgcagcaactgtgggtttaccatcaccagcgccgactacgacagggtgctggagaagctgaagaagacagcaacaggctggatgaccacaattaacggcaaggagctgaaggtggagggccagattacctactacaacagatacaagagacagaacgtagtcaaggacctgtccgtcgagctggatagactgagcgaagaatctgtgaacaacgacatctcctcctggacaaagggcagaagcggagaagctctgagcctcctgaagaaaagattctcccatagacccgtgcaggagaagttcgtgtgcctgaactgcggcttcgagacacacgcagccgagcaagccgccctgaacatcgccagatcctggctgttcctgcggagccaggagtacaagaaataccagacaaacaagacaaccggcaacaccgataagagagccttcgtcgagacctggcagtccttttaccggaagaagcttaaggaggtgtggaaacctgccgtgcggtctggcggatctggcggaggctccccccaggacctggtgaccttcaaggacgtggccatcgacttcagccaggaggagtgggagtggctgaaccccgcccagaggagcctgtacaggagcatgatgctggagaactaccagagcctggtgagcgtgggcctgtgcgtgagcaagccctacgtgatcagcctgctggagcagggcaaggagccctgggagatgaagagcgagatgaggaggacccccttccccgactgggagagcgtgggcggcccaagcagcggcgcccctcctcccagcggcggcagcccagccggctccccaacctctaccgaggagggcacctctgagtccgccacccccgagagcggccctggcacctccaccgagcccagcgagggcagcgcacccggcagccctgccggcagccccacctccacagaggagggaaccagcaccgagcccagcgaaggcagcgccccaggcaccagcaccgagcctagtgagcaggagattaaacggatcaacaagatcagaagaagacttgtgaaagacagcaacaccaagaaggccggcaagacaggccccatgaaaaccctgctggttagagtgatgacacccgatctgagagagcggctggaaaacctgagaaagaagcctgaaaatatcccccagcccatcagcaatacatctagagccaacctgaataagctgctgaccgattacaccgaaatgaagaaggcgatcctgcatgtgtactgggaagagttccagaaggaccctgtgggcctgatgagccgggtggcccagcctgccagcaagaagatcgatcagaacaagctgaaacctgagatggacgagaagggcaacctgaccaccgccggctttgcctgctctcagtgtggccagcccctgttcgtgtacaagctggagcaggtgtctgagaagggcaaggcttacaccaactacttcggacggtgcaatgtggccgagcacgaaaagctgatcctgctggcccagctgaagcccgagaaggatagcgacgaagccgtgacatatagcctgggaaagtttgggcagagggccctggatttctacagcattcatgtgaccaaggagtccacccaccccgtgaagcccctggcccagatcgccggaaacagatacgcctccggacctgtgggaaaggccctgagcgacgcatgtatgggcacaatcgcctccttcctgtctaagtaccaggacatcatcatcgaacaccagaaggtggtgaagggcaaccagaagagactggagagcctgcgggagctggccggcaaggaaaacctggaataccctagcgtgaccctgccacctcagcctcacaccaaggagggcgttgatgcctacaacgaagtgatcgcccgggtgcgaatgtgggtgaacctgaacctgtggcagaagctgaagctaagcagagatgatgccaagcctctgctgagactgaagggattcccttcctttcctctggtcgagagacaggccaacgaagtggactggtgggacatggtgtgtaacgtgaagaagctgatcaacgagaaaaaggaggatggcaaggtgttttggcagaatctggctggctacaagagacaggaagccctgagaccatacctgagcagcgaggaagatcggaagaagggaaagaaattcgctcggtaccagctgggcgacctgctgctgcacctggaaaagaagcacggcgaggactggggaaaggtgtacgacgaggcctgggagcggattgacaagaaagtggaaggcctgagcaagcacatcaagctggaagaggaacggagaagcgaggacgcccagagcaaggccgccctgaccgactggctgcgggctaaggccagcttcgtgatcgagggcctgaaggaggccgacaaggacgagttctgcagatgcgagctgaagctgcagaagtggtacggggacctgcggggaaagcccttcgccatcgaagccgagaacagcatcctggacatcagcggcttcagcaagcagtacaactgtgccttcatctggcagaaggacggcgtgaagaagctgaacctgtacctgatcatcaactacttcaagggcggcaagctgcggttcaagaagatcaaacctgaagccttcgaagccaacagattctacaccgtgatcaacaaaaagagcggcgagatcgtgcccatggaggtgaacttcaacttcgacgaccccaacctgatcatcctgcctctggcctttggcaagagacagggcagagaattcatctggaacgacctgctgtccctggaaaccggcagcctgaagctggccaacggaagagtgatcgagaagacactgtacaacagaagaacccggcaggatgagcctgccctgttcgtggccctgaccttcgagcggcgggaggtcctggactcctccaatatcaaaccaatgaacctgatcggcgtggcaagaggcgaaaacatccccgccgtgatcgccctgaccgaccccgagggctgcccactgagccggtttaaggatagcctgggaaacccaacccacatcctgagaatcggcgagagctataaggagaagcagcggaccatccaggccaagaaggaggtggagcagcggagagccggcggctacagccggaagtacgccagcaaagccaagaatctggcagacgatatggtgagaaacaccgctagagatctgctgtactacgccgtgacccaggatgccatgctgatcttcgccaacctgagccggggcttcggccggcagggcaagcggaccttcatggccgagagacagtacacacggatggaggactggctgaccgccaagctggcctacgagggcctgagcaagacctacctgtccaagacactggcccagtacacctccaagacatgcagcaactgtgggtttaccatcaccagcgccgactacgacagggtgctggagaagctgaagaagacagcaacaggctggatgaccacaattaacggcaaggagctgaaggtggagggccagattacctactacaacagatacaagagacagaacgtagtcaaggacctgtccgtcgagctggatagactgagcgaagaatctgtgaacaacgacatctcctcctggacaaagggcagaagcggagaagctctgagcctcctgaagaaaagattctcccatagacccgtgcaggagaagttcgtgtgcctgaactgcggcttcgagacacacgcagccgagcaagccgccctgaacatcgccagatcctggctgttcctgcggagccaggagtacaagaaataccagacaaacaagacaaccggcaacaccgataagagagccttcgtcgagacctggcagtccttttaccggaagaagcttaaggaggtgtggaaacctgccgtgcggtctggcggatctggcggaggctcctccccaggacctggtgaccttcaaggacgtggccatcgacttcagccaggaggagtgggagtggctgaaccccgcccagaggagcctgtacaggagcatgatgctggagaactaccagagcctggtgagcgtgggcctgtgcgtgagcaagccctacgtgatcagcctgctggagcagggcaaggagccctgggagatgaagagcgagatgaggaggacccccttccccgactgggagagcgtgggatctggctccggcagcggccccaagaaaaagagaaaagtctaagctgccttctgcggggcttgccttctggccatgcccttcttctctcccttgcacctgtacctcttggtctttgaataaagcctgagtaggaaggctagcaaaaaaaaaaaaaaaaaaaaaaaaaaaaaaaaaaaaaaaaaaaaaaaaaaaaaaaaaaaaaaaaaaaaaaaaaaaaaaaa

SEQ ID NO: 15756 - RNA, 9485 nt, synthetic construct
  source 1..9485: mol_type = other RNA
aggaaataagagagaaaagaagagtaagaagaaatataagagccaccatggcccctaagaagaagcgtaaagtgagccggatggaacgcctcgtctacgaggtgcggcagaagtgcagaaacatcgaggacatctgcatctcctgcggatctctgaacgtgaccctggagcacccactgttcatcggcggcatgtgccagaactgtaaaaactgttttctggagtgtgcctatcaatacgacgatgacggctaccagagctactgcaccatctgttgcggcggaagagaggtgctgatgtgtggaaataacaactgctgccggtgcttctgcgtggaatgcgtggacctgctggtgggccccggcgccgcccaggccgctattaaggaagatccttggaactgctacatgtgcggccacaagggcacatacggcctgctgagacggagagaggactggcctagcagactgcagatgttcttcgccaataaccacgaccaggagttcgacccccctaaggtgtaccctcccgtccccgccgagaagagaaagcccatccgggtcctgagcctgttcgatggcatcgccaccggtctgctggtgctgaaggacctgggcatccaggtggataggtacattgcctccgaggtgtgcgaggactccatcaccgtgggaatggtgcgtcatcagggcaagatcatgtacgtgggcgacgtgcggagcgtgacacagaagcatatccaggagtggggccctttcgacctggtgatcggcggcagcccttgcaatgacctgagcatcgtgaacccagcccggaagggcctgtacgagggaaccggcagactgttcttcgagttttacagactgctgcacgacgcccggcctaaggaaggcgacgaccggcccttcttttggctgttcgagaatgtggtggccatgggagtcagcgacaagcgggatattagccggttcctggagagcaaccccgtgatgatcgatgccaaggaagtgagcgccgcccaccgggccagatacttctggggcaatctgcctggcatgaacagacccctggccagcaccgtgaacgacaagctggagctgcaggagtgcctggagcacggccggatcgccaagttcagcaaggtgagaaccatcaccacccgaagcaacagcatcaaacaaggcaaggaccagcactttcctgtgttcatgaacgagaaggaggacatcctgtggtgtaccgagatggagagagtgttcgggttcccagtccactacacagatgtcagcaacatgtctagactggccagacagagactgctgggaagaagctggtccgtccctgtgatcagacacctgttcgcccctctgaaggagtacttcgcctgcgtgagcagcggcaacagcaacgccaacagccggggccccagcttctctagcggcctggtgccactgtccctgagagggagccacatgggccccatggagatctacaaaaccgtgagcgcctggaagcggcagcctgtgcgcgtgctgagcctgtttcggaatatcgataaagtcctgaaaagcctgggattcctggagagcggctctggctccggcggtggcaccctgaagtacgtggaggatgtgacaaacgtggtcagacgggatgtggagaagtggggccccttcgatctggtgtacggcagcacccaacccctgggcagctcttgtgaccggtgccctggctggtacatgtttcagttccaccggatcctgcagtacgccctgccgagacaggagtcccagcggccattcttttggattttcatggacaacttgctgctgaccgaggatgaccaggaaactaccactcggttcctgcagaccgaagccgtgaccctgcaggacgtgagaggccgggactaccagaacgccatgcgggtgtggtccaacatccctggactgaaaagcaagcacgcacctctgacccctaaagaagaggagtacctgcaggcccaggtgcggagcagaagcaagctggacgcccctaaggtggatctgctggtgaagaattgcctcctgcccctgagagagtacttcaagtatttcagccagaatagtctgcccctgggaggcagcggcggcggcgccctggtgacatttgaggacgtcgccgtgcggttcacccaggaggaatgggctctgctggatccttctcagaaaatcctgtaccgggacgtgatgagagagacataccggaatctgacctccgtgggcatcaactgggaatgttgggaccttgaagcctgcttcagaagcctgggaagaaacctgagagtgcaggtggtgaagagaaagtgcgagctgaccaacagcggcccctgcgccgagggcggcccaagcagcggcgcccctcctcccagcggcggcagcccagccggctccccaacctctaccgaggagggcacctctgagtccgccacccccgagagcggccctggcacctccaccgagcccagcgagggcagcgcacccggcagccctgccggcagccccacctccacagaggagggaaccagcaccgagcccagcgaaggcagcgccccaggcaccagcaccgagcctagtgagcaggagattaaacggatcaacaagatcagaagaagacttgtgaaagacagcaacaccaagaaggccggcaagacaggccccatgaaaaccctgctggttagagtgatgacacccgatctgagagagcggctggaaaacctgagaaagaagcctgaaaatatcccccagcccatcagcaatacatctagagccaacctgaataagctgctgaccgattacaccgaaatgaagaaggcgatcctgcatgtgtactgggaagagttccagaaggaccctgtgggcctgatgagccgggtggcccagcctgccagcaagaagatcgatcagaacaagctgaaacctgagatggacgagaagggcaacctgaccaccgccggctttgcctgctctcagtgtggccagcccctgttcgtgtacaagctggagcaggtgtctgagaagggcaaggcttacaccaactacttcggacggtgcaatgtggccgagcacgaaaagctgatcctgctggcccagctgaagcccgagaaggatagcgacgaagccgtgacatatagcctgggaaagtttgggcagagggccctggatttctacagcattcatgtgaccaaggagtccacccaccccgtgaagcccctggcccagatcgccggaaacagatacgcctccggacctgtgggaaaggccctgagcgacgcatgtatgggcacaatcgcctccttcctgtctaagtaccaggacatcatcatcgaacaccagaaggtggtgaagggcaaccagaagagactggagagcctgcgggagctggccggcaaggaaaacctggaataccctagcgtgaccctgccacctcagcctcacaccaaggagggcgttgatgcctacaacgaagtgatcgcccgggtgcgaatgtgggtgaacctgaacctgtggcagaagctgaagctaagcagagatgatgccaagcctctgctgagactgaagggattcccttcctttcctctggtcgagagacaggccaacgaagtggactggtgggacatggtgtgtaacgtgaagaagctgatcaacgagaaaaaggaggatggcaaggtgttttggcagaatctggctggctacaagagacaggaagccctgagaccatacctgagcagcgaggaagatcggaagaagggaaagaaattcgctcggtaccagctgggcgacctgctgctgcacctggaaaagaagcacggcgaggactggggaaaggtgtacgacgaggcctgggagcggattgacaagaaagtggaaggcctgagcaagcacatcaagctggaagaggaacggagaagcgaggacgcccagagcaaggccgccctgaccgactggctgcgggctaaggccagcttcgtgatcgagggcctgaaggaggccgacaaggacgagttctgcagatgcgagctgaagctgcagaagtggtacggggacctgcggggaaagcccttcgccatcgaagccgagaacagcatcctggacatcagcggcttcagcaagcagtacaactgtgccttcatctggcagaaggacggcgtgaagaagctgaacctgtacctgatcatcaactacttcaagggcggcaagctgcggttcaagaagatcaaacctgaagccttcgaagccaacagattctacaccgtgatcaacaaaaagagcggcgagatcgtgcccatggaggtgaacttcaacttcgacgaccccaacctgatcatcctgcctctggcctttggcaagagacagggcagagaattcatctggaacgacctgctgtccctggaaaccggcagcctgaagctggccaacggaagagtgatcgagaagacactgtacaacagaagaacccggcaggatgagcctgccctgttcgtggccctgaccttcgagcggcgggaggtcctggactcctccaatatcaaaccaatgaacctgatcggcgtggcaagaggcgaaaacatccccgccgtgatcgccctgaccgaccccgagggctgcccactgagccggtttaaggatagcctgggaaacccaacccacatcctgagaatcggcgagagctataaggagaagcagcggaccatccaggccaagaaggaggtggagcagcggagagccggcggctacagccggaagtacgccagcaaagccaagaatctggcagacgatatggtgagaaacaccgctagagatctgctgtactacgccgtgacccaggatgccatgctgatcttcgccaacctgagccggggcttcggccggcagggcaagcggaccttcatggccgagagacagtacacacggatggaggactggctgaccgccaagctggcctacgagggcctgagcaagacctacctgtccaagacactggcccagtacacctccaagacatgcagcaactgtgggtttaccatcaccagcgccgactacgacagggtgctggagaagctgaagaagacagcaacaggctggatgaccacaattaacggcaaggagctgaaggtggagggccagattacctactacaacagatacaagagacagaacgtagtcaaggacctgtccgtcgagctggatagactgagcgaagaatctgtgaacaacgacatctcctcctggacaaagggcagaagcggagaagctctgagcctcctgaagaaaagattctcccatagacccgtgcaggagaagttcgtgtgcctgaactgcggcttcgagacacacgcagccgagcaagccgccctgaacatcgccagatcctggctgttcctgcggagccaggagtacaagaaataccagacaaacaagacaaccggcaacaccgataagagagccttcgtcgagacctggcagtccttttaccggaagaagcttaaggaggtgtggaaacctgccgtgcggtctggcggatctggcggaggctccttccagggcagcatcagcttcaaggacgtgaccgtgggcttcagccaggaggagtggcagcacctgaaccccagccagagggccctgtacagggacgtgatgctggagaactacagcaacctggtgagcgtgggctactgcgtgcacaagcccgaggtgatcagcaggctggagcagggcgaggagccctggaggctggaggaggagttccccagccagagcttcagcgaggtgtggaccgccggcggcccaagcagcggcgcccctcctcccagcggcggcagcccagccggctccccaacctctaccgaggagggcacctctgagtccgccacccccgagagcggccctggcacctccaccgagcccagcgagggcagcgcacccggcagccctgccggcagccccacctccacagaggagggaaccagcaccgagcccagcgaaggcagcgccccaggcaccagcaccgagcctagtgagcaggagattaaacggatcaacaagatcagaagaagacttgtgaaagacagcaacaccaagaaggccggcaagacaggccccatgaaaaccctgctggttagagtgatgacacccgatctgagagagcggctggaaaacctgagaaagaagcctgaaaatatcccccagcccatcagcaatacatctagagccaacctgaataagctgctgaccgattacaccgaaatgaagaaggcgatcctgcatgtgtactgggaagagttccagaaggaccctgtgggcctgatgagccgggtggcccagcctgccagcaagaagatcgatcagaacaagctgaaacctgagatggacgagaagggcaacctgaccaccgccggctttgcctgctctcagtgtggccagcccctgttcgtgtacaagctggagcaggtgtctgagaagggcaaggcttacaccaactacttcggacggtgcaatgtggccgagcacgaaaagctgatcctgctggcccagctgaagcccgagaaggatagcgacgaagccgtgacatatagcctgggaaagtttgggcagagggccctggatttctacagcattcatgtgaccaaggagtccacccaccccgtgaagcccctggcccagatcgccggaaacagatacgcctccggacctgtgggaaaggccctgagcgacgcatgtatgggcacaatcgcctccttcctgtctaagtaccaggacatcatcatcgaacaccagaaggtggtgaagggcaaccagaagagactggagagcctgcgggagctggccggcaaggaaaacctggaataccctagcgtgaccctgccacctcagcctcacaccaaggagggcgttgatgcctacaacgaagtgatcgcccgggtgcgaatgtgggtgaacctgaacctgtggcagaagctgaagctaagcagagatgatgccaagcctctgctgagactgaagggattcccttcctttcctctggtcgagagacaggccaacgaagtggactggtgggacatggtgtgtaacgtgaagaagctgatcaacgagaaaaaggaggatggcaaggtgttttggcagaatctggctggctacaagagacaggaagccctgagaccatacctgagcagcgaggaagatcggaagaagggaaagaaattcgctcggtaccagctgggcgacctgctgctgcacctggaaaagaagcacggcgaggactggggaaaggtgtacgacgaggcctgggagcggattgacaagaaagtggaaggcctgagcaagcacatcaagctggaagaggaacggagaagcgaggacgcccagagcaaggccgccctgaccgactggctgcgggctaaggccagcttcgtgatcgagggcctgaaggaggccgacaaggacgagttctgcagatgcgagctgaagctgcagaagtggtacggggacctgcggggaaagcccttcgccatcgaagccgagaacagcatcctggacatcagcggcttcagcaagcagtacaactgtgccttcatctggcagaaggacggcgtgaagaagctgaacctgtacctgatcatcaactacttcaagggcggcaagctgcggttcaagaagatcaaacctgaagccttcgaagccaacagattctacaccgtgatcaacaaaaagagcggcgagatcgtgcccatggaggtgaacttcaacttcgacgaccccaacctgatcatcctgcctctggcctttggcaagagacagggcagagaattcatctggaacgacctgctgtccctggaaaccggcagcctgaagctggccaacggaagagtgatcgagaagacactgtacaacagaagaacccggcaggatgagcctgccctgttcgtggccctgaccttcgagcggcgggaggtcctggactcctccaatatcaaaccaatgaacctgatcggcgtggcaagaggcgaaaacatccccgccgtgatcgccctgaccgaccccgagggctgcccactgagccggtttaaggatagcctgggaaacccaacccacatcctgagaatcggcgagagctataaggagaagcagcggaccatccaggccaagaaggaggtggagcagcggagagccggcggctacagccggaagtacgccagcaaagccaagaatctggcagacgatatggtgagaaacaccgctagagatctgctgtactacgccgtgacccaggatgccatgctgatcttcgccaacctgagccggggcttcggccggcagggcaagcggaccttcatggccgagagacagtacacacggatggaggactggctgaccgccaagctggcctacgagggcctgagcaagacctacctgtccaagacactggcccagtacacctccaagacatgcagcaactgtgggtttaccatcaccagcgccgactacgacagggtgctggagaagctgaagaagacagcaacaggctggatgaccacaattaacggcaaggagctgaaggtggagggccagattacctactacaacagatacaagagacagaacgtagtcaaggacctgtccgtcgagctggatagactgagcgaagaatctgtgaacaacgacatctcctcctggacaaagggcagaagcggagaagctctgagcctcctgaagaaaagattctcccatagacccgtgcaggagaagttcgtgtgcctgaactgcggcttcgagacacacgcagccgagcaagccgccctgaacatcgccagatcctggctgttcctgcggagccaggagtacaagaaataccagacaaacaagacaaccggcaacaccgataagagagccttcgtcgagacctggcagtccttttaccggaagaagcttaaggaggtgtggaaacctgccgtgcggtctggcggatctggcggaggctcctttccagggcagcatcagcttcaaggacgtgaccgtgggcttcagccaggaggagtggcagcacctgaaccccagccagagggccctgtacagggacgtgatgctggagaactacagcaacctggtgagcgtgggctactgcgtgcacaagcccgaggtgatcagcaggctggagcagggcgaggagccctggaggctggaggaggagttccccagccagagcttcagcgaggtgtggaccgccggatctggctccggcagcggccccaagaaaaagagaaaagtctaagctgccttctgcggggcttgccttctggccatgcccttcttctctcccttgcacctgtacctcttggtctttgaataaagcctgagtaggaaggctagcaaaaaaaaaaaaaaaaaaaaaaaaaaaaaaaaaaaaaaaaaaaaaaaaaaaaaaaaaaaaaaaaaaaaaaaaaaaaaaaa

SEQ ID NO: 15757 - RNA, 9485 nt, synthetic construct
  source 1..9485: mol_type = other RNA
aggaaataagagagaaaagaagagtaagaagaaatataagagccaccatggcccctaagaagaagcgtaaagtgagccggatggaacgcctcgtctacgaggtgcggcagaagtgcagaaacatcgaggacatctgcatctcctgcggatctctgaacgtgaccctggagcacccactgttcatcggcggcatgtgccagaactgtaaaaactgttttctggagtgtgcctatcaatacgacgatgacggctaccagagctactgcaccatctgttgcggcggaagagaggtgctgatgtgtggaaataacaactgctgccggtgcttctgcgtggaatgcgtggacctgctggtgggccccggcgccgcccaggccgctattaaggaagatccttggaactgctacatgtgcggccacaagggcacatacggcctgctgagacggagagaggactggcctagcagactgcagatgttcttcgccaataaccacgaccaggagttcgacccccctaaggtgtaccctcccgtccccgccgagaagagaaagcccatccgggtcctgagcctgttcgatggcatcgccaccggtctgctggtgctgaaggacctgggcatccaggtggataggtacattgcctccgaggtgtgcgaggactccatcaccgtgggaatggtgcgtcatcagggcaagatcatgtacgtgggcgacgtgcggagcgtgacacagaagcatatccaggagtggggccctttcgacctggtgatcggcggcagcccttgcaatgacctgagcatcgtgaacccagcccggaagggcctgtacgagggaaccggcagactgttcttcgagttttacagactgctgcacgacgcccggcctaaggaaggcgacgaccggcccttcttttggctgttcgagaatgtggtggccatgggagtcagcgacaagcgggatattagccggttcctggagagcaaccccgtgatgatcgatgccaaggaagtgagcgccgcccaccgggccagatacttctggggcaatctgcctggcatgaacagacccctggccagcaccgtgaacgacaagctggagctgcaggagtgcctggagcacggccggatcgccaagttcagcaaggtgagaaccatcaccacccgaagcaacagcatcaaacaaggcaaggaccagcactttcctgtgttcatgaacgagaaggaggacatcctgtggtgtaccgagatggagagagtgttcgggttcccagtccactacacagatgtcagcaacatgtctagactggccagacagagactgctgggaagaagctggtccgtccctgtgatcagacacctgttcgcccctctgaaggagtacttcgcctgcgtgagcagcggcaacagcaacgccaacagccggggccccagcttctctagcggcctggtgccactgtccctgagagggagccacatgggccccatggagatctacaaaaccgtgagcgcctggaagcggcagcctgtgcgcgtgctgagcctgtttcggaatatcgataaagtcctgaaaagcctgggattcctggagagcggctctggctccggcggtggcaccctgaagtacgtggaggatgtgacaaacgtggtcagacgggatgtggagaagtggggccccttcgatctggtgtacggcagcacccaacccctgggcagctcttgtgaccggtgccctggctggtacatgtttcagttccaccggatcctgcagtacgccctgccgagacaggagtcccagcggccattcttttggattttcatggacaacttgctgctgaccgaggatgaccaggaaactaccactcggttcctgcagaccgaagccgtgaccctgcaggacgtgagaggccgggactaccagaacgccatgcgggtgtggtccaacatccctggactgaaaagcaagcacgcacctctgacccctaaagaagaggagtacctgcaggcccaggtgcggagcagaagcaagctggacgcccctaaggtggatctgctggtgaagaattgcctcctgcccctgagagagtacttcaagtatttcagccagaatagtctgcccctgggaggcagcggcggcggcgccctggtgacatttgaggacgtcgccgtgcggttcacccaggaggaatgggctctgctggatccttctcagaaaatcctgtaccgggacgtgatgagagagacataccggaatctgacctccgtgggcatcaactgggaatgttgggaccttgaagcctgcttcagaagcctgggaagaaacctgagagtgcaggtggtgaagagaaagtgcgagctgaccaacagcggcccctgcgccgagggcggcccaagcagcggcgcccctcctcccagcggcggcagcccagccggctccccaacctctaccgaggagggcacctctgagtccgccacccccgagagcggccctggcacctccaccgagcccagcgagggcagcgcacccggcagccctgccggcagccccacctccacagaggagggaaccagcaccgagcccagcgaaggcagcgccccaggcaccagcaccgagcctagtgagcaggagattaaacggatcaacaagatcagaagaagacttgtgaaagacagcaacaccaagaaggccggcaagacaggccccatgaaaaccctgctggttagagtgatgacacccgatctgagagagcggctggaaaacctgagaaagaagcctgaaaatatcccccagcccatcagcaatacatctagagccaacctgaataagctgctgaccgattacaccgaaatgaagaaggcgatcctgcatgtgtactgggaagagttccagaaggaccctgtgggcctgatgagccgggtggcccagcctgccagcaagaagatcgatcagaacaagctgaaacctgagatggacgagaagggcaacctgaccaccgccggctttgcctgctctcagtgtggccagcccctgttcgtgtacaagctggagcaggtgtctgagaagggcaaggcttacaccaactacttcggacggtgcaatgtggccgagcacgaaaagctgatcctgctggcccagctgaagcccgagaaggatagcgacgaagccgtgacatatagcctgggaaagtttgggcagagggccctggatttctacagcattcatgtgaccaaggagtccacccaccccgtgaagcccctggcccagatcgccggaaacagatacgcctccggacctgtgggaaaggccctgagcgacgcatgtatgggcacaatcgcctccttcctgtctaagtaccaggacatcatcatcgaacaccagaaggtggtgaagggcaaccagaagagactggagagcctgcgggagctggccggcaaggaaaacctggaataccctagcgtgaccctgccacctcagcctcacaccaaggagggcgttgatgcctacaacgaagtgatcgcccgggtgcgaatgtgggtgaacctgaacctgtggcagaagctgaagctaagcagagatgatgccaagcctctgctgagactgaagggattcccttcctttcctctggtcgagagacaggccaacgaagtggactggtgggacatggtgtgtaacgtgaagaagctgatcaacgagaaaaaggaggatggcaaggtgttttggcagaatctggctggctacaagagacaggaagccctgagaccatacctgagcagcgaggaagatcggaagaagggaaagaaattcgctcggtaccagctgggcgacctgctgctgcacctggaaaagaagcacggcgaggactggggaaaggtgtacgacgaggcctgggagcggattgacaagaaagtggaaggcctgagcaagcacatcaagctggaagaggaacggagaagcgaggacgcccagagcaaggccgccctgaccgactggctgcgggctaaggccagcttcgtgatcgagggcctgaaggaggccgacaaggacgagttctgcagatgcgagctgaagctgcagaagtggtacggggacctgcggggaaagcccttcgccatcgaagccgagaacagcatcctggacatcagcggcttcagcaagcagtacaactgtgccttcatctggcagaaggacggcgtgaagaagctgaacctgtacctgatcatcaactacttcaagggcggcaagctgcggttcaagaagatcaaacctgaagccttcgaagccaacagattctacaccgtgatcaacaaaaagagcggcgagatcgtgcccatggaggtgaacttcaacttcgacgaccccaacctgatcatcctgcctctggcctttggcaagagacagggcagagaattcatctggaacgacctgctgtccctggaaaccggcagcctgaagctggccaacggaagagtgatcgagaagacactgtacaacagaagaacccggcaggatgagcctgccctgttcgtggccctgaccttcgagcggcgggaggtcctggactcctccaatatcaaaccaatgaacctgatcggcgtggcaagaggcgaaaacatccccgccgtgatcgccctgaccgaccccgagggctgcccactgagccggtttaaggatagcctgggaaacccaacccacatcctgagaatcggcgagagctataaggagaagcagcggaccatccaggccaagaaggaggtggagcagcggagagccggcggctacagccggaagtacgccagcaaagccaagaatctggcagacgatatggtgagaaacaccgctagagatctgctgtactacgccgtgacccaggatgccatgctgatcttcgccaacctgagccggggcttcggccggcagggcaagcggaccttcatggccgagagacagtacacacggatggaggactggctgaccgccaagctggcctacgagggcctgagcaagacctacctgtccaagacactggcccagtacacctccaagacatgcagcaactgtgggtttaccatcaccagcgccgactacgacagggtgctggagaagctgaagaagacagcaacaggctggatgaccacaattaacggcaaggagctgaaggtggagggccagattacctactacaacagatacaagagacagaacgtagtcaaggacctgtccgtcgagctggatagactgagcgaagaatctgtgaacaacgacatctcctcctggacaaagggcagaagcggagaagctctgagcctcctgaagaaaagattctcccatagacccgtgcaggagaagttcgtgtgcctgaactgcggcttcgagacacacgcagccgagcaagccgccctgaacatcgccagatcctggctgttcctgcggagccaggagtacaagaaataccagacaaacaagacaaccggcaacaccgataagagagccttcgtcgagacctggcagtccttttaccggaagaagcttaaggaggtgtggaaacctgccgtgcggtctggcggatctggcggaggctccacccagcccgacgaggacctgcacctgcaggtggaggagacccagctggtgaaggagagcgtgaccttcaaggacgtggccatcgacttcaccctggaggagtggaggctgatggaccccacccagaggaacctgcacaaggacgtgatgctggagaactacaggaacctggtgagcctgggcctggccgtgagcaagcccgacatgatcagccacctggagaacggcaagggcccctgggtgggcggcccaagcagcggcgcccctcctcccagcggcggcagcccagccggctccccaacctctaccgaggagggcacctctgagtccgccacccccgagagcggccctggcacctccaccgagcccagcgagggcagcgcacccggcagccctgccggcagccccacctccacagaggagggaaccagcaccgagcccagcgaaggcagcgccccaggcaccagcaccgagcctagtgagcaggagattaaacggatcaacaagatcagaagaagacttgtgaaagacagcaacaccaagaaggccggcaagacaggccccatgaaaaccctgctggttagagtgatgacacccgatctgagagagcggctggaaaacctgagaaagaagcctgaaaatatcccccagcccatcagcaatacatctagagccaacctgaataagctgctgaccgattacaccgaaatgaagaaggcgatcctgcatgtgtactgggaagagttccagaaggaccctgtgggcctgatgagccgggtggcccagcctgccagcaagaagatcgatcagaacaagctgaaacctgagatggacgagaagggcaacctgaccaccgccggctttgcctgctctcagtgtggccagcccctgttcgtgtacaagctggagcaggtgtctgagaagggcaaggcttacaccaactacttcggacggtgcaatgtggccgagcacgaaaagctgatcctgctggcccagctgaagcccgagaaggatagcgacgaagccgtgacatatagcctgggaaagtttgggcagagggccctggatttctacagcattcatgtgaccaaggagtccacccaccccgtgaagcccctggcccagatcgccggaaacagatacgcctccggacctgtgggaaaggccctgagcgacgcatgtatgggcacaatcgcctccttcctgtctaagtaccaggacatcatcatcgaacaccagaaggtggtgaagggcaaccagaagagactggagagcctgcgggagctggccggcaaggaaaacctggaataccctagcgtgaccctgccacctcagcctcacaccaaggagggcgttgatgcctacaacgaagtgatcgcccgggtgcgaatgtgggtgaacctgaacctgtggcagaagctgaagctaagcagagatgatgccaagcctctgctgagactgaagggattcccttcctttcctctggtcgagagacaggccaacgaagtggactggtgggacatggtgtgtaacgtgaagaagctgatcaacgagaaaaaggaggatggcaaggtgttttggcagaatctggctggctacaagagacaggaagccctgagaccatacctgagcagcgaggaagatcggaagaagggaaagaaattcgctcggtaccagctgggcgacctgctgctgcacctggaaaagaagcacggcgaggactggggaaaggtgtacgacgaggcctgggagcggattgacaagaaagtggaaggcctgagcaagcacatcaagctggaagaggaacggagaagcgaggacgcccagagcaaggccgccctgaccgactggctgcgggctaaggccagcttcgtgatcgagggcctgaaggaggccgacaaggacgagttctgcagatgcgagctgaagctgcagaagtggtacggggacctgcggggaaagcccttcgccatcgaagccgagaacagcatcctggacatcagcggcttcagcaagcagtacaactgtgccttcatctggcagaaggacggcgtgaagaagctgaacctgtacctgatcatcaactacttcaagggcggcaagctgcggttcaagaagatcaaacctgaagccttcgaagccaacagattctacaccgtgatcaacaaaaagagcggcgagatcgtgcccatggaggtgaacttcaacttcgacgaccccaacctgatcatcctgcctctggcctttggcaagagacagggcagagaattcatctggaacgacctgctgtccctggaaaccggcagcctgaagctggccaacggaagagtgatcgagaagacactgtacaacagaagaacccggcaggatgagcctgccctgttcgtggccctgaccttcgagcggcgggaggtcctggactcctccaatatcaaaccaatgaacctgatcggcgtggcaagaggcgaaaacatccccgccgtgatcgccctgaccgaccccgagggctgcccactgagccggtttaaggatagcctgggaaacccaacccacatcctgagaatcggcgagagctataaggagaagcagcggaccatccaggccaagaaggaggtggagcagcggagagccggcggctacagccggaagtacgccagcaaagccaagaatctggcagacgatatggtgagaaacaccgctagagatctgctgtactacgccgtgacccaggatgccatgctgatcttcgccaacctgagccggggcttcggccggcagggcaagcggaccttcatggccgagagacagtacacacggatggaggactggctgaccgccaagctggcctacgagggcctgagcaagacctacctgtccaagacactggcccagtacacctccaagacatgcagcaactgtgggtttaccatcaccagcgccgactacgacagggtgctggagaagctgaagaagacagcaacaggctggatgaccacaattaacggcaaggagctgaaggtggagggccagattacctactacaacagatacaagagacagaacgtagtcaaggacctgtccgtcgagctggatagactgagcgaagaatctgtgaacaacgacatctcctcctggacaaagggcagaagcggagaagctctgagcctcctgaagaaaagattctcccatagacccgtgcaggagaagttcgtgtgcctgaactgcggcttcgagacacacgcagccgagcaagccgccctgaacatcgccagatcctggctgttcctgcggagccaggagtacaagaaataccagacaaacaagacaaccggcaacaccgataagagagccttcgtcgagacctggcagtccttttaccggaagaagcttaaggaggtgtggaaacctgccgtgcggtctggcggatctggcggaggctcctacccagcccgacgaggacctgcacctgcaggtggaggagacccagctggtgaaggagagcgtgaccttcaaggacgtggccatcgacttcaccctggaggagtggaggctgatggaccccacccagaggaacctgcacaaggacgtgatgctggagaactacaggaacctggtgagcctgggcctggccgtgagcaagcccgacatgatcagccacctggagaacggcaagggcccctgggtgggatctggctccggcagcggccccaagaaaaagagaaaagtctaagctgccttctgcggggcttgccttctggccatgcccttcttctctcccttgcacctgtacctcttggtctttgaataaagcctgagtaggaaggctagcaaaaaaaaaaaaaaaaaaaaaaaaaaaaaaaaaaaaaaaaaaaaaaaaaaaaaaaaaaaaaaaaaaaaaaaaaaaaaaaa

SEQ ID NO: 15758 - RNA, 9485 nt, synthetic construct
  source 1..9485: mol_type = other RNA
aggaaataagagagaaaagaagagtaagaagaaatataagagccaccatggcccctaagaagaagcgtaaagtgagccggatggaacgcctcgtctacgaggtgcggcagaagtgcagaaacatcgaggacatctgcatctcctgcggatctctgaacgtgaccctggagcacccactgttcatcggcggcatgtgccagaactgtaaaaactgttttctggagtgtgcctatcaatacgacgatgacggctaccagagctactgcaccatctgttgcggcggaagagaggtgctgatgtgtggaaataacaactgctgccggtgcttctgcgtggaatgcgtggacctgctggtgggccccggcgccgcccaggccgctattaaggaagatccttggaactgctacatgtgcggccacaagggcacatacggcctgctgagacggagagaggactggcctagcagactgcagatgttcttcgccaataaccacgaccaggagttcgacccccctaaggtgtaccctcccgtccccgccgagaagagaaagcccatccgggtcctgagcctgttcgatggcatcgccaccggtctgctggtgctgaaggacctgggcatccaggtggataggtacattgcctccgaggtgtgcgaggactccatcaccgtgggaatggtgcgtcatcagggcaagatcatgtacgtgggcgacgtgcggagcgtgacacagaagcatatccaggagtggggccctttcgacctggtgatcggcggcagcccttgcaatgacctgagcatcgtgaacccagcccggaagggcctgtacgagggaaccggcagactgttcttcgagttttacagactgctgcacgacgcccggcctaaggaaggcgacgaccggcccttcttttggctgttcgagaatgtggtggccatgggagtcagcgacaagcgggatattagccggttcctggagagcaaccccgtgatgatcgatgccaaggaagtgagcgccgcccaccgggccagatacttctggggcaatctgcctggcatgaacagacccctggccagcaccgtgaacgacaagctggagctgcaggagtgcctggagcacggccggatcgccaagttcagcaaggtgagaaccatcaccacccgaagcaacagcatcaaacaaggcaaggaccagcactttcctgtgttcatgaacgagaaggaggacatcctgtggtgtaccgagatggagagagtgttcgggttcccagtccactacacagatgtcagcaacatgtctagactggccagacagagactgctgggaagaagctggtccgtccctgtgatcagacacctgttcgcccctctgaaggagtacttcgcctgcgtgagcagcggcaacagcaacgccaacagccggggccccagcttctctagcggcctggtgccactgtccctgagagggagccacatgggccccatggagatctacaaaaccgtgagcgcctggaagcggcagcctgtgcgcgtgctgagcctgtttcggaatatcgataaagtcctgaaaagcctgggattcctggagagcggctctggctccggcggtggcaccctgaagtacgtggaggatgtgacaaacgtggtcagacgggatgtggagaagtggggccccttcgatctggtgtacggcagcacccaacccctgggcagctcttgtgaccggtgccctggctggtacatgtttcagttccaccggatcctgcagtacgccctgccgagacaggagtcccagcggccattcttttggattttcatggacaacttgctgctgaccgaggatgaccaggaaactaccactcggttcctgcagaccgaagccgtgaccctgcaggacgtgagaggccgggactaccagaacgccatgcgggtgtggtccaacatccctggactgaaaagcaagcacgcacctctgacccctaaagaagaggagtacctgcaggcccaggtgcggagcagaagcaagctggacgcccctaaggtggatctgctggtgaagaattgcctcctgcccctgagagagtacttcaagtatttcagccagaatagtctgcccctgggaggcagcggcggcggcgccctggtgacatttgaggacgtcgccgtgcggttcacccaggaggaatgggctctgctggatccttctcagaaaatcctgtaccgggacgtgatgagagagacataccggaatctgacctccgtgggcatcaactgggaatgttgggaccttgaagcctgcttcagaagcctgggaagaaacctgagagtgcaggtggtgaagagaaagtgcgagctgaccaacagcggcccctgcgccgagggcggcccaagcagcggcgcccctcctcccagcggcggcagcccagccggctccccaacctctaccgaggagggcacctctgagtccgccacccccgagagcggccctggcacctccaccgagcccagcgagggcagcgcacccggcagccctgccggcagccccacctccacagaggagggaaccagcaccgagcccagcgaaggcagcgccccaggcaccagcaccgagcctagtgagcaggagattaaacggatcaacaagatcagaagaagacttgtgaaagacagcaacaccaagaaggccggcaagacaggccccatgaaaaccctgctggttagagtgatgacacccgatctgagagagcggctggaaaacctgagaaagaagcctgaaaatatcccccagcccatcagcaatacatctagagccaacctgaataagctgctgaccgattacaccgaaatgaagaaggcgatcctgcatgtgtactgggaagagttccagaaggaccctgtgggcctgatgagccgggtggcccagcctgccagcaagaagatcgatcagaacaagctgaaacctgagatggacgagaagggcaacctgaccaccgccggctttgcctgctctcagtgtggccagcccctgttcgtgtacaagctggagcaggtgtctgagaagggcaaggcttacaccaactacttcggacggtgcaatgtggccgagcacgaaaagctgatcctgctggcccagctgaagcccgagaaggatagcgacgaagccgtgacatatagcctgggaaagtttgggcagagggccctggatttctacagcattcatgtgaccaaggagtccacccaccccgtgaagcccctggcccagatcgccggaaacagatacgcctccggacctgtgggaaaggccctgagcgacgcatgtatgggcacaatcgcctccttcctgtctaagtaccaggacatcatcatcgaacaccagaaggtggtgaagggcaaccagaagagactggagagcctgcgggagctggccggcaaggaaaacctggaataccctagcgtgaccctgccacctcagcctcacaccaaggagggcgttgatgcctacaacgaagtgatcgcccgggtgcgaatgtgggtgaacctgaacctgtggcagaagctgaagctaagcagagatgatgccaagcctctgctgagactgaagggattcccttcctttcctctggtcgagagacaggccaacgaagtggactggtgggacatggtgtgtaacgtgaagaagctgatcaacgagaaaaaggaggatggcaaggtgttttggcagaatctggctggctacaagagacaggaagccctgagaccatacctgagcagcgaggaagatcggaagaagggaaagaaattcgctcggtaccagctgggcgacctgctgctgcacctggaaaagaagcacggcgaggactggggaaaggtgtacgacgaggcctgggagcggattgacaagaaagtggaaggcctgagcaagcacatcaagctggaagaggaacggagaagcgaggacgcccagagcaaggccgccctgaccgactggctgcgggctaaggccagcttcgtgatcgagggcctgaaggaggccgacaaggacgagttctgcagatgcgagctgaagctgcagaagtggtacggggacctgcggggaaagcccttcgccatcgaagccgagaacagcatcctggacatcagcggcttcagcaagcagtacaactgtgccttcatctggcagaaggacggcgtgaagaagctgaacctgtacctgatcatcaactacttcaagggcggcaagctgcggttcaagaagatcaaacctgaagccttcgaagccaacagattctacaccgtgatcaacaaaaagagcggcgagatcgtgcccatggaggtgaacttcaacttcgacgaccccaacctgatcatcctgcctctggcctttggcaagagacagggcagagaattcatctggaacgacctgctgtccctggaaaccggcagcctgaagctggccaacggaagagtgatcgagaagacactgtacaacagaagaacccggcaggatgagcctgccctgttcgtggccctgaccttcgagcggcgggaggtcctggactcctccaatatcaaaccaatgaacctgatcggcgtggcaagaggcgaaaacatccccgccgtgatcgccctgaccgaccccgagggctgcccactgagccggtttaaggatagcctgggaaacccaacccacatcctgagaatcggcgagagctataaggagaagcagcggaccatccaggccaagaaggaggtggagcagcggagagccggcggctacagccggaagtacgccagcaaagccaagaatctggcagacgatatggtgagaaacaccgctagagatctgctgtactacgccgtgacccaggatgccatgctgatcttcgccaacctgagccggggcttcggccggcagggcaagcggaccttcatggccgagagacagtacacacggatggaggactggctgaccgccaagctggcctacgagggcctgagcaagacctacctgtccaagacactggcccagtacacctccaagacatgcagcaactgtgggtttaccatcaccagcgccgactacgacagggtgctggagaagctgaagaagacagcaacaggctggatgaccacaattaacggcaaggagctgaaggtggagggccagattacctactacaacagatacaagagacagaacgtagtcaaggacctgtccgtcgagctggatagactgagcgaagaatctgtgaacaacgacatctcctcctggacaaagggcagaagcggagaagctctgagcctcctgaagaaaagattctcccatagacccgtgcaggagaagttcgtgtgcctgaactgcggcttcgagacacacgcagccgagcaagccgccctgaacatcgccagatcctggctgttcctgcggagccaggagtacaagaaataccagacaaacaagacaaccggcaacaccgataagagagccttcgtcgagacctggcagtccttttaccggaagaagcttaaggaggtgtggaaacctgccgtgcggtctggcggatctggcggaggctccgcccaggagttcgtgatgttcagggacgtggccgtgttcttcagccaggaggagtggggccacctggaccccgcccagagggccctgtacagggaggtgatgctggagaactacagcaacctggtgagcctgggcatcaggttcagcaagcccaaggtgatcagccagctgcagcagggcgaggacccctggatggtggacaggggcgtgccccagggcgcctgccagggctggaagagcctgggcggcccaagcagcggcgcccctcctcccagcggcggcagcccagccggctccccaacctctaccgaggagggcacctctgagtccgccacccccgagagcggccctggcacctccaccgagcccagcgagggcagcgcacccggcagccctgccggcagccccacctccacagaggagggaaccagcaccgagcccagcgaaggcagcgccccaggcaccagcaccgagcctagtgagcaggagattaaacggatcaacaagatcagaagaagacttgtgaaagacagcaacaccaagaaggccggcaagacaggccccatgaaaaccctgctggttagagtgatgacacccgatctgagagagcggctggaaaacctgagaaagaagcctgaaaatatcccccagcccatcagcaatacatctagagccaacctgaataagctgctgaccgattacaccgaaatgaagaaggcgatcctgcatgtgtactgggaagagttccagaaggaccctgtgggcctgatgagccgggtggcccagcctgccagcaagaagatcgatcagaacaagctgaaacctgagatggacgagaagggcaacctgaccaccgccggctttgcctgctctcagtgtggccagcccctgttcgtgtacaagctggagcaggtgtctgagaagggcaaggcttacaccaactacttcggacggtgcaatgtggccgagcacgaaaagctgatcctgctggcccagctgaagcccgagaaggatagcgacgaagccgtgacatatagcctgggaaagtttgggcagagggccctggatttctacagcattcatgtgaccaaggagtccacccaccccgtgaagcccctggcccagatcgccggaaacagatacgcctccggacctgtgggaaaggccctgagcgacgcatgtatgggcacaatcgcctccttcctgtctaagtaccaggacatcatcatcgaacaccagaaggtggtgaagggcaaccagaagagactggagagcctgcgggagctggccggcaaggaaaacctggaataccctagcgtgaccctgccacctcagcctcacaccaaggagggcgttgatgcctacaacgaagtgatcgcccgggtgcgaatgtgggtgaacctgaacctgtggcagaagctgaagctaagcagagatgatgccaagcctctgctgagactgaagggattcccttcctttcctctggtcgagagacaggccaacgaagtggactggtgggacatggtgtgtaacgtgaagaagctgatcaacgagaaaaaggaggatggcaaggtgttttggcagaatctggctggctacaagagacaggaagccctgagaccatacctgagcagcgaggaagatcggaagaagggaaagaaattcgctcggtaccagctgggcgacctgctgctgcacctggaaaagaagcacggcgaggactggggaaaggtgtacgacgaggcctgggagcggattgacaagaaagtggaaggcctgagcaagcacatcaagctggaagaggaacggagaagcgaggacgcccagagcaaggccgccctgaccgactggctgcgggctaaggccagcttcgtgatcgagggcctgaaggaggccgacaaggacgagttctgcagatgcgagctgaagctgcagaagtggtacggggacctgcggggaaagcccttcgccatcgaagccgagaacagcatcctggacatcagcggcttcagcaagcagtacaactgtgccttcatctggcagaaggacggcgtgaagaagctgaacctgtacctgatcatcaactacttcaagggcggcaagctgcggttcaagaagatcaaacctgaagccttcgaagccaacagattctacaccgtgatcaacaaaaagagcggcgagatcgtgcccatggaggtgaacttcaacttcgacgaccccaacctgatcatcctgcctctggcctttggcaagagacagggcagagaattcatctggaacgacctgctgtccctggaaaccggcagcctgaagctggccaacggaagagtgatcgagaagacactgtacaacagaagaacccggcaggatgagcctgccctgttcgtggccctgaccttcgagcggcgggaggtcctggactcctccaatatcaaaccaatgaacctgatcggcgtggcaagaggcgaaaacatccccgccgtgatcgccctgaccgaccccgagggctgcccactgagccggtttaaggatagcctgggaaacccaacccacatcctgagaatcggcgagagctataaggagaagcagcggaccatccaggccaagaaggaggtggagcagcggagagccggcggctacagccggaagtacgccagcaaagccaagaatctggcagacgatatggtgagaaacaccgctagagatctgctgtactacgccgtgacccaggatgccatgctgatcttcgccaacctgagccggggcttcggccggcagggcaagcggaccttcatggccgagagacagtacacacggatggaggactggctgaccgccaagctggcctacgagggcctgagcaagacctacctgtccaagacactggcccagtacacctccaagacatgcagcaactgtgggtttaccatcaccagcgccgactacgacagggtgctggagaagctgaagaagacagcaacaggctggatgaccacaattaacggcaaggagctgaaggtggagggccagattacctactacaacagatacaagagacagaacgtagtcaaggacctgtccgtcgagctggatagactgagcgaagaatctgtgaacaacgacatctcctcctggacaaagggcagaagcggagaagctctgagcctcctgaagaaaagattctcccatagacccgtgcaggagaagttcgtgtgcctgaactgcggcttcgagacacacgcagccgagcaagccgccctgaacatcgccagatcctggctgttcctgcggagccaggagtacaagaaataccagacaaacaagacaaccggcaacaccgataagagagccttcgtcgagacctggcagtccttttaccggaagaagcttaaggaggtgtggaaacctgccgtgcggtctggcggatctggcggaggctcctgcccaggagttcgtgatgttcagggacgtggccgtgttcttcagccaggaggagtggggccacctggaccccgcccagagggccctgtacagggaggtgatgctggagaactacagcaacctggtgagcctgggcatcaggttcagcaagcccaaggtgatcagccagctgcagcagggcgaggacccctggatggtggacaggggcgtgccccagggcgcctgccagggctggaagagcctgggatctggctccggcagcggccccaagaaaaagagaaaagtctaagctgccttctgcggggcttgccttctggccatgcccttcttctctcccttgcacctgtacctcttggtctttgaataaagcctgagtaggaaggctagcaaaaaaaaaaaaaaaaaaaaaaaaaaaaaaaaaaaaaaaaaaaaaaaaaaaaaaaaaaaaaaaaaaaaaaaaaaaaaaaa

SEQ ID NO: 15759 - RNA, 9485 nt, synthetic construct
  source 1..9485: mol_type = other RNA
aggaaataagagagaaaagaagagtaagaagaaatataagagccaccatggcccctaagaagaagcgtaaagtgagccggatggaacgcctcgtctacgaggtgcggcagaagtgcagaaacatcgaggacatctgcatctcctgcggatctctgaacgtgaccctggagcacccactgttcatcggcggcatgtgccagaactgtaaaaactgttttctggagtgtgcctatcaatacgacgatgacggctaccagagctactgcaccatctgttgcggcggaagagaggtgctgatgtgtggaaataacaactgctgccggtgcttctgcgtggaatgcgtggacctgctggtgggccccggcgccgcccaggccgctattaaggaagatccttggaactgctacatgtgcggccacaagggcacatacggcctgctgagacggagagaggactggcctagcagactgcagatgttcttcgccaataaccacgaccaggagttcgacccccctaaggtgtaccctcccgtccccgccgagaagagaaagcccatccgggtcctgagcctgttcgatggcatcgccaccggtctgctggtgctgaaggacctgggcatccaggtggataggtacattgcctccgaggtgtgcgaggactccatcaccgtgggaatggtgcgtcatcagggcaagatcatgtacgtgggcgacgtgcggagcgtgacacagaagcatatccaggagtggggccctttcgacctggtgatcggcggcagcccttgcaatgacctgagcatcgtgaacccagcccggaagggcctgtacgagggaaccggcagactgttcttcgagttttacagactgctgcacgacgcccggcctaaggaaggcgacgaccggcccttcttttggctgttcgagaatgtggtggccatgggagtcagcgacaagcgggatattagccggttcctggagagcaaccccgtgatgatcgatgccaaggaagtgagcgccgcccaccgggccagatacttctggggcaatctgcctggcatgaacagacccctggccagcaccgtgaacgacaagctggagctgcaggagtgcctggagcacggccggatcgccaagttcagcaaggtgagaaccatcaccacccgaagcaacagcatcaaacaaggcaaggaccagcactttcctgtgttcatgaacgagaaggaggacatcctgtggtgtaccgagatggagagagtgttcgggttcccagtccactacacagatgtcagcaacatgtctagactggccagacagagactgctgggaagaagctggtccgtccctgtgatcagacacctgttcgcccctctgaaggagtacttcgcctgcgtgagcagcggcaacagcaacgccaacagccggggccccagcttctctagcggcctggtgccactgtccctgagagggagccacatgggccccatggagatctacaaaaccgtgagcgcctggaagcggcagcctgtgcgcgtgctgagcctgtttcggaatatcgataaagtcctgaaaagcctgggattcctggagagcggctctggctccggcggtggcaccctgaagtacgtggaggatgtgacaaacgtggtcagacgggatgtggagaagtggggccccttcgatctggtgtacggcagcacccaacccctgggcagctcttgtgaccggtgccctggctggtacatgtttcagttccaccggatcctgcagtacgccctgccgagacaggagtcccagcggccattcttttggattttcatggacaacttgctgctgaccgaggatgaccaggaaactaccactcggttcctgcagaccgaagccgtgaccctgcaggacgtgagaggccgggactaccagaacgccatgcgggtgtggtccaacatccctggactgaaaagcaagcacgcacctctgacccctaaagaagaggagtacctgcaggcccaggtgcggagcagaagcaagctggacgcccctaaggtggatctgctggtgaagaattgcctcctgcccctgagagagtacttcaagtatttcagccagaatagtctgcccctgggaggcagcggcggcggcgccctggtgacatttgaggacgtcgccgtgcggttcacccaggaggaatgggctctgctggatccttctcagaaaatcctgtaccgggacgtgatgagagagacataccggaatctgacctccgtgggcatcaactgggaatgttgggaccttgaagcctgcttcagaagcctgggaagaaacctgagagtgcaggtggtgaagagaaagtgcgagctgaccaacagcggcccctgcgccgagggcggcccaagcagcggcgcccctcctcccagcggcggcagcccagccggctccccaacctctaccgaggagggcacctctgagtccgccacccccgagagcggccctggcacctccaccgagcccagcgagggcagcgcacccggcagccctgccggcagccccacctccacagaggagggaaccagcaccgagcccagcgaaggcagcgccccaggcaccagcaccgagcctagtgagcaggagattaaacggatcaacaagatcagaagaagacttgtgaaagacagcaacaccaagaaggccggcaagacaggccccatgaaaaccctgctggttagagtgatgacacccgatctgagagagcggctggaaaacctgagaaagaagcctgaaaatatcccccagcccatcagcaatacatctagagccaacctgaataagctgctgaccgattacaccgaaatgaagaaggcgatcctgcatgtgtactgggaagagttccagaaggaccctgtgggcctgatgagccgggtggcccagcctgccagcaagaagatcgatcagaacaagctgaaacctgagatggacgagaagggcaacctgaccaccgccggctttgcctgctctcagtgtggccagcccctgttcgtgtacaagctggagcaggtgtctgagaagggcaaggcttacaccaactacttcggacggtgcaatgtggccgagcacgaaaagctgatcctgctggcccagctgaagcccgagaaggatagcgacgaagccgtgacatatagcctgggaaagtttgggcagagggccctggatttctacagcattcatgtgaccaaggagtccacccaccccgtgaagcccctggcccagatcgccggaaacagatacgcctccggacctgtgggaaaggccctgagcgacgcatgtatgggcacaatcgcctccttcctgtctaagtaccaggacatcatcatcgaacaccagaaggtggtgaagggcaaccagaagagactggagagcctgcgggagctggccggcaaggaaaacctggaataccctagcgtgaccctgccacctcagcctcacaccaaggagggcgttgatgcctacaacgaagtgatcgcccgggtgcgaatgtgggtgaacctgaacctgtggcagaagctgaagctaagcagagatgatgccaagcctctgctgagactgaagggattcccttcctttcctctggtcgagagacaggccaacgaagtggactggtgggacatggtgtgtaacgtgaagaagctgatcaacgagaaaaaggaggatggcaaggtgttttggcagaatctggctggctacaagagacaggaagccctgagaccatacctgagcagcgaggaagatcggaagaagggaaagaaattcgctcggtaccagctgggcgacctgctgctgcacctggaaaagaagcacggcgaggactggggaaaggtgtacgacgaggcctgggagcggattgacaagaaagtggaaggcctgagcaagcacatcaagctggaagaggaacggagaagcgaggacgcccagagcaaggccgccctgaccgactggctgcgggctaaggccagcttcgtgatcgagggcctgaaggaggccgacaaggacgagttctgcagatgcgagctgaagctgcagaagtggtacggggacctgcggggaaagcccttcgccatcgaagccgagaacagcatcctggacatcagcggcttcagcaagcagtacaactgtgccttcatctggcagaaggacggcgtgaagaagctgaacctgtacctgatcatcaactacttcaagggcggcaagctgcggttcaagaagatcaaacctgaagccttcgaagccaacagattctacaccgtgatcaacaaaaagagcggcgagatcgtgcccatggaggtgaacttcaacttcgacgaccccaacctgatcatcctgcctctggcctttggcaagagacagggcagagaattcatctggaacgacctgctgtccctggaaaccggcagcctgaagctggccaacggaagagtgatcgagaagacactgtacaacagaagaacccggcaggatgagcctgccctgttcgtggccctgaccttcgagcggcgggaggtcctggactcctccaatatcaaaccaatgaacctgatcggcgtggcaagaggcgaaaacatccccgccgtgatcgccctgaccgaccccgagggctgcccactgagccggtttaaggatagcctgggaaacccaacccacatcctgagaatcggcgagagctataaggagaagcagcggaccatccaggccaagaaggaggtggagcagcggagagccggcggctacagccggaagtacgccagcaaagccaagaatctggcagacgatatggtgagaaacaccgctagagatctgctgtactacgccgtgacccaggatgccatgctgatcttcgccaacctgagccggggcttcggccggcagggcaagcggaccttcatggccgagagacagtacacacggatggaggactggctgaccgccaagctggcctacgagggcctgagcaagacctacctgtccaagacactggcccagtacacctccaagacatgcagcaactgtgggtttaccatcaccagcgccgactacgacagggtgctggagaagctgaagaagacagcaacaggctggatgaccacaattaacggcaaggagctgaaggtggagggccagattacctactacaacagatacaagagacagaacgtagtcaaggacctgtccgtcgagctggatagactgagcgaagaatctgtgaacaacgacatctcctcctggacaaagggcagaagcggagaagctctgagcctcctgaagaaaagattctcccatagacccgtgcaggagaagttcgtgtgcctgaactgcggcttcgagacacacgcagccgagcaagccgccctgaacatcgccagatcctggctgttcctgcggagccaggagtacaagaaataccagacaaacaagacaaccggcaacaccgataagagagccttcgtcgagacctggcagtccttttaccggaagaagcttaaggaggtgtggaaacctgccgtgcggtctggcggatctggcggaggctccatggacagcgtggccttcgaggacgtggccgtgagcttcacccaggaggagtgggccctgctggaccccagccagaagaacctgtacagggacgtgatgcaggagaccttcaagaacctgaccagcgtgggcaagacctggaaggtgcagaacatcgaggacgagtacaagaaccccaggaggaacctgaggaggagcttcaccctggtggcccaggccggcgtgaggcaggacctgggcagcggcggcccaagcagcggcgcccctcctcccagcggcggcagcccagccggctccccaacctctaccgaggagggcacctctgagtccgccacccccgagagcggccctggcacctccaccgagcccagcgagggcagcgcacccggcagccctgccggcagccccacctccacagaggagggaaccagcaccgagcccagcgaaggcagcgccccaggcaccagcaccgagcctagtgagcaggagattaaacggatcaacaagatcagaagaagacttgtgaaagacagcaacaccaagaaggccggcaagacaggccccatgaaaaccctgctggttagagtgatgacacccgatctgagagagcggctggaaaacctgagaaagaagcctgaaaatatcccccagcccatcagcaatacatctagagccaacctgaataagctgctgaccgattacaccgaaatgaagaaggcgatcctgcatgtgtactgggaagagttccagaaggaccctgtgggcctgatgagccgggtggcccagcctgccagcaagaagatcgatcagaacaagctgaaacctgagatggacgagaagggcaacctgaccaccgccggctttgcctgctctcagtgtggccagcccctgttcgtgtacaagctggagcaggtgtctgagaagggcaaggcttacaccaactacttcggacggtgcaatgtggccgagcacgaaaagctgatcctgctggcccagctgaagcccgagaaggatagcgacgaagccgtgacatatagcctgggaaagtttgggcagagggccctggatttctacagcattcatgtgaccaaggagtccacccaccccgtgaagcccctggcccagatcgccggaaacagatacgcctccggacctgtgggaaaggccctgagcgacgcatgtatgggcacaatcgcctccttcctgtctaagtaccaggacatcatcatcgaacaccagaaggtggtgaagggcaaccagaagagactggagagcctgcgggagctggccggcaaggaaaacctggaataccctagcgtgaccctgccacctcagcctcacaccaaggagggcgttgatgcctacaacgaagtgatcgcccgggtgcgaatgtgggtgaacctgaacctgtggcagaagctgaagctaagcagagatgatgccaagcctctgctgagactgaagggattcccttcctttcctctggtcgagagacaggccaacgaagtggactggtgggacatggtgtgtaacgtgaagaagctgatcaacgagaaaaaggaggatggcaaggtgttttggcagaatctggctggctacaagagacaggaagccctgagaccatacctgagcagcgaggaagatcggaagaagggaaagaaattcgctcggtaccagctgggcgacctgctgctgcacctggaaaagaagcacggcgaggactggggaaaggtgtacgacgaggcctgggagcggattgacaagaaagtggaaggcctgagcaagcacatcaagctggaagaggaacggagaagcgaggacgcccagagcaaggccgccctgaccgactggctgcgggctaaggccagcttcgtgatcgagggcctgaaggaggccgacaaggacgagttctgcagatgcgagctgaagctgcagaagtggtacggggacctgcggggaaagcccttcgccatcgaagccgagaacagcatcctggacatcagcggcttcagcaagcagtacaactgtgccttcatctggcagaaggacggcgtgaagaagctgaacctgtacctgatcatcaactacttcaagggcggcaagctgcggttcaagaagatcaaacctgaagccttcgaagccaacagattctacaccgtgatcaacaaaaagagcggcgagatcgtgcccatggaggtgaacttcaacttcgacgaccccaacctgatcatcctgcctctggcctttggcaagagacagggcagagaattcatctggaacgacctgctgtccctggaaaccggcagcctgaagctggccaacggaagagtgatcgagaagacactgtacaacagaagaacccggcaggatgagcctgccctgttcgtggccctgaccttcgagcggcgggaggtcctggactcctccaatatcaaaccaatgaacctgatcggcgtggcaagaggcgaaaacatccccgccgtgatcgccctgaccgaccccgagggctgcccactgagccggtttaaggatagcctgggaaacccaacccacatcctgagaatcggcgagagctataaggagaagcagcggaccatccaggccaagaaggaggtggagcagcggagagccggcggctacagccggaagtacgccagcaaagccaagaatctggcagacgatatggtgagaaacaccgctagagatctgctgtactacgccgtgacccaggatgccatgctgatcttcgccaacctgagccggggcttcggccggcagggcaagcggaccttcatggccgagagacagtacacacggatggaggactggctgaccgccaagctggcctacgagggcctgagcaagacctacctgtccaagacactggcccagtacacctccaagacatgcagcaactgtgggtttaccatcaccagcgccgactacgacagggtgctggagaagctgaagaagacagcaacaggctggatgaccacaattaacggcaaggagctgaaggtggagggccagattacctactacaacagatacaagagacagaacgtagtcaaggacctgtccgtcgagctggatagactgagcgaagaatctgtgaacaacgacatctcctcctggacaaagggcagaagcggagaagctctgagcctcctgaagaaaagattctcccatagacccgtgcaggagaagttcgtgtgcctgaactgcggcttcgagacacacgcagccgagcaagccgccctgaacatcgccagatcctggctgttcctgcggagccaggagtacaagaaataccagacaaacaagacaaccggcaacaccgataagagagccttcgtcgagacctggcagtccttttaccggaagaagcttaaggaggtgtggaaacctgccgtgcggtctggcggatctggcggaggctcctatggacagcgtggccttcgaggacgtggccgtgagcttcacccaggaggagtgggccctgctggaccccagccagaagaacctgtacagggacgtgatgcaggagaccttcaagaacctgaccagcgtgggcaagacctggaaggtgcagaacatcgaggacgagtacaagaaccccaggaggaacctgaggaggagcttcaccctggtggcccaggccggcgtgaggcaggacctgggcagcggatctggctccggcagcggccccaagaaaaagagaaaagtctaagctgccttctgcggggcttgccttctggccatgcccttcttctctcccttgcacctgtacctcttggtctttgaataaagcctgagtaggaaggctagcaaaaaaaaaaaaaaaaaaaaaaaaaaaaaaaaaaaaaaaaaaaaaaaaaaaaaaaaaaaaaaaaaaaaaaaaaaaaaaaa

SEQ ID NO: 15760 - RNA, 9485 nt, synthetic construct
  source 1..9485: mol_type = other RNA
aggaaataagagagaaaagaagagtaagaagaaatataagagccaccatggcccctaagaagaagcgtaaagtgagccggatggaacgcctcgtctacgaggtgcggcagaagtgcagaaacatcgaggacatctgcatctcctgcggatctctgaacgtgaccctggagcacccactgttcatcggcggcatgtgccagaactgtaaaaactgttttctggagtgtgcctatcaatacgacgatgacggctaccagagctactgcaccatctgttgcggcggaagagaggtgctgatgtgtggaaataacaactgctgccggtgcttctgcgtggaatgcgtggacctgctggtgggccccggcgccgcccaggccgctattaaggaagatccttggaactgctacatgtgcggccacaagggcacatacggcctgctgagacggagagaggactggcctagcagactgcagatgttcttcgccaataaccacgaccaggagttcgacccccctaaggtgtaccctcccgtccccgccgagaagagaaagcccatccgggtcctgagcctgttcgatggcatcgccaccggtctgctggtgctgaaggacctgggcatccaggtggataggtacattgcctccgaggtgtgcgaggactccatcaccgtgggaatggtgcgtcatcagggcaagatcatgtacgtgggcgacgtgcggagcgtgacacagaagcatatccaggagtggggccctttcgacctggtgatcggcggcagcccttgcaatgacctgagcatcgtgaacccagcccggaagggcctgtacgagggaaccggcagactgttcttcgagttttacagactgctgcacgacgcccggcctaaggaaggcgacgaccggcccttcttttggctgttcgagaatgtggtggccatgggagtcagcgacaagcgggatattagccggttcctggagagcaaccccgtgatgatcgatgccaaggaagtgagcgccgcccaccgggccagatacttctggggcaatctgcctggcatgaacagacccctggccagcaccgtgaacgacaagctggagctgcaggagtgcctggagcacggccggatcgccaagttcagcaaggtgagaaccatcaccacccgaagcaacagcatcaaacaaggcaaggaccagcactttcctgtgttcatgaacgagaaggaggacatcctgtggtgtaccgagatggagagagtgttcgggttcccagtccactacacagatgtcagcaacatgtctagactggccagacagagactgctgggaagaagctggtccgtccctgtgatcagacacctgttcgcccctctgaaggagtacttcgcctgcgtgagcagcggcaacagcaacgccaacagccggggccccagcttctctagcggcctggtgccactgtccctgagagggagccacatgggccccatggagatctacaaaaccgtgagcgcctggaagcggcagcctgtgcgcgtgctgagcctgtttcggaatatcgataaagtcctgaaaagcctgggattcctggagagcggctctggctccggcggtggcaccctgaagtacgtggaggatgtgacaaacgtggtcagacgggatgtggagaagtggggccccttcgatctggtgtacggcagcacccaacccctgggcagctcttgtgaccggtgccctggctggtacatgtttcagttccaccggatcctgcagtacgccctgccgagacaggagtcccagcggccattcttttggattttcatggacaacttgctgctgaccgaggatgaccaggaaactaccactcggttcctgcagaccgaagccgtgaccctgcaggacgtgagaggccgggactaccagaacgccatgcgggtgtggtccaacatccctggactgaaaagcaagcacgcacctctgacccctaaagaagaggagtacctgcaggcccaggtgcggagcagaagcaagctggacgcccctaaggtggatctgctggtgaagaattgcctcctgcccctgagagagtacttcaagtatttcagccagaatagtctgcccctgggaggcagcggcggcggcgccctggtgacatttgaggacgtcgccgtgcggttcacccaggaggaatgggctctgctggatccttctcagaaaatcctgtaccgggacgtgatgagagagacataccggaatctgacctccgtgggcatcaactgggaatgttgggaccttgaagcctgcttcagaagcctgggaagaaacctgagagtgcaggtggtgaagagaaagtgcgagctgaccaacagcggcccctgcgccgagggcggcccaagcagcggcgcccctcctcccagcggcggcagcccagccggctccccaacctctaccgaggagggcacctctgagtccgccacccccgagagcggccctggcacctccaccgagcccagcgagggcagcgcacccggcagccctgccggcagccccacctccacagaggagggaaccagcaccgagcccagcgaaggcagcgccccaggcaccagcaccgagcctagtgagcaggagattaaacggatcaacaagatcagaagaagacttgtgaaagacagcaacaccaagaaggccggcaagacaggccccatgaaaaccctgctggttagagtgatgacacccgatctgagagagcggctggaaaacctgagaaagaagcctgaaaatatcccccagcccatcagcaatacatctagagccaacctgaataagctgctgaccgattacaccgaaatgaagaaggcgatcctgcatgtgtactgggaagagttccagaaggaccctgtgggcctgatgagccgggtggcccagcctgccagcaagaagatcgatcagaacaagctgaaacctgagatggacgagaagggcaacctgaccaccgccggctttgcctgctctcagtgtggccagcccctgttcgtgtacaagctggagcaggtgtctgagaagggcaaggcttacaccaactacttcggacggtgcaatgtggccgagcacgaaaagctgatcctgctggcccagctgaagcccgagaaggatagcgacgaagccgtgacatatagcctgggaaagtttgggcagagggccctggatttctacagcattcatgtgaccaaggagtccacccaccccgtgaagcccctggcccagatcgccggaaacagatacgcctccggacctgtgggaaaggccctgagcgacgcatgtatgggcacaatcgcctccttcctgtctaagtaccaggacatcatcatcgaacaccagaaggtggtgaagggcaaccagaagagactggagagcctgcgggagctggccggcaaggaaaacctggaataccctagcgtgaccctgccacctcagcctcacaccaaggagggcgttgatgcctacaacgaagtgatcgcccgggtgcgaatgtgggtgaacctgaacctgtggcagaagctgaagctaagcagagatgatgccaagcctctgctgagactgaagggattcccttcctttcctctggtcgagagacaggccaacgaagtggactggtgggacatggtgtgtaacgtgaagaagctgatcaacgagaaaaaggaggatggcaaggtgttttggcagaatctggctggctacaagagacaggaagccctgagaccatacctgagcagcgaggaagatcggaagaagggaaagaaattcgctcggtaccagctgggcgacctgctgctgcacctggaaaagaagcacggcgaggactggggaaaggtgtacgacgaggcctgggagcggattgacaagaaagtggaaggcctgagcaagcacatcaagctggaagaggaacggagaagcgaggacgcccagagcaaggccgccctgaccgactggctgcgggctaaggccagcttcgtgatcgagggcctgaaggaggccgacaaggacgagttctgcagatgcgagctgaagctgcagaagtggtacggggacctgcggggaaagcccttcgccatcgaagccgagaacagcatcctggacatcagcggcttcagcaagcagtacaactgtgccttcatctggcagaaggacggcgtgaagaagctgaacctgtacctgatcatcaactacttcaagggcggcaagctgcggttcaagaagatcaaacctgaagccttcgaagccaacagattctacaccgtgatcaacaaaaagagcggcgagatcgtgcccatggaggtgaacttcaacttcgacgaccccaacctgatcatcctgcctctggcctttggcaagagacagggcagagaattcatctggaacgacctgctgtccctggaaaccggcagcctgaagctggccaacggaagagtgatcgagaagacactgtacaacagaagaacccggcaggatgagcctgccctgttcgtggccctgaccttcgagcggcgggaggtcctggactcctccaatatcaaaccaatgaacctgatcggcgtggcaagaggcgaaaacatccccgccgtgatcgccctgaccgaccccgagggctgcccactgagccggtttaaggatagcctgggaaacccaacccacatcctgagaatcggcgagagctataaggagaagcagcggaccatccaggccaagaaggaggtggagcagcggagagccggcggctacagccggaagtacgccagcaaagccaagaatctggcagacgatatggtgagaaacaccgctagagatctgctgtactacgccgtgacccaggatgccatgctgatcttcgccaacctgagccggggcttcggccggcagggcaagcggaccttcatggccgagagacagtacacacggatggaggactggctgaccgccaagctggcctacgagggcctgagcaagacctacctgtccaagacactggcccagtacacctccaagacatgcagcaactgtgggtttaccatcaccagcgccgactacgacagggtgctggagaagctgaagaagacagcaacaggctggatgaccacaattaacggcaaggagctgaaggtggagggccagattacctactacaacagatacaagagacagaacgtagtcaaggacctgtccgtcgagctggatagactgagcgaagaatctgtgaacaacgacatctcctcctggacaaagggcagaagcggagaagctctgagcctcctgaagaaaagattctcccatagacccgtgcaggagaagttcgtgtgcctgaactgcggcttcgagacacacgcagccgagcaagccgccctgaacatcgccagatcctggctgttcctgcggagccaggagtacaagaaataccagacaaacaagacaaccggcaacaccgataagagagccttcgtcgagacctggcagtccttttaccggaagaagcttaaggaggtgtggaaacctgccgtgcggtctggcggatctggcggaggctccacccaggaccccgtggtgttcgaggacgtggccgtggacttcacccaggaggagtgggccctgctgaacctggcccagaggaacctgtacagggacgtgatgctggagaacttccagaacctggccagcctgggctaccccctgcacatcccctacctgatcagccagtggaagcaggaggaggacctgggcaccgtggagaggggcaccatccagggcgagcaccaggagggcttcgagaccggcggcccaagcagcggcgcccctcctcccagcggcggcagcccagccggctccccaacctctaccgaggagggcacctctgagtccgccacccccgagagcggccctggcacctccaccgagcccagcgagggcagcgcacccggcagccctgccggcagccccacctccacagaggagggaaccagcaccgagcccagcgaaggcagcgccccaggcaccagcaccgagcctagtgagcaggagattaaacggatcaacaagatcagaagaagacttgtgaaagacagcaacaccaagaaggccggcaagacaggccccatgaaaaccctgctggttagagtgatgacacccgatctgagagagcggctggaaaacctgagaaagaagcctgaaaatatcccccagcccatcagcaatacatctagagccaacctgaataagctgctgaccgattacaccgaaatgaagaaggcgatcctgcatgtgtactgggaagagttccagaaggaccctgtgggcctgatgagccgggtggcccagcctgccagcaagaagatcgatcagaacaagctgaaacctgagatggacgagaagggcaacctgaccaccgccggctttgcctgctctcagtgtggccagcccctgttcgtgtacaagctggagcaggtgtctgagaagggcaaggcttacaccaactacttcggacggtgcaatgtggccgagcacgaaaagctgatcctgctggcccagctgaagcccgagaaggatagcgacgaagccgtgacatatagcctgggaaagtttgggcagagggccctggatttctacagcattcatgtgaccaaggagtccacccaccccgtgaagcccctggcccagatcgccggaaacagatacgcctccggacctgtgggaaaggccctgagcgacgcatgtatgggcacaatcgcctccttcctgtctaagtaccaggacatcatcatcgaacaccagaaggtggtgaagggcaaccagaagagactggagagcctgcgggagctggccggcaaggaaaacctggaataccctagcgtgaccctgccacctcagcctcacaccaaggagggcgttgatgcctacaacgaagtgatcgcccgggtgcgaatgtgggtgaacctgaacctgtggcagaagctgaagctaagcagagatgatgccaagcctctgctgagactgaagggattcccttcctttcctctggtcgagagacaggccaacgaagtggactggtgggacatggtgtgtaacgtgaagaagctgatcaacgagaaaaaggaggatggcaaggtgttttggcagaatctggctggctacaagagacaggaagccctgagaccatacctgagcagcgaggaagatcggaagaagggaaagaaattcgctcggtaccagctgggcgacctgctgctgcacctggaaaagaagcacggcgaggactggggaaaggtgtacgacgaggcctgggagcggattgacaagaaagtggaaggcctgagcaagcacatcaagctggaagaggaacggagaagcgaggacgcccagagcaaggccgccctgaccgactggctgcgggctaaggccagcttcgtgatcgagggcctgaaggaggccgacaaggacgagttctgcagatgcgagctgaagctgcagaagtggtacggggacctgcggggaaagcccttcgccatcgaagccgagaacagcatcctggacatcagcggcttcagcaagcagtacaactgtgccttcatctggcagaaggacggcgtgaagaagctgaacctgtacctgatcatcaactacttcaagggcggcaagctgcggttcaagaagatcaaacctgaagccttcgaagccaacagattctacaccgtgatcaacaaaaagagcggcgagatcgtgcccatggaggtgaacttcaacttcgacgaccccaacctgatcatcctgcctctggcctttggcaagagacagggcagagaattcatctggaacgacctgctgtccctggaaaccggcagcctgaagctggccaacggaagagtgatcgagaagacactgtacaacagaagaacccggcaggatgagcctgccctgttcgtggccctgaccttcgagcggcgggaggtcctggactcctccaatatcaaaccaatgaacctgatcggcgtggcaagaggcgaaaacatccccgccgtgatcgccctgaccgaccccgagggctgcccactgagccggtttaaggatagcctgggaaacccaacccacatcctgagaatcggcgagagctataaggagaagcagcggaccatccaggccaagaaggaggtggagcagcggagagccggcggctacagccggaagtacgccagcaaagccaagaatctggcagacgatatggtgagaaacaccgctagagatctgctgtactacgccgtgacccaggatgccatgctgatcttcgccaacctgagccggggcttcggccggcagggcaagcggaccttcatggccgagagacagtacacacggatggaggactggctgaccgccaagctggcctacgagggcctgagcaagacctacctgtccaagacactggcccagtacacctccaagacatgcagcaactgtgggtttaccatcaccagcgccgactacgacagggtgctggagaagctgaagaagacagcaacaggctggatgaccacaattaacggcaaggagctgaaggtggagggccagattacctactacaacagatacaagagacagaacgtagtcaaggacctgtccgtcgagctggatagactgagcgaagaatctgtgaacaacgacatctcctcctggacaaagggcagaagcggagaagctctgagcctcctgaagaaaagattctcccatagacccgtgcaggagaagttcgtgtgcctgaactgcggcttcgagacacacgcagccgagcaagccgccctgaacatcgccagatcctggctgttcctgcggagccaggagtacaagaaataccagacaaacaagacaaccggcaacaccgataagagagccttcgtcgagacctggcagtccttttaccggaagaagcttaaggaggtgtggaaacctgccgtgcggtctggcggatctggcggaggctcctacccaggaccccgtggtgttcgaggacgtggccgtggacttcacccaggaggagtgggccctgctgaacctggcccagaggaacctgtacagggacgtgatgctggagaacttccagaacctggccagcctgggctaccccctgcacatcccctacctgatcagccagtggaagcaggaggaggacctgggcaccgtggagaggggcaccatccagggcgagcaccaggagggcttcgagaccggatctggctccggcagcggccccaagaaaaagagaaaagtctaagctgccttctgcggggcttgccttctggccatgcccttcttctctcccttgcacctgtacctcttggtctttgaataaagcctgagtaggaaggctagcaaaaaaaaaaaaaaaaaaaaaaaaaaaaaaaaaaaaaaaaaaaaaaaaaaaaaaaaaaaaaaaaaaaaaaaaaaaaaaaa

SEQ ID NO: 15761 - RNA, 9485 nt, synthetic construct
  source 1..9485: mol_type = other RNA
aggaaataagagagaaaagaagagtaagaagaaatataagagccaccatggcccctaagaagaagcgtaaagtgagccggatggaacgcctcgtctacgaggtgcggcagaagtgcagaaacatcgaggacatctgcatctcctgcggatctctgaacgtgaccctggagcacccactgttcatcggcggcatgtgccagaactgtaaaaactgttttctggagtgtgcctatcaatacgacgatgacggctaccagagctactgcaccatctgttgcggcggaagagaggtgctgatgtgtggaaataacaactgctgccggtgcttctgcgtggaatgcgtggacctgctggtgggccccggcgccgcccaggccgctattaaggaagatccttggaactgctacatgtgcggccacaagggcacatacggcctgctgagacggagagaggactggcctagcagactgcagatgttcttcgccaataaccacgaccaggagttcgacccccctaaggtgtaccctcccgtccccgccgagaagagaaagcccatccgggtcctgagcctgttcgatggcatcgccaccggtctgctggtgctgaaggacctgggcatccaggtggataggtacattgcctccgaggtgtgcgaggactccatcaccgtgggaatggtgcgtcatcagggcaagatcatgtacgtgggcgacgtgcggagcgtgacacagaagcatatccaggagtggggccctttcgacctggtgatcggcggcagcccttgcaatgacctgagcatcgtgaacccagcccggaagggcctgtacgagggaaccggcagactgttcttcgagttttacagactgctgcacgacgcccggcctaaggaaggcgacgaccggcccttcttttggctgttcgagaatgtggtggccatgggagtcagcgacaagcgggatattagccggttcctggagagcaaccccgtgatgatcgatgccaaggaagtgagcgccgcccaccgggccagatacttctggggcaatctgcctggcatgaacagacccctggccagcaccgtgaacgacaagctggagctgcaggagtgcctggagcacggccggatcgccaagttcagcaaggtgagaaccatcaccacccgaagcaacagcatcaaacaaggcaaggaccagcactttcctgtgttcatgaacgagaaggaggacatcctgtggtgtaccgagatggagagagtgttcgggttcccagtccactacacagatgtcagcaacatgtctagactggccagacagagactgctgggaagaagctggtccgtccctgtgatcagacacctgttcgcccctctgaaggagtacttcgcctgcgtgagcagcggcaacagcaacgccaacagccggggccccagcttctctagcggcctggtgccactgtccctgagagggagccacatgggccccatggagatctacaaaaccgtgagcgcctggaagcggcagcctgtgcgcgtgctgagcctgtttcggaatatcgataaagtcctgaaaagcctgggattcctggagagcggctctggctccggcggtggcaccctgaagtacgtggaggatgtgacaaacgtggtcagacgggatgtggagaagtggggccccttcgatctggtgtacggcagcacccaacccctgggcagctcttgtgaccggtgccctggctggtacatgtttcagttccaccggatcctgcagtacgccctgccgagacaggagtcccagcggccattcttttggattttcatggacaacttgctgctgaccgaggatgaccaggaaactaccactcggttcctgcagaccgaagccgtgaccctgcaggacgtgagaggccgggactaccagaacgccatgcgggtgtggtccaacatccctggactgaaaagcaagcacgcacctctgacccctaaagaagaggagtacctgcaggcccaggtgcggagcagaagcaagctggacgcccctaaggtggatctgctggtgaagaattgcctcctgcccctgagagagtacttcaagtatttcagccagaatagtctgcccctgggaggcagcggcggcggcgccctggtgacatttgaggacgtcgccgtgcggttcacccaggaggaatgggctctgctggatccttctcagaaaatcctgtaccgggacgtgatgagagagacataccggaatctgacctccgtgggcatcaactgggaatgttgggaccttgaagcctgcttcagaagcctgggaagaaacctgagagtgcaggtggtgaagagaaagtgcgagctgaccaacagcggcccctgcgccgagggcggcccaagcagcggcgcccctcctcccagcggcggcagcccagccggctccccaacctctaccgaggagggcacctctgagtccgccacccccgagagcggccctggcacctccaccgagcccagcgagggcagcgcacccggcagccctgccggcagccccacctccacagaggagggaaccagcaccgagcccagcgaaggcagcgccccaggcaccagcaccgagcctagtgagcaggagattaaacggatcaacaagatcagaagaagacttgtgaaagacagcaacaccaagaaggccggcaagacaggccccatgaaaaccctgctggttagagtgatgacacccgatctgagagagcggctggaaaacctgagaaagaagcctgaaaatatcccccagcccatcagcaatacatctagagccaacctgaataagctgctgaccgattacaccgaaatgaagaaggcgatcctgcatgtgtactgggaagagttccagaaggaccctgtgggcctgatgagccgggtggcccagcctgccagcaagaagatcgatcagaacaagctgaaacctgagatggacgagaagggcaacctgaccaccgccggctttgcctgctctcagtgtggccagcccctgttcgtgtacaagctggagcaggtgtctgagaagggcaaggcttacaccaactacttcggacggtgcaatgtggccgagcacgaaaagctgatcctgctggcccagctgaagcccgagaaggatagcgacgaagccgtgacatatagcctgggaaagtttgggcagagggccctggatttctacagcattcatgtgaccaaggagtccacccaccccgtgaagcccctggcccagatcgccggaaacagatacgcctccggacctgtgggaaaggccctgagcgacgcatgtatgggcacaatcgcctccttcctgtctaagtaccaggacatcatcatcgaacaccagaaggtggtgaagggcaaccagaagagactggagagcctgcgggagctggccggcaaggaaaacctggaataccctagcgtgaccctgccacctcagcctcacaccaaggagggcgttgatgcctacaacgaagtgatcgcccgggtgcgaatgtgggtgaacctgaacctgtggcagaagctgaagctaagcagagatgatgccaagcctctgctgagactgaagggattcccttcctttcctctggtcgagagacaggccaacgaagtggactggtgggacatggtgtgtaacgtgaagaagctgatcaacgagaaaaaggaggatggcaaggtgttttggcagaatctggctggctacaagagacaggaagccctgagaccatacctgagcagcgaggaagatcggaagaagggaaagaaattcgctcggtaccagctgggcgacctgctgctgcacctggaaaagaagcacggcgaggactggggaaaggtgtacgacgaggcctgggagcggattgacaagaaagtggaaggcctgagcaagcacatcaagctggaagaggaacggagaagcgaggacgcccagagcaaggccgccctgaccgactggctgcgggctaaggccagcttcgtgatcgagggcctgaaggaggccgacaaggacgagttctgcagatgcgagctgaagctgcagaagtggtacggggacctgcggggaaagcccttcgccatcgaagccgagaacagcatcctggacatcagcggcttcagcaagcagtacaactgtgccttcatctggcagaaggacggcgtgaagaagctgaacctgtacctgatcatcaactacttcaagggcggcaagctgcggttcaagaagatcaaacctgaagccttcgaagccaacagattctacaccgtgatcaacaaaaagagcggcgagatcgtgcccatggaggtgaacttcaacttcgacgaccccaacctgatcatcctgcctctggcctttggcaagagacagggcagagaattcatctggaacgacctgctgtccctggaaaccggcagcctgaagctggccaacggaagagtgatcgagaagacactgtacaacagaagaacccggcaggatgagcctgccctgttcgtggccctgaccttcgagcggcgggaggtcctggactcctccaatatcaaaccaatgaacctgatcggcgtggcaagaggcgaaaacatccccgccgtgatcgccctgaccgaccccgagggctgcccactgagccggtttaaggatagcctgggaaacccaacccacatcctgagaatcggcgagagctataaggagaagcagcggaccatccaggccaagaaggaggtggagcagcggagagccggcggctacagccggaagtacgccagcaaagccaagaatctggcagacgatatggtgagaaacaccgctagagatctgctgtactacgccgtgacccaggatgccatgctgatcttcgccaacctgagccggggcttcggccggcagggcaagcggaccttcatggccgagagacagtacacacggatggaggactggctgaccgccaagctggcctacgagggcctgagcaagacctacctgtccaagacactggcccagtacacctccaagacatgcagcaactgtgggtttaccatcaccagcgccgactacgacagggtgctggagaagctgaagaagacagcaacaggctggatgaccacaattaacggcaaggagctgaaggtggagggccagattacctactacaacagatacaagagacagaacgtagtcaaggacctgtccgtcgagctggatagactgagcgaagaatctgtgaacaacgacatctcctcctggacaaagggcagaagcggagaagctctgagcctcctgaagaaaagattctcccatagacccgtgcaggagaagttcgtgtgcctgaactgcggcttcgagacacacgcagccgagcaagccgccctgaacatcgccagatcctggctgttcctgcggagccaggagtacaagaaataccagacaaacaagacaaccggcaacaccgataagagagccttcgtcgagacctggcagtccttttaccggaagaagcttaaggaggtgtggaaacctgccgtgcggtctggcggatctggcggaggctccagcaaggtgcccgtgaccttcggcgacctggccatctacttcagccaggaggagtgggagtggctgagccccatccagaaggacctgtacgaggacgtgatgctggagaactaccagaacctggtgagcctgggcctgagcttcaggaggcccaacgtgatcaccctgctggagaagggcagggccccctggatggtggagcccgtgaggaagaggaggggcctggacagcaggagcaagtacggcggcccaagcagcggcgcccctcctcccagcggcggcagcccagccggctccccaacctctaccgaggagggcacctctgagtccgccacccccgagagcggccctggcacctccaccgagcccagcgagggcagcgcacccggcagccctgccggcagccccacctccacagaggagggaaccagcaccgagcccagcgaaggcagcgccccaggcaccagcaccgagcctagtgagcaggagattaaacggatcaacaagatcagaagaagacttgtgaaagacagcaacaccaagaaggccggcaagacaggccccatgaaaaccctgctggttagagtgatgacacccgatctgagagagcggctggaaaacctgagaaagaagcctgaaaatatcccccagcccatcagcaatacatctagagccaacctgaataagctgctgaccgattacaccgaaatgaagaaggcgatcctgcatgtgtactgggaagagttccagaaggaccctgtgggcctgatgagccgggtggcccagcctgccagcaagaagatcgatcagaacaagctgaaacctgagatggacgagaagggcaacctgaccaccgccggctttgcctgctctcagtgtggccagcccctgttcgtgtacaagctggagcaggtgtctgagaagggcaaggcttacaccaactacttcggacggtgcaatgtggccgagcacgaaaagctgatcctgctggcccagctgaagcccgagaaggatagcgacgaagccgtgacatatagcctgggaaagtttgggcagagggccctggatttctacagcattcatgtgaccaaggagtccacccaccccgtgaagcccctggcccagatcgccggaaacagatacgcctccggacctgtgggaaaggccctgagcgacgcatgtatgggcacaatcgcctccttcctgtctaagtaccaggacatcatcatcgaacaccagaaggtggtgaagggcaaccagaagagactggagagcctgcgggagctggccggcaaggaaaacctggaataccctagcgtgaccctgccacctcagcctcacaccaaggagggcgttgatgcctacaacgaagtgatcgcccgggtgcgaatgtgggtgaacctgaacctgtggcagaagctgaagctaagcagagatgatgccaagcctctgctgagactgaagggattcccttcctttcctctggtcgagagacaggccaacgaagtggactggtgggacatggtgtgtaacgtgaagaagctgatcaacgagaaaaaggaggatggcaaggtgttttggcagaatctggctggctacaagagacaggaagccctgagaccatacctgagcagcgaggaagatcggaagaagggaaagaaattcgctcggtaccagctgggcgacctgctgctgcacctggaaaagaagcacggcgaggactggggaaaggtgtacgacgaggcctgggagcggattgacaagaaagtggaaggcctgagcaagcacatcaagctggaagaggaacggagaagcgaggacgcccagagcaaggccgccctgaccgactggctgcgggctaaggccagcttcgtgatcgagggcctgaaggaggccgacaaggacgagttctgcagatgcgagctgaagctgcagaagtggtacggggacctgcggggaaagcccttcgccatcgaagccgagaacagcatcctggacatcagcggcttcagcaagcagtacaactgtgccttcatctggcagaaggacggcgtgaagaagctgaacctgtacctgatcatcaactacttcaagggcggcaagctgcggttcaagaagatcaaacctgaagccttcgaagccaacagattctacaccgtgatcaacaaaaagagcggcgagatcgtgcccatggaggtgaacttcaacttcgacgaccccaacctgatcatcctgcctctggcctttggcaagagacagggcagagaattcatctggaacgacctgctgtccctggaaaccggcagcctgaagctggccaacggaagagtgatcgagaagacactgtacaacagaagaacccggcaggatgagcctgccctgttcgtggccctgaccttcgagcggcgggaggtcctggactcctccaatatcaaaccaatgaacctgatcggcgtggcaagaggcgaaaacatccccgccgtgatcgccctgaccgaccccgagggctgcccactgagccggtttaaggatagcctgggaaacccaacccacatcctgagaatcggcgagagctataaggagaagcagcggaccatccaggccaagaaggaggtggagcagcggagagccggcggctacagccggaagtacgccagcaaagccaagaatctggcagacgatatggtgagaaacaccgctagagatctgctgtactacgccgtgacccaggatgccatgctgatcttcgccaacctgagccggggcttcggccggcagggcaagcggaccttcatggccgagagacagtacacacggatggaggactggctgaccgccaagctggcctacgagggcctgagcaagacctacctgtccaagacactggcccagtacacctccaagacatgcagcaactgtgggtttaccatcaccagcgccgactacgacagggtgctggagaagctgaagaagacagcaacaggctggatgaccacaattaacggcaaggagctgaaggtggagggccagattacctactacaacagatacaagagacagaacgtagtcaaggacctgtccgtcgagctggatagactgagcgaagaatctgtgaacaacgacatctcctcctggacaaagggcagaagcggagaagctctgagcctcctgaagaaaagattctcccatagacccgtgcaggagaagttcgtgtgcctgaactgcggcttcgagacacacgcagccgagcaagccgccctgaacatcgccagatcctggctgttcctgcggagccaggagtacaagaaataccagacaaacaagacaaccggcaacaccgataagagagccttcgtcgagacctggcagtccttttaccggaagaagcttaaggaggtgtggaaacctgccgtgcggtctggcggatctggcggaggctcctagcaaggtgcccgtgaccttcggcgacctggccatctacttcagccaggaggagtgggagtggctgagccccatccagaaggacctgtacgaggacgtgatgctggagaactaccagaacctggtgagcctgggcctgagcttcaggaggcccaacgtgatcaccctgctggagaagggcagggccccctggatggtggagcccgtgaggaagaggaggggcctggacagcaggagcaagtacggatctggctccggcagcggccccaagaaaaagagaaaagtctaagctgccttctgcggggcttgccttctggccatgcccttcttctctcccttgcacctgtacctcttggtctttgaataaagcctgagtaggaaggctagcaaaaaaaaaaaaaaaaaaaaaaaaaaaaaaaaaaaaaaaaaaaaaaaaaaaaaaaaaaaaaaaaaaaaaaaaaaaaaaaa

SEQ ID NO: 15762 - RNA, 9485 nt, synthetic construct
  source 1..9485: mol_type = other RNA
aggaaataagagagaaaagaagagtaagaagaaatataagagccaccatggcccctaagaagaagcgtaaagtgagccggatggaacgcctcgtctacgaggtgcggcagaagtgcagaaacatcgaggacatctgcatctcctgcggatctctgaacgtgaccctggagcacccactgttcatcggcggcatgtgccagaactgtaaaaactgttttctggagtgtgcctatcaatacgacgatgacggctaccagagctactgcaccatctgttgcggcggaagagaggtgctgatgtgtggaaataacaactgctgccggtgcttctgcgtggaatgcgtggacctgctggtgggccccggcgccgcccaggccgctattaaggaagatccttggaactgctacatgtgcggccacaagggcacatacggcctgctgagacggagagaggactggcctagcagactgcagatgttcttcgccaataaccacgaccaggagttcgacccccctaaggtgtaccctcccgtccccgccgagaagagaaagcccatccgggtcctgagcctgttcgatggcatcgccaccggtctgctggtgctgaaggacctgggcatccaggtggataggtacattgcctccgaggtgtgcgaggactccatcaccgtgggaatggtgcgtcatcagggcaagatcatgtacgtgggcgacgtgcggagcgtgacacagaagcatatccaggagtggggccctttcgacctggtgatcggcggcagcccttgcaatgacctgagcatcgtgaacccagcccggaagggcctgtacgagggaaccggcagactgttcttcgagttttacagactgctgcacgacgcccggcctaaggaaggcgacgaccggcccttcttttggctgttcgagaatgtggtggccatgggagtcagcgacaagcgggatattagccggttcctggagagcaaccccgtgatgatcgatgccaaggaagtgagcgccgcccaccgggccagatacttctggggcaatctgcctggcatgaacagacccctggccagcaccgtgaacgacaagctggagctgcaggagtgcctggagcacggccggatcgccaagttcagcaaggtgagaaccatcaccacccgaagcaacagcatcaaacaaggcaaggaccagcactttcctgtgttcatgaacgagaaggaggacatcctgtggtgtaccgagatggagagagtgttcgggttcccagtccactacacagatgtcagcaacatgtctagactggccagacagagactgctgggaagaagctggtccgtccctgtgatcagacacctgttcgcccctctgaaggagtacttcgcctgcgtgagcagcggcaacagcaacgccaacagccggggccccagcttctctagcggcctggtgccactgtccctgagagggagccacatgggccccatggagatctacaaaaccgtgagcgcctggaagcggcagcctgtgcgcgtgctgagcctgtttcggaatatcgataaagtcctgaaaagcctgggattcctggagagcggctctggctccggcggtggcaccctgaagtacgtggaggatgtgacaaacgtggtcagacgggatgtggagaagtggggccccttcgatctggtgtacggcagcacccaacccctgggcagctcttgtgaccggtgccctggctggtacatgtttcagttccaccggatcctgcagtacgccctgccgagacaggagtcccagcggccattcttttggattttcatggacaacttgctgctgaccgaggatgaccaggaaactaccactcggttcctgcagaccgaagccgtgaccctgcaggacgtgagaggccgggactaccagaacgccatgcgggtgtggtccaacatccctggactgaaaagcaagcacgcacctctgacccctaaagaagaggagtacctgcaggcccaggtgcggagcagaagcaagctggacgcccctaaggtggatctgctggtgaagaattgcctcctgcccctgagagagtacttcaagtatttcagccagaatagtctgcccctgggaggcagcggcggcggcgccctggtgacatttgaggacgtcgccgtgcggttcacccaggaggaatgggctctgctggatccttctcagaaaatcctgtaccgggacgtgatgagagagacataccggaatctgacctccgtgggcatcaactgggaatgttgggaccttgaagcctgcttcagaagcctgggaagaaacctgagagtgcaggtggtgaagagaaagtgcgagctgaccaacagcggcccctgcgccgagggcggcccaagcagcggcgcccctcctcccagcggcggcagcccagccggctccccaacctctaccgaggagggcacctctgagtccgccacccccgagagcggccctggcacctccaccgagcccagcgagggcagcgcacccggcagccctgccggcagccccacctccacagaggagggaaccagcaccgagcccagcgaaggcagcgccccaggcaccagcaccgagcctagtgagcaggagattaaacggatcaacaagatcagaagaagacttgtgaaagacagcaacaccaagaaggccggcaagacaggccccatgaaaaccctgctggttagagtgatgacacccgatctgagagagcggctggaaaacctgagaaagaagcctgaaaatatcccccagcccatcagcaatacatctagagccaacctgaataagctgctgaccgattacaccgaaatgaagaaggcgatcctgcatgtgtactgggaagagttccagaaggaccctgtgggcctgatgagccgggtggcccagcctgccagcaagaagatcgatcagaacaagctgaaacctgagatggacgagaagggcaacctgaccaccgccggctttgcctgctctcagtgtggccagcccctgttcgtgtacaagctggagcaggtgtctgagaagggcaaggcttacaccaactacttcggacggtgcaatgtggccgagcacgaaaagctgatcctgctggcccagctgaagcccgagaaggatagcgacgaagccgtgacatatagcctgggaaagtttgggcagagggccctggatttctacagcattcatgtgaccaaggagtccacccaccccgtgaagcccctggcccagatcgccggaaacagatacgcctccggacctgtgggaaaggccctgagcgacgcatgtatgggcacaatcgcctccttcctgtctaagtaccaggacatcatcatcgaacaccagaaggtggtgaagggcaaccagaagagactggagagcctgcgggagctggccggcaaggaaaacctggaataccctagcgtgaccctgccacctcagcctcacaccaaggagggcgttgatgcctacaacgaagtgatcgcccgggtgcgaatgtgggtgaacctgaacctgtggcagaagctgaagctaagcagagatgatgccaagcctctgctgagactgaagggattcccttcctttcctctggtcgagagacaggccaacgaagtggactggtgggacatggtgtgtaacgtgaagaagctgatcaacgagaaaaaggaggatggcaaggtgttttggcagaatctggctggctacaagagacaggaagccctgagaccatacctgagcagcgaggaagatcggaagaagggaaagaaattcgctcggtaccagctgggcgacctgctgctgcacctggaaaagaagcacggcgaggactggggaaaggtgtacgacgaggcctgggagcggattgacaagaaagtggaaggcctgagcaagcacatcaagctggaagaggaacggagaagcgaggacgcccagagcaaggccgccctgaccgactggctgcgggctaaggccagcttcgtgatcgagggcctgaaggaggccgacaaggacgagttctgcagatgcgagctgaagctgcagaagtggtacggggacctgcggggaaagcccttcgccatcgaagccgagaacagcatcctggacatcagcggcttcagcaagcagtacaactgtgccttcatctggcagaaggacggcgtgaagaagctgaacctgtacctgatcatcaactacttcaagggcggcaagctgcggttcaagaagatcaaacctgaagccttcgaagccaacagattctacaccgtgatcaacaaaaagagcggcgagatcgtgcccatggaggtgaacttcaacttcgacgaccccaacctgatcatcctgcctctggcctttggcaagagacagggcagagaattcatctggaacgacctgctgtccctggaaaccggcagcctgaagctggccaacggaagagtgatcgagaagacactgtacaacagaagaacccggcaggatgagcctgccctgttcgtggccctgaccttcgagcggcgggaggtcctggactcctccaatatcaaaccaatgaacctgatcggcgtggcaagaggcgaaaacatccccgccgtgatcgccctgaccgaccccgagggctgcccactgagccggtttaaggatagcctgggaaacccaacccacatcctgagaatcggcgagagctataaggagaagcagcggaccatccaggccaagaaggaggtggagcagcggagagccggcggctacagccggaagtacgccagcaaagccaagaatctggcagacgatatggtgagaaacaccgctagagatctgctgtactacgccgtgacccaggatgccatgctgatcttcgccaacctgagccggggcttcggccggcagggcaagcggaccttcatggccgagagacagtacacacggatggaggactggctgaccgccaagctggcctacgagggcctgagcaagacctacctgtccaagacactggcccagtacacctccaagacatgcagcaactgtgggtttaccatcaccagcgccgactacgacagggtgctggagaagctgaagaagacagcaacaggctggatgaccacaattaacggcaaggagctgaaggtggagggccagattacctactacaacagatacaagagacagaacgtagtcaaggacctgtccgtcgagctggatagactgagcgaagaatctgtgaacaacgacatctcctcctggacaaagggcagaagcggagaagctctgagcctcctgaagaaaagattctcccatagacccgtgcaggagaagttcgtgtgcctgaactgcggcttcgagacacacgcagccgagcaagccgccctgaacatcgccagatcctggctgttcctgcggagccaggagtacaagaaataccagacaaacaagacaaccggcaacaccgataagagagccttcgtcgagacctggcagtccttttaccggaagaagcttaaggaggtgtggaaacctgccgtgcggtctggcggatctggcggaggctccttccaggagcccgtgaccttcgaggacgtggccgtgtacttcacccagaacgagtgggccagcctgcaccccacccagagggccctgtacaggggcgtgatgctggagaactacgccaacgtgaccagcctgagcgccttccccttccccaagcccgacctgatcttccagctggagcagggcgaggccgcctggggccccgacccctggaccctggacggcggcgaggccctgaggggcatgggcggcccaagcagcggcgcccctcctcccagcggcggcagcccagccggctccccaacctctaccgaggagggcacctctgagtccgccacccccgagagcggccctggcacctccaccgagcccagcgagggcagcgcacccggcagccctgccggcagccccacctccacagaggagggaaccagcaccgagcccagcgaaggcagcgccccaggcaccagcaccgagcctagtgagcaggagattaaacggatcaacaagatcagaagaagacttgtgaaagacagcaacaccaagaaggccggcaagacaggccccatgaaaaccctgctggttagagtgatgacacccgatctgagagagcggctggaaaacctgagaaagaagcctgaaaatatcccccagcccatcagcaatacatctagagccaacctgaataagctgctgaccgattacaccgaaatgaagaaggcgatcctgcatgtgtactgggaagagttccagaaggaccctgtgggcctgatgagccgggtggcccagcctgccagcaagaagatcgatcagaacaagctgaaacctgagatggacgagaagggcaacctgaccaccgccggctttgcctgctctcagtgtggccagcccctgttcgtgtacaagctggagcaggtgtctgagaagggcaaggcttacaccaactacttcggacggtgcaatgtggccgagcacgaaaagctgatcctgctggcccagctgaagcccgagaaggatagcgacgaagccgtgacatatagcctgggaaagtttgggcagagggccctggatttctacagcattcatgtgaccaaggagtccacccaccccgtgaagcccctggcccagatcgccggaaacagatacgcctccggacctgtgggaaaggccctgagcgacgcatgtatgggcacaatcgcctccttcctgtctaagtaccaggacatcatcatcgaacaccagaaggtggtgaagggcaaccagaagagactggagagcctgcgggagctggccggcaaggaaaacctggaataccctagcgtgaccctgccacctcagcctcacaccaaggagggcgttgatgcctacaacgaagtgatcgcccgggtgcgaatgtgggtgaacctgaacctgtggcagaagctgaagctaagcagagatgatgccaagcctctgctgagactgaagggattcccttcctttcctctggtcgagagacaggccaacgaagtggactggtgggacatggtgtgtaacgtgaagaagctgatcaacgagaaaaaggaggatggcaaggtgttttggcagaatctggctggctacaagagacaggaagccctgagaccatacctgagcagcgaggaagatcggaagaagggaaagaaattcgctcggtaccagctgggcgacctgctgctgcacctggaaaagaagcacggcgaggactggggaaaggtgtacgacgaggcctgggagcggattgacaagaaagtggaaggcctgagcaagcacatcaagctggaagaggaacggagaagcgaggacgcccagagcaaggccgccctgaccgactggctgcgggctaaggccagcttcgtgatcgagggcctgaaggaggccgacaaggacgagttctgcagatgcgagctgaagctgcagaagtggtacggggacctgcggggaaagcccttcgccatcgaagccgagaacagcatcctggacatcagcggcttcagcaagcagtacaactgtgccttcatctggcagaaggacggcgtgaagaagctgaacctgtacctgatcatcaactacttcaagggcggcaagctgcggttcaagaagatcaaacctgaagccttcgaagccaacagattctacaccgtgatcaacaaaaagagcggcgagatcgtgcccatggaggtgaacttcaacttcgacgaccccaacctgatcatcctgcctctggcctttggcaagagacagggcagagaattcatctggaacgacctgctgtccctggaaaccggcagcctgaagctggccaacggaagagtgatcgagaagacactgtacaacagaagaacccggcaggatgagcctgccctgttcgtggccctgaccttcgagcggcgggaggtcctggactcctccaatatcaaaccaatgaacctgatcggcgtggcaagaggcgaaaacatccccgccgtgatcgccctgaccgaccccgagggctgcccactgagccggtttaaggatagcctgggaaacccaacccacatcctgagaatcggcgagagctataaggagaagcagcggaccatccaggccaagaaggaggtggagcagcggagagccggcggctacagccggaagtacgccagcaaagccaagaatctggcagacgatatggtgagaaacaccgctagagatctgctgtactacgccgtgacccaggatgccatgctgatcttcgccaacctgagccggggcttcggccggcagggcaagcggaccttcatggccgagagacagtacacacggatggaggactggctgaccgccaagctggcctacgagggcctgagcaagacctacctgtccaagacactggcccagtacacctccaagacatgcagcaactgtgggtttaccatcaccagcgccgactacgacagggtgctggagaagctgaagaagacagcaacaggctggatgaccacaattaacggcaaggagctgaaggtggagggccagattacctactacaacagatacaagagacagaacgtagtcaaggacctgtccgtcgagctggatagactgagcgaagaatctgtgaacaacgacatctcctcctggacaaagggcagaagcggagaagctctgagcctcctgaagaaaagattctcccatagacccgtgcaggagaagttcgtgtgcctgaactgcggcttcgagacacacgcagccgagcaagccgccctgaacatcgccagatcctggctgttcctgcggagccaggagtacaagaaataccagacaaacaagacaaccggcaacaccgataagagagccttcgtcgagacctggcagtccttttaccggaagaagcttaaggaggtgtggaaacctgccgtgcggtctggcggatctggcggaggctcctttccaggagcccgtgaccttcgaggacgtggccgtgtacttcacccagaacgagtgggccagcctgcaccccacccagagggccctgtacaggggcgtgatgctggagaactacgccaacgtgaccagcctgagcgccttccccttccccaagcccgacctgatcttccagctggagcagggcgaggccgcctggggccccgacccctggaccctggacggcggcgaggccctgaggggcatgggatctggctccggcagcggccccaagaaaaagagaaaagtctaagctgccttctgcggggcttgccttctggccatgcccttcttctctcccttgcacctgtacctcttggtctttgaataaagcctgagtaggaaggctagcaaaaaaaaaaaaaaaaaaaaaaaaaaaaaaaaaaaaaaaaaaaaaaaaaaaaaaaaaaaaaaaaaaaaaaaaaaaaaaaa

SEQ ID NO: 15763 - RNA, 9485 nt, synthetic construct
  source 1..9485: mol_type = other RNA
aggaaataagagagaaaagaagagtaagaagaaatataagagccaccatggcccctaagaagaagcgtaaagtgagccggatggaacgcctcgtctacgaggtgcggcagaagtgcagaaacatcgaggacatctgcatctcctgcggatctctgaacgtgaccctggagcacccactgttcatcggcggcatgtgccagaactgtaaaaactgttttctggagtgtgcctatcaatacgacgatgacggctaccagagctactgcaccatctgttgcggcggaagagaggtgctgatgtgtggaaataacaactgctgccggtgcttctgcgtggaatgcgtggacctgctggtgggccccggcgccgcccaggccgctattaaggaagatccttggaactgctacatgtgcggccacaagggcacatacggcctgctgagacggagagaggactggcctagcagactgcagatgttcttcgccaataaccacgaccaggagttcgacccccctaaggtgtaccctcccgtccccgccgagaagagaaagcccatccgggtcctgagcctgttcgatggcatcgccaccggtctgctggtgctgaaggacctgggcatccaggtggataggtacattgcctccgaggtgtgcgaggactccatcaccgtgggaatggtgcgtcatcagggcaagatcatgtacgtgggcgacgtgcggagcgtgacacagaagcatatccaggagtggggccctttcgacctggtgatcggcggcagcccttgcaatgacctgagcatcgtgaacccagcccggaagggcctgtacgagggaaccggcagactgttcttcgagttttacagactgctgcacgacgcccggcctaaggaaggcgacgaccggcccttcttttggctgttcgagaatgtggtggccatgggagtcagcgacaagcgggatattagccggttcctggagagcaaccccgtgatgatcgatgccaaggaagtgagcgccgcccaccgggccagatacttctggggcaatctgcctggcatgaacagacccctggccagcaccgtgaacgacaagctggagctgcaggagtgcctggagcacggccggatcgccaagttcagcaaggtgagaaccatcaccacccgaagcaacagcatcaaacaaggcaaggaccagcactttcctgtgttcatgaacgagaaggaggacatcctgtggtgtaccgagatggagagagtgttcgggttcccagtccactacacagatgtcagcaacatgtctagactggccagacagagactgctgggaagaagctggtccgtccctgtgatcagacacctgttcgcccctctgaaggagtacttcgcctgcgtgagcagcggcaacagcaacgccaacagccggggccccagcttctctagcggcctggtgccactgtccctgagagggagccacatgggccccatggagatctacaaaaccgtgagcgcctggaagcggcagcctgtgcgcgtgctgagcctgtttcggaatatcgataaagtcctgaaaagcctgggattcctggagagcggctctggctccggcggtggcaccctgaagtacgtggaggatgtgacaaacgtggtcagacgggatgtggagaagtggggccccttcgatctggtgtacggcagcacccaacccctgggcagctcttgtgaccggtgccctggctggtacatgtttcagttccaccggatcctgcagtacgccctgccgagacaggagtcccagcggccattcttttggattttcatggacaacttgctgctgaccgaggatgaccaggaaactaccactcggttcctgcagaccgaagccgtgaccctgcaggacgtgagaggccgggactaccagaacgccatgcgggtgtggtccaacatccctggactgaaaagcaagcacgcacctctgacccctaaagaagaggagtacctgcaggcccaggtgcggagcagaagcaagctggacgcccctaaggtggatctgctggtgaagaattgcctcctgcccctgagagagtacttcaagtatttcagccagaatagtctgcccctgggaggcagcggcggcggcgccctggtgacatttgaggacgtcgccgtgcggttcacccaggaggaatgggctctgctggatccttctcagaaaatcctgtaccgggacgtgatgagagagacataccggaatctgacctccgtgggcatcaactgggaatgttgggaccttgaagcctgcttcagaagcctgggaagaaacctgagagtgcaggtggtgaagagaaagtgcgagctgaccaacagcggcccctgcgccgagggcggcccaagcagcggcgcccctcctcccagcggcggcagcccagccggctccccaacctctaccgaggagggcacctctgagtccgccacccccgagagcggccctggcacctccaccgagcccagcgagggcagcgcacccggcagccctgccggcagccccacctccacagaggagggaaccagcaccgagcccagcgaaggcagcgccccaggcaccagcaccgagcctagtgagcaggagattaaacggatcaacaagatcagaagaagacttgtgaaagacagcaacaccaagaaggccggcaagacaggccccatgaaaaccctgctggttagagtgatgacacccgatctgagagagcggctggaaaacctgagaaagaagcctgaaaatatcccccagcccatcagcaatacatctagagccaacctgaataagctgctgaccgattacaccgaaatgaagaaggcgatcctgcatgtgtactgggaagagttccagaaggaccctgtgggcctgatgagccgggtggcccagcctgccagcaagaagatcgatcagaacaagctgaaacctgagatggacgagaagggcaacctgaccaccgccggctttgcctgctctcagtgtggccagcccctgttcgtgtacaagctggagcaggtgtctgagaagggcaaggcttacaccaactacttcggacggtgcaatgtggccgagcacgaaaagctgatcctgctggcccagctgaagcccgagaaggatagcgacgaagccgtgacatatagcctgggaaagtttgggcagagggccctggatttctacagcattcatgtgaccaaggagtccacccaccccgtgaagcccctggcccagatcgccggaaacagatacgcctccggacctgtgggaaaggccctgagcgacgcatgtatgggcacaatcgcctccttcctgtctaagtaccaggacatcatcatcgaacaccagaaggtggtgaagggcaaccagaagagactggagagcctgcgggagctggccggcaaggaaaacctggaataccctagcgtgaccctgccacctcagcctcacaccaaggagggcgttgatgcctacaacgaagtgatcgcccgggtgcgaatgtgggtgaacctgaacctgtggcagaagctgaagctaagcagagatgatgccaagcctctgctgagactgaagggattcccttcctttcctctggtcgagagacaggccaacgaagtggactggtgggacatggtgtgtaacgtgaagaagctgatcaacgagaaaaaggaggatggcaaggtgttttggcagaatctggctggctacaagagacaggaagccctgagaccatacctgagcagcgaggaagatcggaagaagggaaagaaattcgctcggtaccagctgggcgacctgctgctgcacctggaaaagaagcacggcgaggactggggaaaggtgtacgacgaggcctgggagcggattgacaagaaagtggaaggcctgagcaagcacatcaagctggaagaggaacggagaagcgaggacgcccagagcaaggccgccctgaccgactggctgcgggctaaggccagcttcgtgatcgagggcctgaaggaggccgacaaggacgagttctgcagatgcgagctgaagctgcagaagtggtacggggacctgcggggaaagcccttcgccatcgaagccgagaacagcatcctggacatcagcggcttcagcaagcagtacaactgtgccttcatctggcagaaggacggcgtgaagaagctgaacctgtacctgatcatcaactacttcaagggcggcaagctgcggttcaagaagatcaaacctgaagccttcgaagccaacagattctacaccgtgatcaacaaaaagagcggcgagatcgtgcccatggaggtgaacttcaacttcgacgaccccaacctgatcatcctgcctctggcctttggcaagagacagggcagagaattcatctggaacgacctgctgtccctggaaaccggcagcctgaagctggccaacggaagagtgatcgagaagacactgtacaacagaagaacccggcaggatgagcctgccctgttcgtggccctgaccttcgagcggcgggaggtcctggactcctccaatatcaaaccaatgaacctgatcggcgtggcaagaggcgaaaacatccccgccgtgatcgccctgaccgaccccgagggctgcccactgagccggtttaaggatagcctgggaaacccaacccacatcctgagaatcggcgagagctataaggagaagcagcggaccatccaggccaagaaggaggtggagcagcggagagccggcggctacagccggaagtacgccagcaaagccaagaatctggcagacgatatggtgagaaacaccgctagagatctgctgtactacgccgtgacccaggatgccatgctgatcttcgccaacctgagccggggcttcggccggcagggcaagcggaccttcatggccgagagacagtacacacggatggaggactggctgaccgccaagctggcctacgagggcctgagcaagacctacctgtccaagacactggcccagtacacctccaagacatgcagcaactgtgggtttaccatcaccagcgccgactacgacagggtgctggagaagctgaagaagacagcaacaggctggatgaccacaattaacggcaaggagctgaaggtggagggccagattacctactacaacagatacaagagacagaacgtagtcaaggacctgtccgtcgagctggatagactgagcgaagaatctgtgaacaacgacatctcctcctggacaaagggcagaagcggagaagctctgagcctcctgaagaaaagattctcccatagacccgtgcaggagaagttcgtgtgcctgaactgcggcttcgagacacacgcagccgagcaagccgccctgaacatcgccagatcctggctgttcctgcggagccaggagtacaagaaataccagacaaacaagacaaccggcaacaccgataagagagccttcgtcgagacctggcagtccttttaccggaagaagcttaaggaggtgtggaaacctgccgtgcggtctggcggatctggcggaggctccatgaccttcgaggacgtgaccgtggagttcaccccctgggagtggggccagctggaccccgcccagaaggacctgtacagggaggtgatgctggagaacttcaggaacctggccagcctgggcctgcccgtgagcaagccccacgtgatctgccagctggaggagggcgaggagccctgcgtgctggagagggagatcagcgtgggcgcccagagcgacctgaagaggaggcccaaggccaagggcggcccaagcagcggcgcccctcctcccagcggcggcagcccagccggctccccaacctctaccgaggagggcacctctgagtccgccacccccgagagcggccctggcacctccaccgagcccagcgagggcagcgcacccggcagccctgccggcagccccacctccacagaggagggaaccagcaccgagcccagcgaaggcagcgccccaggcaccagcaccgagcctagtgagcaggagattaaacggatcaacaagatcagaagaagacttgtgaaagacagcaacaccaagaaggccggcaagacaggccccatgaaaaccctgctggttagagtgatgacacccgatctgagagagcggctggaaaacctgagaaagaagcctgaaaatatcccccagcccatcagcaatacatctagagccaacctgaataagctgctgaccgattacaccgaaatgaagaaggcgatcctgcatgtgtactgggaagagttccagaaggaccctgtgggcctgatgagccgggtggcccagcctgccagcaagaagatcgatcagaacaagctgaaacctgagatggacgagaagggcaacctgaccaccgccggctttgcctgctctcagtgtggccagcccctgttcgtgtacaagctggagcaggtgtctgagaagggcaaggcttacaccaactacttcggacggtgcaatgtggccgagcacgaaaagctgatcctgctggcccagctgaagcccgagaaggatagcgacgaagccgtgacatatagcctgggaaagtttgggcagagggccctggatttctacagcattcatgtgaccaaggagtccacccaccccgtgaagcccctggcccagatcgccggaaacagatacgcctccggacctgtgggaaaggccctgagcgacgcatgtatgggcacaatcgcctccttcctgtctaagtaccaggacatcatcatcgaacaccagaaggtggtgaagggcaaccagaagagactggagagcctgcgggagctggccggcaaggaaaacctggaataccctagcgtgaccctgccacctcagcctcacaccaaggagggcgttgatgcctacaacgaagtgatcgcccgggtgcgaatgtgggtgaacctgaacctgtggcagaagctgaagctaagcagagatgatgccaagcctctgctgagactgaagggattcccttcctttcctctggtcgagagacaggccaacgaagtggactggtgggacatggtgtgtaacgtgaagaagctgatcaacgagaaaaaggaggatggcaaggtgttttggcagaatctggctggctacaagagacaggaagccctgagaccatacctgagcagcgaggaagatcggaagaagggaaagaaattcgctcggtaccagctgggcgacctgctgctgcacctggaaaagaagcacggcgaggactggggaaaggtgtacgacgaggcctgggagcggattgacaagaaagtggaaggcctgagcaagcacatcaagctggaagaggaacggagaagcgaggacgcccagagcaaggccgccctgaccgactggctgcgggctaaggccagcttcgtgatcgagggcctgaaggaggccgacaaggacgagttctgcagatgcgagctgaagctgcagaagtggtacggggacctgcggggaaagcccttcgccatcgaagccgagaacagcatcctggacatcagcggcttcagcaagcagtacaactgtgccttcatctggcagaaggacggcgtgaagaagctgaacctgtacctgatcatcaactacttcaagggcggcaagctgcggttcaagaagatcaaacctgaagccttcgaagccaacagattctacaccgtgatcaacaaaaagagcggcgagatcgtgcccatggaggtgaacttcaacttcgacgaccccaacctgatcatcctgcctctggcctttggcaagagacagggcagagaattcatctggaacgacctgctgtccctggaaaccggcagcctgaagctggccaacggaagagtgatcgagaagacactgtacaacagaagaacccggcaggatgagcctgccctgttcgtggccctgaccttcgagcggcgggaggtcctggactcctccaatatcaaaccaatgaacctgatcggcgtggcaagaggcgaaaacatccccgccgtgatcgccctgaccgaccccgagggctgcccactgagccggtttaaggatagcctgggaaacccaacccacatcctgagaatcggcgagagctataaggagaagcagcggaccatccaggccaagaaggaggtggagcagcggagagccggcggctacagccggaagtacgccagcaaagccaagaatctggcagacgatatggtgagaaacaccgctagagatctgctgtactacgccgtgacccaggatgccatgctgatcttcgccaacctgagccggggcttcggccggcagggcaagcggaccttcatggccgagagacagtacacacggatggaggactggctgaccgccaagctggcctacgagggcctgagcaagacctacctgtccaagacactggcccagtacacctccaagacatgcagcaactgtgggtttaccatcaccagcgccgactacgacagggtgctggagaagctgaagaagacagcaacaggctggatgaccacaattaacggcaaggagctgaaggtggagggccagattacctactacaacagatacaagagacagaacgtagtcaaggacctgtccgtcgagctggatagactgagcgaagaatctgtgaacaacgacatctcctcctggacaaagggcagaagcggagaagctctgagcctcctgaagaaaagattctcccatagacccgtgcaggagaagttcgtgtgcctgaactgcggcttcgagacacacgcagccgagcaagccgccctgaacatcgccagatcctggctgttcctgcggagccaggagtacaagaaataccagacaaacaagacaaccggcaacaccgataagagagccttcgtcgagacctggcagtccttttaccggaagaagcttaaggaggtgtggaaacctgccgtgcggtctggcggatctggcggaggctcctatgaccttcgaggacgtgaccgtggagttcaccccctgggagtggggccagctggaccccgcccagaaggacctgtacagggaggtgatgctggagaacttcaggaacctggccagcctgggcctgcccgtgagcaagccccacgtgatctgccagctggaggagggcgaggagccctgcgtgctggagagggagatcagcgtgggcgcccagagcgacctgaagaggaggcccaaggccaagggatctggctccggcagcggccccaagaaaaagagaaaagtctaagctgccttctgcggggcttgccttctggccatgcccttcttctctcccttgcacctgtacctcttggtctttgaataaagcctgagtaggaaggctagcaaaaaaaaaaaaaaaaaaaaaaaaaaaaaaaaaaaaaaaaaaaaaaaaaaaaaaaaaaaaaaaaaaaaaaaaaaaaaaaa

SEQ ID NO: 15764 - RNA, 9485 nt, synthetic construct
  source 1..9485: mol_type = other RNA
aggaaataagagagaaaagaagagtaagaagaaatataagagccaccatggcccctaagaagaagcgtaaagtgagccggatggaacgcctcgtctacgaggtgcggcagaagtgcagaaacatcgaggacatctgcatctcctgcggatctctgaacgtgaccctggagcacccactgttcatcggcggcatgtgccagaactgtaaaaactgttttctggagtgtgcctatcaatacgacgatgacggctaccagagctactgcaccatctgttgcggcggaagagaggtgctgatgtgtggaaataacaactgctgccggtgcttctgcgtggaatgcgtggacctgctggtgggccccggcgccgcccaggccgctattaaggaagatccttggaactgctacatgtgcggccacaagggcacatacggcctgctgagacggagagaggactggcctagcagactgcagatgttcttcgccaataaccacgaccaggagttcgacccccctaaggtgtaccctcccgtccccgccgagaagagaaagcccatccgggtcctgagcctgttcgatggcatcgccaccggtctgctggtgctgaaggacctgggcatccaggtggataggtacattgcctccgaggtgtgcgaggactccatcaccgtgggaatggtgcgtcatcagggcaagatcatgtacgtgggcgacgtgcggagcgtgacacagaagcatatccaggagtggggccctttcgacctggtgatcggcggcagcccttgcaatgacctgagcatcgtgaacccagcccggaagggcctgtacgagggaaccggcagactgttcttcgagttttacagactgctgcacgacgcccggcctaaggaaggcgacgaccggcccttcttttggctgttcgagaatgtggtggccatgggagtcagcgacaagcgggatattagccggttcctggagagcaaccccgtgatgatcgatgccaaggaagtgagcgccgcccaccgggccagatacttctggggcaatctgcctggcatgaacagacccctggccagcaccgtgaacgacaagctggagctgcaggagtgcctggagcacggccggatcgccaagttcagcaaggtgagaaccatcaccacccgaagcaacagcatcaaacaaggcaaggaccagcactttcctgtgttcatgaacgagaaggaggacatcctgtggtgtaccgagatggagagagtgttcgggttcccagtccactacacagatgtcagcaacatgtctagactggccagacagagactgctgggaagaagctggtccgtccctgtgatcagacacctgttcgcccctctgaaggagtacttcgcctgcgtgagcagcggcaacagcaacgccaacagccggggccccagcttctctagcggcctggtgccactgtccctgagagggagccacatgggccccatggagatctacaaaaccgtgagcgcctggaagcggcagcctgtgcgcgtgctgagcctgtttcggaatatcgataaagtcctgaaaagcctgggattcctggagagcggctctggctccggcggtggcaccctgaagtacgtggaggatgtgacaaacgtggtcagacgggatgtggagaagtggggccccttcgatctggtgtacggcagcacccaacccctgggcagctcttgtgaccggtgccctggctggtacatgtttcagttccaccggatcctgcagtacgccctgccgagacaggagtcccagcggccattcttttggattttcatggacaacttgctgctgaccgaggatgaccaggaaactaccactcggttcctgcagaccgaagccgtgaccctgcaggacgtgagaggccgggactaccagaacgccatgcgggtgtggtccaacatccctggactgaaaagcaagcacgcacctctgacccctaaagaagaggagtacctgcaggcccaggtgcggagcagaagcaagctggacgcccctaaggtggatctgctggtgaagaattgcctcctgcccctgagagagtacttcaagtatttcagccagaatagtctgcccctgggaggcagcggcggcggcgccctggtgacatttgaggacgtcgccgtgcggttcacccaggaggaatgggctctgctggatccttctcagaaaatcctgtaccgggacgtgatgagagagacataccggaatctgacctccgtgggcatcaactgggaatgttgggaccttgaagcctgcttcagaagcctgggaagaaacctgagagtgcaggtggtgaagagaaagtgcgagctgaccaacagcggcccctgcgccgagggcggcccaagcagcggcgcccctcctcccagcggcggcagcccagccggctccccaacctctaccgaggagggcacctctgagtccgccacccccgagagcggccctggcacctccaccgagcccagcgagggcagcgcacccggcagccctgccggcagccccacctccacagaggagggaaccagcaccgagcccagcgaaggcagcgccccaggcaccagcaccgagcctagtgagcaggagattaaacggatcaacaagatcagaagaagacttgtgaaagacagcaacaccaagaaggccggcaagacaggccccatgaaaaccctgctggttagagtgatgacacccgatctgagagagcggctggaaaacctgagaaagaagcctgaaaatatcccccagcccatcagcaatacatctagagccaacctgaataagctgctgaccgattacaccgaaatgaagaaggcgatcctgcatgtgtactgggaagagttccagaaggaccctgtgggcctgatgagccgggtggcccagcctgccagcaagaagatcgatcagaacaagctgaaacctgagatggacgagaagggcaacctgaccaccgccggctttgcctgctctcagtgtggccagcccctgttcgtgtacaagctggagcaggtgtctgagaagggcaaggcttacaccaactacttcggacggtgcaatgtggccgagcacgaaaagctgatcctgctggcccagctgaagcccgagaaggatagcgacgaagccgtgacatatagcctgggaaagtttgggcagagggccctggatttctacagcattcatgtgaccaaggagtccacccaccccgtgaagcccctggcccagatcgccggaaacagatacgcctccggacctgtgggaaaggccctgagcgacgcatgtatgggcacaatcgcctccttcctgtctaagtaccaggacatcatcatcgaacaccagaaggtggtgaagggcaaccagaagagactggagagcctgcgggagctggccggcaaggaaaacctggaataccctagcgtgaccctgccacctcagcctcacaccaaggagggcgttgatgcctacaacgaagtgatcgcccgggtgcgaatgtgggtgaacctgaacctgtggcagaagctgaagctaagcagagatgatgccaagcctctgctgagactgaagggattcccttcctttcctctggtcgagagacaggccaacgaagtggactggtgggacatggtgtgtaacgtgaagaagctgatcaacgagaaaaaggaggatggcaaggtgttttggcagaatctggctggctacaagagacaggaagccctgagaccatacctgagcagcgaggaagatcggaagaagggaaagaaattcgctcggtaccagctgggcgacctgctgctgcacctggaaaagaagcacggcgaggactggggaaaggtgtacgacgaggcctgggagcggattgacaagaaagtggaaggcctgagcaagcacatcaagctggaagaggaacggagaagcgaggacgcccagagcaaggccgccctgaccgactggctgcgggctaaggccagcttcgtgatcgagggcctgaaggaggccgacaaggacgagttctgcagatgcgagctgaagctgcagaagtggtacggggacctgcggggaaagcccttcgccatcgaagccgagaacagcatcctggacatcagcggcttcagcaagcagtacaactgtgccttcatctggcagaaggacggcgtgaagaagctgaacctgtacctgatcatcaactacttcaagggcggcaagctgcggttcaagaagatcaaacctgaagccttcgaagccaacagattctacaccgtgatcaacaaaaagagcggcgagatcgtgcccatggaggtgaacttcaacttcgacgaccccaacctgatcatcctgcctctggcctttggcaagagacagggcagagaattcatctggaacgacctgctgtccctggaaaccggcagcctgaagctggccaacggaagagtgatcgagaagacactgtacaacagaagaacccggcaggatgagcctgccctgttcgtggccctgaccttcgagcggcgggaggtcctggactcctccaatatcaaaccaatgaacctgatcggcgtggcaagaggcgaaaacatccccgccgtgatcgccctgaccgaccccgagggctgcccactgagccggtttaaggatagcctgggaaacccaacccacatcctgagaatcggcgagagctataaggagaagcagcggaccatccaggccaagaaggaggtggagcagcggagagccggcggctacagccggaagtacgccagcaaagccaagaatctggcagacgatatggtgagaaacaccgctagagatctgctgtactacgccgtgacccaggatgccatgctgatcttcgccaacctgagccggggcttcggccggcagggcaagcggaccttcatggccgagagacagtacacacggatggaggactggctgaccgccaagctggcctacgagggcctgagcaagacctacctgtccaagacactggcccagtacacctccaagacatgcagcaactgtgggtttaccatcaccagcgccgactacgacagggtgctggagaagctgaagaagacagcaacaggctggatgaccacaattaacggcaaggagctgaaggtggagggccagattacctactacaacagatacaagagacagaacgtagtcaaggacctgtccgtcgagctggatagactgagcgaagaatctgtgaacaacgacatctcctcctggacaaagggcagaagcggagaagctctgagcctcctgaagaaaagattctcccatagacccgtgcaggagaagttcgtgtgcctgaactgcggcttcgagacacacgcagccgagcaagccgccctgaacatcgccagatcctggctgttcctgcggagccaggagtacaagaaataccagacaaacaagacaaccggcaacaccgataagagagccttcgtcgagacctggcagtccttttaccggaagaagcttaaggaggtgtggaaacctgccgtgcggtctggcggatctggcggaggctcctaccagacccccgtgagcttcaaggacgtggtggtgggcttcacccaggaggagtggcacaggctgagccccgcccagagggccctgtacagggacgtgatgctggagacctacagcaacctggtgagcgtgggctacgagggcaccaagcccgacgtgatcctgaggctggagcaggaggaggccccctggatctgcgaggtggcctgccccggctgccacaggtgggaggacatctggcagggcggcccaagcagcggcgcccctcctcccagcggcggcagcccagccggctccccaacctctaccgaggagggcacctctgagtccgccacccccgagagcggccctggcacctccaccgagcccagcgagggcagcgcacccggcagccctgccggcagccccacctccacagaggagggaaccagcaccgagcccagcgaaggcagcgccccaggcaccagcaccgagcctagtgagcaggagattaaacggatcaacaagatcagaagaagacttgtgaaagacagcaacaccaagaaggccggcaagacaggccccatgaaaaccctgctggttagagtgatgacacccgatctgagagagcggctggaaaacctgagaaagaagcctgaaaatatcccccagcccatcagcaatacatctagagccaacctgaataagctgctgaccgattacaccgaaatgaagaaggcgatcctgcatgtgtactgggaagagttccagaaggaccctgtgggcctgatgagccgggtggcccagcctgccagcaagaagatcgatcagaacaagctgaaacctgagatggacgagaagggcaacctgaccaccgccggctttgcctgctctcagtgtggccagcccctgttcgtgtacaagctggagcaggtgtctgagaagggcaaggcttacaccaactacttcggacggtgcaatgtggccgagcacgaaaagctgatcctgctggcccagctgaagcccgagaaggatagcgacgaagccgtgacatatagcctgggaaagtttgggcagagggccctggatttctacagcattcatgtgaccaaggagtccacccaccccgtgaagcccctggcccagatcgccggaaacagatacgcctccggacctgtgggaaaggccctgagcgacgcatgtatgggcacaatcgcctccttcctgtctaagtaccaggacatcatcatcgaacaccagaaggtggtgaagggcaaccagaagagactggagagcctgcgggagctggccggcaaggaaaacctggaataccctagcgtgaccctgccacctcagcctcacaccaaggagggcgttgatgcctacaacgaagtgatcgcccgggtgcgaatgtgggtgaacctgaacctgtggcagaagctgaagctaagcagagatgatgccaagcctctgctgagactgaagggattcccttcctttcctctggtcgagagacaggccaacgaagtggactggtgggacatggtgtgtaacgtgaagaagctgatcaacgagaaaaaggaggatggcaaggtgttttggcagaatctggctggctacaagagacaggaagccctgagaccatacctgagcagcgaggaagatcggaagaagggaaagaaattcgctcggtaccagctgggcgacctgctgctgcacctggaaaagaagcacggcgaggactggggaaaggtgtacgacgaggcctgggagcggattgacaagaaagtggaaggcctgagcaagcacatcaagctggaagaggaacggagaagcgaggacgcccagagcaaggccgccctgaccgactggctgcgggctaaggccagcttcgtgatcgagggcctgaaggaggccgacaaggacgagttctgcagatgcgagctgaagctgcagaagtggtacggggacctgcggggaaagcccttcgccatcgaagccgagaacagcatcctggacatcagcggcttcagcaagcagtacaactgtgccttcatctggcagaaggacggcgtgaagaagctgaacctgtacctgatcatcaactacttcaagggcggcaagctgcggttcaagaagatcaaacctgaagccttcgaagccaacagattctacaccgtgatcaacaaaaagagcggcgagatcgtgcccatggaggtgaacttcaacttcgacgaccccaacctgatcatcctgcctctggcctttggcaagagacagggcagagaattcatctggaacgacctgctgtccctggaaaccggcagcctgaagctggccaacggaagagtgatcgagaagacactgtacaacagaagaacccggcaggatgagcctgccctgttcgtggccctgaccttcgagcggcgggaggtcctggactcctccaatatcaaaccaatgaacctgatcggcgtggcaagaggcgaaaacatccccgccgtgatcgccctgaccgaccccgagggctgcccactgagccggtttaaggatagcctgggaaacccaacccacatcctgagaatcggcgagagctataaggagaagcagcggaccatccaggccaagaaggaggtggagcagcggagagccggcggctacagccggaagtacgccagcaaagccaagaatctggcagacgatatggtgagaaacaccgctagagatctgctgtactacgccgtgacccaggatgccatgctgatcttcgccaacctgagccggggcttcggccggcagggcaagcggaccttcatggccgagagacagtacacacggatggaggactggctgaccgccaagctggcctacgagggcctgagcaagacctacctgtccaagacactggcccagtacacctccaagacatgcagcaactgtgggtttaccatcaccagcgccgactacgacagggtgctggagaagctgaagaagacagcaacaggctggatgaccacaattaacggcaaggagctgaaggtggagggccagattacctactacaacagatacaagagacagaacgtagtcaaggacctgtccgtcgagctggatagactgagcgaagaatctgtgaacaacgacatctcctcctggacaaagggcagaagcggagaagctctgagcctcctgaagaaaagattctcccatagacccgtgcaggagaagttcgtgtgcctgaactgcggcttcgagacacacgcagccgagcaagccgccctgaacatcgccagatcctggctgttcctgcggagccaggagtacaagaaataccagacaaacaagacaaccggcaacaccgataagagagccttcgtcgagacctggcagtccttttaccggaagaagcttaaggaggtgtggaaacctgccgtgcggtctggcggatctggcggaggctccttaccagacccccgtgagcttcaaggacgtggtggtgggcttcacccaggaggagtggcacaggctgagccccgcccagagggccctgtacagggacgtgatgctggagacctacagcaacctggtgagcgtgggctacgagggcaccaagcccgacgtgatcctgaggctggagcaggaggaggccccctggatctgcgaggtggcctgccccggctgccacaggtgggaggacatctggcagggatctggctccggcagcggccccaagaaaaagagaaaagtctaagctgccttctgcggggcttgccttctggccatgcccttcttctctcccttgcacctgtacctcttggtctttgaataaagcctgagtaggaaggctagcaaaaaaaaaaaaaaaaaaaaaaaaaaaaaaaaaaaaaaaaaaaaaaaaaaaaaaaaaaaaaaaaaaaaaaaaaaaaaaaa

SEQ ID NO: 15765 - RNA, 9485 nt, synthetic construct
  source 1..9485: mol_type = other RNA
aggaaataagagagaaaagaagagtaagaagaaatataagagccaccatggcccctaagaagaagcgtaaagtgagccggatggaacgcctcgtctacgaggtgcggcagaagtgcagaaacatcgaggacatctgcatctcctgcggatctctgaacgtgaccctggagcacccactgttcatcggcggcatgtgccagaactgtaaaaactgttttctggagtgtgcctatcaatacgacgatgacggctaccagagctactgcaccatctgttgcggcggaagagaggtgctgatgtgtggaaataacaactgctgccggtgcttctgcgtggaatgcgtggacctgctggtgggccccggcgccgcccaggccgctattaaggaagatccttggaactgctacatgtgcggccacaagggcacatacggcctgctgagacggagagaggactggcctagcagactgcagatgttcttcgccaataaccacgaccaggagttcgacccccctaaggtgtaccctcccgtccccgccgagaagagaaagcccatccgggtcctgagcctgttcgatggcatcgccaccggtctgctggtgctgaaggacctgggcatccaggtggataggtacattgcctccgaggtgtgcgaggactccatcaccgtgggaatggtgcgtcatcagggcaagatcatgtacgtgggcgacgtgcggagcgtgacacagaagcatatccaggagtggggccctttcgacctggtgatcggcggcagcccttgcaatgacctgagcatcgtgaacccagcccggaagggcctgtacgagggaaccggcagactgttcttcgagttttacagactgctgcacgacgcccggcctaaggaaggcgacgaccggcccttcttttggctgttcgagaatgtggtggccatgggagtcagcgacaagcgggatattagccggttcctggagagcaaccccgtgatgatcgatgccaaggaagtgagcgccgcccaccgggccagatacttctggggcaatctgcctggcatgaacagacccctggccagcaccgtgaacgacaagctggagctgcaggagtgcctggagcacggccggatcgccaagttcagcaaggtgagaaccatcaccacccgaagcaacagcatcaaacaaggcaaggaccagcactttcctgtgttcatgaacgagaaggaggacatcctgtggtgtaccgagatggagagagtgttcgggttcccagtccactacacagatgtcagcaacatgtctagactggccagacagagactgctgggaagaagctggtccgtccctgtgatcagacacctgttcgcccctctgaaggagtacttcgcctgcgtgagcagcggcaacagcaacgccaacagccggggccccagcttctctagcggcctggtgccactgtccctgagagggagccacatgggccccatggagatctacaaaaccgtgagcgcctggaagcggcagcctgtgcgcgtgctgagcctgtttcggaatatcgataaagtcctgaaaagcctgggattcctggagagcggctctggctccggcggtggcaccctgaagtacgtggaggatgtgacaaacgtggtcagacgggatgtggagaagtggggccccttcgatctggtgtacggcagcacccaacccctgggcagctcttgtgaccggtgccctggctggtacatgtttcagttccaccggatcctgcagtacgccctgccgagacaggagtcccagcggccattcttttggattttcatggacaacttgctgctgaccgaggatgaccaggaaactaccactcggttcctgcagaccgaagccgtgaccctgcaggacgtgagaggccgggactaccagaacgccatgcgggtgtggtccaacatccctggactgaaaagcaagcacgcacctctgacccctaaagaagaggagtacctgcaggcccaggtgcggagcagaagcaagctggacgcccctaaggtggatctgctggtgaagaattgcctcctgcccctgagagagtacttcaagtatttcagccagaatagtctgcccctgggaggcagcggcggcggcgccctggtgacatttgaggacgtcgccgtgcggttcacccaggaggaatgggctctgctggatccttctcagaaaatcctgtaccgggacgtgatgagagagacataccggaatctgacctccgtgggcatcaactgggaatgttgggaccttgaagcctgcttcagaagcctgggaagaaacctgagagtgcaggtggtgaagagaaagtgcgagctgaccaacagcggcccctgcgccgagggcggcccaagcagcggcgcccctcctcccagcggcggcagcccagccggctccccaacctctaccgaggagggcacctctgagtccgccacccccgagagcggccctggcacctccaccgagcccagcgagggcagcgcacccggcagccctgccggcagccccacctccacagaggagggaaccagcaccgagcccagcgaaggcagcgccccaggcaccagcaccgagcctagtgagcaggagattaaacggatcaacaagatcagaagaagacttgtgaaagacagcaacaccaagaaggccggcaagacaggccccatgaaaaccctgctggttagagtgatgacacccgatctgagagagcggctggaaaacctgagaaagaagcctgaaaatatcccccagcccatcagcaatacatctagagccaacctgaataagctgctgaccgattacaccgaaatgaagaaggcgatcctgcatgtgtactgggaagagttccagaaggaccctgtgggcctgatgagccgggtggcccagcctgccagcaagaagatcgatcagaacaagctgaaacctgagatggacgagaagggcaacctgaccaccgccggctttgcctgctctcagtgtggccagcccctgttcgtgtacaagctggagcaggtgtctgagaagggcaaggcttacaccaactacttcggacggtgcaatgtggccgagcacgaaaagctgatcctgctggcccagctgaagcccgagaaggatagcgacgaagccgtgacatatagcctgggaaagtttgggcagagggccctggatttctacagcattcatgtgaccaaggagtccacccaccccgtgaagcccctggcccagatcgccggaaacagatacgcctccggacctgtgggaaaggccctgagcgacgcatgtatgggcacaatcgcctccttcctgtctaagtaccaggacatcatcatcgaacaccagaaggtggtgaagggcaaccagaagagactggagagcctgcgggagctggccggcaaggaaaacctggaataccctagcgtgaccctgccacctcagcctcacaccaaggagggcgttgatgcctacaacgaagtgatcgcccgggtgcgaatgtgggtgaacctgaacctgtggcagaagctgaagctaagcagagatgatgccaagcctctgctgagactgaagggattcccttcctttcctctggtcgagagacaggccaacgaagtggactggtgggacatggtgtgtaacgtgaagaagctgatcaacgagaaaaaggaggatggcaaggtgttttggcagaatctggctggctacaagagacaggaagccctgagaccatacctgagcagcgaggaagatcggaagaagggaaagaaattcgctcggtaccagctgggcgacctgctgctgcacctggaaaagaagcacggcgaggactggggaaaggtgtacgacgaggcctgggagcggattgacaagaaagtggaaggcctgagcaagcacatcaagctggaagaggaacggagaagcgaggacgcccagagcaaggccgccctgaccgactggctgcgggctaaggccagcttcgtgatcgagggcctgaaggaggccgacaaggacgagttctgcagatgcgagctgaagctgcagaagtggtacggggacctgcggggaaagcccttcgccatcgaagccgagaacagcatcctggacatcagcggcttcagcaagcagtacaactgtgccttcatctggcagaaggacggcgtgaagaagctgaacctgtacctgatcatcaactacttcaagggcggcaagctgcggttcaagaagatcaaacctgaagccttcgaagccaacagattctacaccgtgatcaacaaaaagagcggcgagatcgtgcccatggaggtgaacttcaacttcgacgaccccaacctgatcatcctgcctctggcctttggcaagagacagggcagagaattcatctggaacgacctgctgtccctggaaaccggcagcctgaagctggccaacggaagagtgatcgagaagacactgtacaacagaagaacccggcaggatgagcctgccctgttcgtggccctgaccttcgagcggcgggaggtcctggactcctccaatatcaaaccaatgaacctgatcggcgtggcaagaggcgaaaacatccccgccgtgatcgccctgaccgaccccgagggctgcccactgagccggtttaaggatagcctgggaaacccaacccacatcctgagaatcggcgagagctataaggagaagcagcggaccatccaggccaagaaggaggtggagcagcggagagccggcggctacagccggaagtacgccagcaaagccaagaatctggcagacgatatggtgagaaacaccgctagagatctgctgtactacgccgtgacccaggatgccatgctgatcttcgccaacctgagccggggcttcggccggcagggcaagcggaccttcatggccgagagacagtacacacggatggaggactggctgaccgccaagctggcctacgagggcctgagcaagacctacctgtccaagacactggcccagtacacctccaagacatgcagcaactgtgggtttaccatcaccagcgccgactacgacagggtgctggagaagctgaagaagacagcaacaggctggatgaccacaattaacggcaaggagctgaaggtggagggccagattacctactacaacagatacaagagacagaacgtagtcaaggacctgtccgtcgagctggatagactgagcgaagaatctgtgaacaacgacatctcctcctggacaaagggcagaagcggagaagctctgagcctcctgaagaaaagattctcccatagacccgtgcaggagaagttcgtgtgcctgaactgcggcttcgagacacacgcagccgagcaagccgccctgaacatcgccagatcctggctgttcctgcggagccaggagtacaagaaataccagacaaacaagacaaccggcaacaccgataagagagccttcgtcgagacctggcagtccttttaccggaagaagcttaaggaggtgtggaaacctgccgtgcggtctggcggatctggcggaggctccaagcccggcgccgtgagcttcgccgacgtggccgtgtacttcagccccgaggagtggggctgcctgaggcccgcccagagggccctgtacagggacgtgatgagggagacctacggccacctgggcgccctgggcttcaggggcaccaagcccgccctgatctgctgggtggaggaggaggccgacctgtggggccccgaggccagggaccccgaggtgggcgcctgcctgaccgaggccgacggcggcccaagcagcggcgcccctcctcccagcggcggcagcccagccggctccccaacctctaccgaggagggcacctctgagtccgccacccccgagagcggccctggcacctccaccgagcccagcgagggcagcgcacccggcagccctgccggcagccccacctccacagaggagggaaccagcaccgagcccagcgaaggcagcgccccaggcaccagcaccgagcctagtgagcaggagattaaacggatcaacaagatcagaagaagacttgtgaaagacagcaacaccaagaaggccggcaagacaggccccatgaaaaccctgctggttagagtgatgacacccgatctgagagagcggctggaaaacctgagaaagaagcctgaaaatatcccccagcccatcagcaatacatctagagccaacctgaataagctgctgaccgattacaccgaaatgaagaaggcgatcctgcatgtgtactgggaagagttccagaaggaccctgtgggcctgatgagccgggtggcccagcctgccagcaagaagatcgatcagaacaagctgaaacctgagatggacgagaagggcaacctgaccaccgccggctttgcctgctctcagtgtggccagcccctgttcgtgtacaagctggagcaggtgtctgagaagggcaaggcttacaccaactacttcggacggtgcaatgtggccgagcacgaaaagctgatcctgctggcccagctgaagcccgagaaggatagcgacgaagccgtgacatatagcctgggaaagtttgggcagagggccctggatttctacagcattcatgtgaccaaggagtccacccaccccgtgaagcccctggcccagatcgccggaaacagatacgcctccggacctgtgggaaaggccctgagcgacgcatgtatgggcacaatcgcctccttcctgtctaagtaccaggacatcatcatcgaacaccagaaggtggtgaagggcaaccagaagagactggagagcctgcgggagctggccggcaaggaaaacctggaataccctagcgtgaccctgccacctcagcctcacaccaaggagggcgttgatgcctacaacgaagtgatcgcccgggtgcgaatgtgggtgaacctgaacctgtggcagaagctgaagctaagcagagatgatgccaagcctctgctgagactgaagggattcccttcctttcctctggtcgagagacaggccaacgaagtggactggtgggacatggtgtgtaacgtgaagaagctgatcaacgagaaaaaggaggatggcaaggtgttttggcagaatctggctggctacaagagacaggaagccctgagaccatacctgagcagcgaggaagatcggaagaagggaaagaaattcgctcggtaccagctgggcgacctgctgctgcacctggaaaagaagcacggcgaggactggggaaaggtgtacgacgaggcctgggagcggattgacaagaaagtggaaggcctgagcaagcacatcaagctggaagaggaacggagaagcgaggacgcccagagcaaggccgccctgaccgactggctgcgggctaaggccagcttcgtgatcgagggcctgaaggaggccgacaaggacgagttctgcagatgcgagctgaagctgcagaagtggtacggggacctgcggggaaagcccttcgccatcgaagccgagaacagcatcctggacatcagcggcttcagcaagcagtacaactgtgccttcatctggcagaaggacggcgtgaagaagctgaacctgtacctgatcatcaactacttcaagggcggcaagctgcggttcaagaagatcaaacctgaagccttcgaagccaacagattctacaccgtgatcaacaaaaagagcggcgagatcgtgcccatggaggtgaacttcaacttcgacgaccccaacctgatcatcctgcctctggcctttggcaagagacagggcagagaattcatctggaacgacctgctgtccctggaaaccggcagcctgaagctggccaacggaagagtgatcgagaagacactgtacaacagaagaacccggcaggatgagcctgccctgttcgtggccctgaccttcgagcggcgggaggtcctggactcctccaatatcaaaccaatgaacctgatcggcgtggcaagaggcgaaaacatccccgccgtgatcgccctgaccgaccccgagggctgcccactgagccggtttaaggatagcctgggaaacccaacccacatcctgagaatcggcgagagctataaggagaagcagcggaccatccaggccaagaaggaggtggagcagcggagagccggcggctacagccggaagtacgccagcaaagccaagaatctggcagacgatatggtgagaaacaccgctagagatctgctgtactacgccgtgacccaggatgccatgctgatcttcgccaacctgagccggggcttcggccggcagggcaagcggaccttcatggccgagagacagtacacacggatggaggactggctgaccgccaagctggcctacgagggcctgagcaagacctacctgtccaagacactggcccagtacacctccaagacatgcagcaactgtgggtttaccatcaccagcgccgactacgacagggtgctggagaagctgaagaagacagcaacaggctggatgaccacaattaacggcaaggagctgaaggtggagggccagattacctactacaacagatacaagagacagaacgtagtcaaggacctgtccgtcgagctggatagactgagcgaagaatctgtgaacaacgacatctcctcctggacaaagggcagaagcggagaagctctgagcctcctgaagaaaagattctcccatagacccgtgcaggagaagttcgtgtgcctgaactgcggcttcgagacacacgcagccgagcaagccgccctgaacatcgccagatcctggctgttcctgcggagccaggagtacaagaaataccagacaaacaagacaaccggcaacaccgataagagagccttcgtcgagacctggcagtccttttaccggaagaagcttaaggaggtgtggaaacctgccgtgcggtctggcggatctggcggaggctcctaagcccggcgccgtgagcttcgccgacgtggccgtgtacttcagccccgaggagtggggctgcctgaggcccgcccagagggccctgtacagggacgtgatgagggagacctacggccacctgggcgccctgggcttcaggggcaccaagcccgccctgatctgctgggtggaggaggaggccgacctgtggggccccgaggccagggaccccgaggtgggcgcctgcctgaccgaggccgacggatctggctccggcagcggccccaagaaaaagagaaaagtctaagctgccttctgcggggcttgccttctggccatgcccttcttctctcccttgcacctgtacctcttggtctttgaataaagcctgagtaggaaggctagcaaaaaaaaaaaaaaaaaaaaaaaaaaaaaaaaaaaaaaaaaaaaaaaaaaaaaaaaaaaaaaaaaaaaaaaaaaaaaaaa

SEQ ID NO: 15766 - RNA, 9485 nt, synthetic construct
  source 1..9485: mol_type = other RNA
aggaaataagagagaaaagaagagtaagaagaaatataagagccaccatggcccctaagaagaagcgtaaagtgagccggatggaacgcctcgtctacgaggtgcggcagaagtgcagaaacatcgaggacatctgcatctcctgcggatctctgaacgtgaccctggagcacccactgttcatcggcggcatgtgccagaactgtaaaaactgttttctggagtgtgcctatcaatacgacgatgacggctaccagagctactgcaccatctgttgcggcggaagagaggtgctgatgtgtggaaataacaactgctgccggtgcttctgcgtggaatgcgtggacctgctggtgggccccggcgccgcccaggccgctattaaggaagatccttggaactgctacatgtgcggccacaagggcacatacggcctgctgagacggagagaggactggcctagcagactgcagatgttcttcgccaataaccacgaccaggagttcgacccccctaaggtgtaccctcccgtccccgccgagaagagaaagcccatccgggtcctgagcctgttcgatggcatcgccaccggtctgctggtgctgaaggacctgggcatccaggtggataggtacattgcctccgaggtgtgcgaggactccatcaccgtgggaatggtgcgtcatcagggcaagatcatgtacgtgggcgacgtgcggagcgtgacacagaagcatatccaggagtggggccctttcgacctggtgatcggcggcagcccttgcaatgacctgagcatcgtgaacccagcccggaagggcctgtacgagggaaccggcagactgttcttcgagttttacagactgctgcacgacgcccggcctaaggaaggcgacgaccggcccttcttttggctgttcgagaatgtggtggccatgggagtcagcgacaagcgggatattagccggttcctggagagcaaccccgtgatgatcgatgccaaggaagtgagcgccgcccaccgggccagatacttctggggcaatctgcctggcatgaacagacccctggccagcaccgtgaacgacaagctggagctgcaggagtgcctggagcacggccggatcgccaagttcagcaaggtgagaaccatcaccacccgaagcaacagcatcaaacaaggcaaggaccagcactttcctgtgttcatgaacgagaaggaggacatcctgtggtgtaccgagatggagagagtgttcgggttcccagtccactacacagatgtcagcaacatgtctagactggccagacagagactgctgggaagaagctggtccgtccctgtgatcagacacctgttcgcccctctgaaggagtacttcgcctgcgtgagcagcggcaacagcaacgccaacagccggggccccagcttctctagcggcctggtgccactgtccctgagagggagccacatgggccccatggagatctacaaaaccgtgagcgcctggaagcggcagcctgtgcgcgtgctgagcctgtttcggaatatcgataaagtcctgaaaagcctgggattcctggagagcggctctggctccggcggtggcaccctgaagtacgtggaggatgtgacaaacgtggtcagacgggatgtggagaagtggggccccttcgatctggtgtacggcagcacccaacccctgggcagctcttgtgaccggtgccctggctggtacatgtttcagttccaccggatcctgcagtacgccctgccgagacaggagtcccagcggccattcttttggattttcatggacaacttgctgctgaccgaggatgaccaggaaactaccactcggttcctgcagaccgaagccgtgaccctgcaggacgtgagaggccgggactaccagaacgccatgcgggtgtggtccaacatccctggactgaaaagcaagcacgcacctctgacccctaaagaagaggagtacctgcaggcccaggtgcggagcagaagcaagctggacgcccctaaggtggatctgctggtgaagaattgcctcctgcccctgagagagtacttcaagtatttcagccagaatagtctgcccctgggaggcagcggcggcggcgccctggtgacatttgaggacgtcgccgtgcggttcacccaggaggaatgggctctgctggatccttctcagaaaatcctgtaccgggacgtgatgagagagacataccggaatctgacctccgtgggcatcaactgggaatgttgggaccttgaagcctgcttcagaagcctgggaagaaacctgagagtgcaggtggtgaagagaaagtgcgagctgaccaacagcggcccctgcgccgagggcggcccaagcagcggcgcccctcctcccagcggcggcagcccagccggctccccaacctctaccgaggagggcacctctgagtccgccacccccgagagcggccctggcacctccaccgagcccagcgagggcagcgcacccggcagccctgccggcagccccacctccacagaggagggaaccagcaccgagcccagcgaaggcagcgccccaggcaccagcaccgagcctagtgagcaggagattaaacggatcaacaagatcagaagaagacttgtgaaagacagcaacaccaagaaggccggcaagacaggccccatgaaaaccctgctggttagagtgatgacacccgatctgagagagcggctggaaaacctgagaaagaagcctgaaaatatcccccagcccatcagcaatacatctagagccaacctgaataagctgctgaccgattacaccgaaatgaagaaggcgatcctgcatgtgtactgggaagagttccagaaggaccctgtgggcctgatgagccgggtggcccagcctgccagcaagaagatcgatcagaacaagctgaaacctgagatggacgagaagggcaacctgaccaccgccggctttgcctgctctcagtgtggccagcccctgttcgtgtacaagctggagcaggtgtctgagaagggcaaggcttacaccaactacttcggacggtgcaatgtggccgagcacgaaaagctgatcctgctggcccagctgaagcccgagaaggatagcgacgaagccgtgacatatagcctgggaaagtttgggcagagggccctggatttctacagcattcatgtgaccaaggagtccacccaccccgtgaagcccctggcccagatcgccggaaacagatacgcctccggacctgtgggaaaggccctgagcgacgcatgtatgggcacaatcgcctccttcctgtctaagtaccaggacatcatcatcgaacaccagaaggtggtgaagggcaaccagaagagactggagagcctgcgggagctggccggcaaggaaaacctggaataccctagcgtgaccctgccacctcagcctcacaccaaggagggcgttgatgcctacaacgaagtgatcgcccgggtgcgaatgtgggtgaacctgaacctgtggcagaagctgaagctaagcagagatgatgccaagcctctgctgagactgaagggattcccttcctttcctctggtcgagagacaggccaacgaagtggactggtgggacatggtgtgtaacgtgaagaagctgatcaacgagaaaaaggaggatggcaaggtgttttggcagaatctggctggctacaagagacaggaagccctgagaccatacctgagcagcgaggaagatcggaagaagggaaagaaattcgctcggtaccagctgggcgacctgctgctgcacctggaaaagaagcacggcgaggactggggaaaggtgtacgacgaggcctgggagcggattgacaagaaagtggaaggcctgagcaagcacatcaagctggaagaggaacggagaagcgaggacgcccagagcaaggccgccctgaccgactggctgcgggctaaggccagcttcgtgatcgagggcctgaaggaggccgacaaggacgagttctgcagatgcgagctgaagctgcagaagtggtacggggacctgcggggaaagcccttcgccatcgaagccgagaacagcatcctggacatcagcggcttcagcaagcagtacaactgtgccttcatctggcagaaggacggcgtgaagaagctgaacctgtacctgatcatcaactacttcaagggcggcaagctgcggttcaagaagatcaaacctgaagccttcgaagccaacagattctacaccgtgatcaacaaaaagagcggcgagatcgtgcccatggaggtgaacttcaacttcgacgaccccaacctgatcatcctgcctctggcctttggcaagagacagggcagagaattcatctggaacgacctgctgtccctggaaaccggcagcctgaagctggccaacggaagagtgatcgagaagacactgtacaacagaagaacccggcaggatgagcctgccctgttcgtggccctgaccttcgagcggcgggaggtcctggactcctccaatatcaaaccaatgaacctgatcggcgtggcaagaggcgaaaacatccccgccgtgatcgccctgaccgaccccgagggctgcccactgagccggtttaaggatagcctgggaaacccaacccacatcctgagaatcggcgagagctataaggagaagcagcggaccatccaggccaagaaggaggtggagcagcggagagccggcggctacagccggaagtacgccagcaaagccaagaatctggcagacgatatggtgagaaacaccgctagagatctgctgtactacgccgtgacccaggatgccatgctgatcttcgccaacctgagccggggcttcggccggcagggcaagcggaccttcatggccgagagacagtacacacggatggaggactggctgaccgccaagctggcctacgagggcctgagcaagacctacctgtccaagacactggcccagtacacctccaagacatgcagcaactgtgggtttaccatcaccagcgccgactacgacagggtgctggagaagctgaagaagacagcaacaggctggatgaccacaattaacggcaaggagctgaaggtggagggccagattacctactacaacagatacaagagacagaacgtagtcaaggacctgtccgtcgagctggatagactgagcgaagaatctgtgaacaacgacatctcctcctggacaaagggcagaagcggagaagctctgagcctcctgaagaaaagattctcccatagacccgtgcaggagaagttcgtgtgcctgaactgcggcttcgagacacacgcagccgagcaagccgccctgaacatcgccagatcctggctgttcctgcggagccaggagtacaagaaataccagacaaacaagacaaccggcaacaccgataagagagccttcgtcgagacctggcagtccttttaccggaagaagcttaaggaggtgtggaaacctgccgtgcggtctggcggatctggcggaggctccccccagaagagcgtgaccttcgaggacgtggccgtgtacttcacccagaccgagtgggacggcctgagccccgcccagagggccctgtacagggacgtgatgctggagaactacggcaacgtggccagcctgggcttccccctgctgaagcccgccgtgatcagccagctggagggcggcggcaagctgggcggccccagccccctggccagcggcaccggcaccggcccccagggcctgtggggcggcccaagcagcggcgcccctcctcccagcggcggcagcccagccggctccccaacctctaccgaggagggcacctctgagtccgccacccccgagagcggccctggcacctccaccgagcccagcgagggcagcgcacccggcagccctgccggcagccccacctccacagaggagggaaccagcaccgagcccagcgaaggcagcgccccaggcaccagcaccgagcctagtgagcaggagattaaacggatcaacaagatcagaagaagacttgtgaaagacagcaacaccaagaaggccggcaagacaggccccatgaaaaccctgctggttagagtgatgacacccgatctgagagagcggctggaaaacctgagaaagaagcctgaaaatatcccccagcccatcagcaatacatctagagccaacctgaataagctgctgaccgattacaccgaaatgaagaaggcgatcctgcatgtgtactgggaagagttccagaaggaccctgtgggcctgatgagccgggtggcccagcctgccagcaagaagatcgatcagaacaagctgaaacctgagatggacgagaagggcaacctgaccaccgccggctttgcctgctctcagtgtggccagcccctgttcgtgtacaagctggagcaggtgtctgagaagggcaaggcttacaccaactacttcggacggtgcaatgtggccgagcacgaaaagctgatcctgctggcccagctgaagcccgagaaggatagcgacgaagccgtgacatatagcctgggaaagtttgggcagagggccctggatttctacagcattcatgtgaccaaggagtccacccaccccgtgaagcccctggcccagatcgccggaaacagatacgcctccggacctgtgggaaaggccctgagcgacgcatgtatgggcacaatcgcctccttcctgtctaagtaccaggacatcatcatcgaacaccagaaggtggtgaagggcaaccagaagagactggagagcctgcgggagctggccggcaaggaaaacctggaataccctagcgtgaccctgccacctcagcctcacaccaaggagggcgttgatgcctacaacgaagtgatcgcccgggtgcgaatgtgggtgaacctgaacctgtggcagaagctgaagctaagcagagatgatgccaagcctctgctgagactgaagggattcccttcctttcctctggtcgagagacaggccaacgaagtggactggtgggacatggtgtgtaacgtgaagaagctgatcaacgagaaaaaggaggatggcaaggtgttttggcagaatctggctggctacaagagacaggaagccctgagaccatacctgagcagcgaggaagatcggaagaagggaaagaaattcgctcggtaccagctgggcgacctgctgctgcacctggaaaagaagcacggcgaggactggggaaaggtgtacgacgaggcctgggagcggattgacaagaaagtggaaggcctgagcaagcacatcaagctggaagaggaacggagaagcgaggacgcccagagcaaggccgccctgaccgactggctgcgggctaaggccagcttcgtgatcgagggcctgaaggaggccgacaaggacgagttctgcagatgcgagctgaagctgcagaagtggtacggggacctgcggggaaagcccttcgccatcgaagccgagaacagcatcctggacatcagcggcttcagcaagcagtacaactgtgccttcatctggcagaaggacggcgtgaagaagctgaacctgtacctgatcatcaactacttcaagggcggcaagctgcggttcaagaagatcaaacctgaagccttcgaagccaacagattctacaccgtgatcaacaaaaagagcggcgagatcgtgcccatggaggtgaacttcaacttcgacgaccccaacctgatcatcctgcctctggcctttggcaagagacagggcagagaattcatctggaacgacctgctgtccctggaaaccggcagcctgaagctggccaacggaagagtgatcgagaagacactgtacaacagaagaacccggcaggatgagcctgccctgttcgtggccctgaccttcgagcggcgggaggtcctggactcctccaatatcaaaccaatgaacctgatcggcgtggcaagaggcgaaaacatccccgccgtgatcgccctgaccgaccccgagggctgcccactgagccggtttaaggatagcctgggaaacccaacccacatcctgagaatcggcgagagctataaggagaagcagcggaccatccaggccaagaaggaggtggagcagcggagagccggcggctacagccggaagtacgccagcaaagccaagaatctggcagacgatatggtgagaaacaccgctagagatctgctgtactacgccgtgacccaggatgccatgctgatcttcgccaacctgagccggggcttcggccggcagggcaagcggaccttcatggccgagagacagtacacacggatggaggactggctgaccgccaagctggcctacgagggcctgagcaagacctacctgtccaagacactggcccagtacacctccaagacatgcagcaactgtgggtttaccatcaccagcgccgactacgacagggtgctggagaagctgaagaagacagcaacaggctggatgaccacaattaacggcaaggagctgaaggtggagggccagattacctactacaacagatacaagagacagaacgtagtcaaggacctgtccgtcgagctggatagactgagcgaagaatctgtgaacaacgacatctcctcctggacaaagggcagaagcggagaagctctgagcctcctgaagaaaagattctcccatagacccgtgcaggagaagttcgtgtgcctgaactgcggcttcgagacacacgcagccgagcaagccgccctgaacatcgccagatcctggctgttcctgcggagccaggagtacaagaaataccagacaaacaagacaaccggcaacaccgataagagagccttcgtcgagacctggcagtccttttaccggaagaagcttaaggaggtgtggaaacctgccgtgcggtctggcggatctggcggaggctcctccccagaagagcgtgaccttcgaggacgtggccgtgtacttcacccagaccgagtgggacggcctgagccccgcccagagggccctgtacagggacgtgatgctggagaactacggcaacgtggccagcctgggcttccccctgctgaagcccgccgtgatcagccagctggagggcggcggcaagctgggcggccccagccccctggccagcggcaccggcaccggcccccagggcctgtggggatctggctccggcagcggccccaagaaaaagagaaaagtctaagctgccttctgcggggcttgccttctggccatgcccttcttctctcccttgcacctgtacctcttggtctttgaataaagcctgagtaggaaggctagcaaaaaaaaaaaaaaaaaaaaaaaaaaaaaaaaaaaaaaaaaaaaaaaaaaaaaaaaaaaaaaaaaaaaaaaaaaaaaaaa

SEQ ID NO: 15767 - RNA, 9485 nt, synthetic construct
  source 1..9485: mol_type = other RNA
aggaaataagagagaaaagaagagtaagaagaaatataagagccaccatggcccctaagaagaagcgtaaagtgagccggatggaacgcctcgtctacgaggtgcggcagaagtgcagaaacatcgaggacatctgcatctcctgcggatctctgaacgtgaccctggagcacccactgttcatcggcggcatgtgccagaactgtaaaaactgttttctggagtgtgcctatcaatacgacgatgacggctaccagagctactgcaccatctgttgcggcggaagagaggtgctgatgtgtggaaataacaactgctgccggtgcttctgcgtggaatgcgtggacctgctggtgggccccggcgccgcccaggccgctattaaggaagatccttggaactgctacatgtgcggccacaagggcacatacggcctgctgagacggagagaggactggcctagcagactgcagatgttcttcgccaataaccacgaccaggagttcgacccccctaaggtgtaccctcccgtccccgccgagaagagaaagcccatccgggtcctgagcctgttcgatggcatcgccaccggtctgctggtgctgaaggacctgggcatccaggtggataggtacattgcctccgaggtgtgcgaggactccatcaccgtgggaatggtgcgtcatcagggcaagatcatgtacgtgggcgacgtgcggagcgtgacacagaagcatatccaggagtggggccctttcgacctggtgatcggcggcagcccttgcaatgacctgagcatcgtgaacccagcccggaagggcctgtacgagggaaccggcagactgttcttcgagttttacagactgctgcacgacgcccggcctaaggaaggcgacgaccggcccttcttttggctgttcgagaatgtggtggccatgggagtcagcgacaagcgggatattagccggttcctggagagcaaccccgtgatgatcgatgccaaggaagtgagcgccgcccaccgggccagatacttctggggcaatctgcctggcatgaacagacccctggccagcaccgtgaacgacaagctggagctgcaggagtgcctggagcacggccggatcgccaagttcagcaaggtgagaaccatcaccacccgaagcaacagcatcaaacaaggcaaggaccagcactttcctgtgttcatgaacgagaaggaggacatcctgtggtgtaccgagatggagagagtgttcgggttcccagtccactacacagatgtcagcaacatgtctagactggccagacagagactgctgggaagaagctggtccgtccctgtgatcagacacctgttcgcccctctgaaggagtacttcgcctgcgtgagcagcggcaacagcaacgccaacagccggggccccagcttctctagcggcctggtgccactgtccctgagagggagccacatgggccccatggagatctacaaaaccgtgagcgcctggaagcggcagcctgtgcgcgtgctgagcctgtttcggaatatcgataaagtcctgaaaagcctgggattcctggagagcggctctggctccggcggtggcaccctgaagtacgtggaggatgtgacaaacgtggtcagacgggatgtggagaagtggggccccttcgatctggtgtacggcagcacccaacccctgggcagctcttgtgaccggtgccctggctggtacatgtttcagttccaccggatcctgcagtacgccctgccgagacaggagtcccagcggccattcttttggattttcatggacaacttgctgctgaccgaggatgaccaggaaactaccactcggttcctgcagaccgaagccgtgaccctgcaggacgtgagaggccgggactaccagaacgccatgcgggtgtggtccaacatccctggactgaaaagcaagcacgcacctctgacccctaaagaagaggagtacctgcaggcccaggtgcggagcagaagcaagctggacgcccctaaggtggatctgctggtgaagaattgcctcctgcccctgagagagtacttcaagtatttcagccagaatagtctgcccctgggaggcagcggcggcggcgccctggtgacatttgaggacgtcgccgtgcggttcacccaggaggaatgggctctgctggatccttctcagaaaatcctgtaccgggacgtgatgagagagacataccggaatctgacctccgtgggcatcaactgggaatgttgggaccttgaagcctgcttcagaagcctgggaagaaacctgagagtgcaggtggtgaagagaaagtgcgagctgaccaacagcggcccctgcgccgagggcggcccaagcagcggcgcccctcctcccagcggcggcagcccagccggctccccaacctctaccgaggagggcacctctgagtccgccacccccgagagcggccctggcacctccaccgagcccagcgagggcagcgcacccggcagccctgccggcagccccacctccacagaggagggaaccagcaccgagcccagcgaaggcagcgccccaggcaccagcaccgagcctagtgagcaggagattaaacggatcaacaagatcagaagaagacttgtgaaagacagcaacaccaagaaggccggcaagacaggccccatgaaaaccctgctggttagagtgatgacacccgatctgagagagcggctggaaaacctgagaaagaagcctgaaaatatcccccagcccatcagcaatacatctagagccaacctgaataagctgctgaccgattacaccgaaatgaagaaggcgatcctgcatgtgtactgggaagagttccagaaggaccctgtgggcctgatgagccgggtggcccagcctgccagcaagaagatcgatcagaacaagctgaaacctgagatggacgagaagggcaacctgaccaccgccggctttgcctgctctcagtgtggccagcccctgttcgtgtacaagctggagcaggtgtctgagaagggcaaggcttacaccaactacttcggacggtgcaatgtggccgagcacgaaaagctgatcctgctggcccagctgaagcccgagaaggatagcgacgaagccgtgacatatagcctgggaaagtttgggcagagggccctggatttctacagcattcatgtgaccaaggagtccacccaccccgtgaagcccctggcccagatcgccggaaacagatacgcctccggacctgtgggaaaggccctgagcgacgcatgtatgggcacaatcgcctccttcctgtctaagtaccaggacatcatcatcgaacaccagaaggtggtgaagggcaaccagaagagactggagagcctgcgggagctggccggcaaggaaaacctggaataccctagcgtgaccctgccacctcagcctcacaccaaggagggcgttgatgcctacaacgaagtgatcgcccgggtgcgaatgtgggtgaacctgaacctgtggcagaagctgaagctaagcagagatgatgccaagcctctgctgagactgaagggattcccttcctttcctctggtcgagagacaggccaacgaagtggactggtgggacatggtgtgtaacgtgaagaagctgatcaacgagaaaaaggaggatggcaaggtgttttggcagaatctggctggctacaagagacaggaagccctgagaccatacctgagcagcgaggaagatcggaagaagggaaagaaattcgctcggtaccagctgggcgacctgctgctgcacctggaaaagaagcacggcgaggactggggaaaggtgtacgacgaggcctgggagcggattgacaagaaagtggaaggcctgagcaagcacatcaagctggaagaggaacggagaagcgaggacgcccagagcaaggccgccctgaccgactggctgcgggctaaggccagcttcgtgatcgagggcctgaaggaggccgacaaggacgagttctgcagatgcgagctgaagctgcagaagtggtacggggacctgcggggaaagcccttcgccatcgaagccgagaacagcatcctggacatcagcggcttcagcaagcagtacaactgtgccttcatctggcagaaggacggcgtgaagaagctgaacctgtacctgatcatcaactacttcaagggcggcaagctgcggttcaagaagatcaaacctgaagccttcgaagccaacagattctacaccgtgatcaacaaaaagagcggcgagatcgtgcccatggaggtgaacttcaacttcgacgaccccaacctgatcatcctgcctctggcctttggcaagagacagggcagagaattcatctggaacgacctgctgtccctggaaaccggcagcctgaagctggccaacggaagagtgatcgagaagacactgtacaacagaagaacccggcaggatgagcctgccctgttcgtggccctgaccttcgagcggcgggaggtcctggactcctccaatatcaaaccaatgaacctgatcggcgtggcaagaggcgaaaacatccccgccgtgatcgccctgaccgaccccgagggctgcccactgagccggtttaaggatagcctgggaaacccaacccacatcctgagaatcggcgagagctataaggagaagcagcggaccatccaggccaagaaggaggtggagcagcggagagccggcggctacagccggaagtacgccagcaaagccaagaatctggcagacgatatggtgagaaacaccgctagagatctgctgtactacgccgtgacccaggatgccatgctgatcttcgccaacctgagccggggcttcggccggcagggcaagcggaccttcatggccgagagacagtacacacggatggaggactggctgaccgccaagctggcctacgagggcctgagcaagacctacctgtccaagacactggcccagtacacctccaagacatgcagcaactgtgggtttaccatcaccagcgccgactacgacagggtgctggagaagctgaagaagacagcaacaggctggatgaccacaattaacggcaaggagctgaaggtggagggccagattacctactacaacagatacaagagacagaacgtagtcaaggacctgtccgtcgagctggatagactgagcgaagaatctgtgaacaacgacatctcctcctggacaaagggcagaagcggagaagctctgagcctcctgaagaaaagattctcccatagacccgtgcaggagaagttcgtgtgcctgaactgcggcttcgagacacacgcagccgagcaagccgccctgaacatcgccagatcctggctgttcctgcggagccaggagtacaagaaataccagacaaacaagacaaccggcaacaccgataagagagccttcgtcgagacctggcagtccttttaccggaagaagcttaaggaggtgtggaaacctgccgtgcggtctggcggatctggcggaggctccgacgccgtgacctacgaggacgtgcacgtgaacttcacccacgaggagtgggccctgctggaccccagccagaagagcctgtacaaggacgtgatgctggagacctactggaacctgaccagcatcggctacaagtgggaggaccacaacttcgaggagaactgccagagcagcaggaggcacggcaggcacatcaactgccccagcggctacaagccctgcgagcacgaggagtacggcaagggcggcccaagcagcggcgcccctcctcccagcggcggcagcccagccggctccccaacctctaccgaggagggcacctctgagtccgccacccccgagagcggccctggcacctccaccgagcccagcgagggcagcgcacccggcagccctgccggcagccccacctccacagaggagggaaccagcaccgagcccagcgaaggcagcgccccaggcaccagcaccgagcctagtgagcaggagattaaacggatcaacaagatcagaagaagacttgtgaaagacagcaacaccaagaaggccggcaagacaggccccatgaaaaccctgctggttagagtgatgacacccgatctgagagagcggctggaaaacctgagaaagaagcctgaaaatatcccccagcccatcagcaatacatctagagccaacctgaataagctgctgaccgattacaccgaaatgaagaaggcgatcctgcatgtgtactgggaagagttccagaaggaccctgtgggcctgatgagccgggtggcccagcctgccagcaagaagatcgatcagaacaagctgaaacctgagatggacgagaagggcaacctgaccaccgccggctttgcctgctctcagtgtggccagcccctgttcgtgtacaagctggagcaggtgtctgagaagggcaaggcttacaccaactacttcggacggtgcaatgtggccgagcacgaaaagctgatcctgctggcccagctgaagcccgagaaggatagcgacgaagccgtgacatatagcctgggaaagtttgggcagagggccctggatttctacagcattcatgtgaccaaggagtccacccaccccgtgaagcccctggcccagatcgccggaaacagatacgcctccggacctgtgggaaaggccctgagcgacgcatgtatgggcacaatcgcctccttcctgtctaagtaccaggacatcatcatcgaacaccagaaggtggtgaagggcaaccagaagagactggagagcctgcgggagctggccggcaaggaaaacctggaataccctagcgtgaccctgccacctcagcctcacaccaaggagggcgttgatgcctacaacgaagtgatcgcccgggtgcgaatgtgggtgaacctgaacctgtggcagaagctgaagctaagcagagatgatgccaagcctctgctgagactgaagggattcccttcctttcctctggtcgagagacaggccaacgaagtggactggtgggacatggtgtgtaacgtgaagaagctgatcaacgagaaaaaggaggatggcaaggtgttttggcagaatctggctggctacaagagacaggaagccctgagaccatacctgagcagcgaggaagatcggaagaagggaaagaaattcgctcggtaccagctgggcgacctgctgctgcacctggaaaagaagcacggcgaggactggggaaaggtgtacgacgaggcctgggagcggattgacaagaaagtggaaggcctgagcaagcacatcaagctggaagaggaacggagaagcgaggacgcccagagcaaggccgccctgaccgactggctgcgggctaaggccagcttcgtgatcgagggcctgaaggaggccgacaaggacgagttctgcagatgcgagctgaagctgcagaagtggtacggggacctgcggggaaagcccttcgccatcgaagccgagaacagcatcctggacatcagcggcttcagcaagcagtacaactgtgccttcatctggcagaaggacggcgtgaagaagctgaacctgtacctgatcatcaactacttcaagggcggcaagctgcggttcaagaagatcaaacctgaagccttcgaagccaacagattctacaccgtgatcaacaaaaagagcggcgagatcgtgcccatggaggtgaacttcaacttcgacgaccccaacctgatcatcctgcctctggcctttggcaagagacagggcagagaattcatctggaacgacctgctgtccctggaaaccggcagcctgaagctggccaacggaagagtgatcgagaagacactgtacaacagaagaacccggcaggatgagcctgccctgttcgtggccctgaccttcgagcggcgggaggtcctggactcctccaatatcaaaccaatgaacctgatcggcgtggcaagaggcgaaaacatccccgccgtgatcgccctgaccgaccccgagggctgcccactgagccggtttaaggatagcctgggaaacccaacccacatcctgagaatcggcgagagctataaggagaagcagcggaccatccaggccaagaaggaggtggagcagcggagagccggcggctacagccggaagtacgccagcaaagccaagaatctggcagacgatatggtgagaaacaccgctagagatctgctgtactacgccgtgacccaggatgccatgctgatcttcgccaacctgagccggggcttcggccggcagggcaagcggaccttcatggccgagagacagtacacacggatggaggactggctgaccgccaagctggcctacgagggcctgagcaagacctacctgtccaagacactggcccagtacacctccaagacatgcagcaactgtgggtttaccatcaccagcgccgactacgacagggtgctggagaagctgaagaagacagcaacaggctggatgaccacaattaacggcaaggagctgaaggtggagggccagattacctactacaacagatacaagagacagaacgtagtcaaggacctgtccgtcgagctggatagactgagcgaagaatctgtgaacaacgacatctcctcctggacaaagggcagaagcggagaagctctgagcctcctgaagaaaagattctcccatagacccgtgcaggagaagttcgtgtgcctgaactgcggcttcgagacacacgcagccgagcaagccgccctgaacatcgccagatcctggctgttcctgcggagccaggagtacaagaaataccagacaaacaagacaaccggcaacaccgataagagagccttcgtcgagacctggcagtccttttaccggaagaagcttaaggaggtgtggaaacctgccgtgcggtctggcggatctggcggaggctcctgacgccgtgacctacgaggacgtgcacgtgaacttcacccacgaggagtgggccctgctggaccccagccagaagagcctgtacaaggacgtgatgctggagacctactggaacctgaccagcatcggctacaagtgggaggaccacaacttcgaggagaactgccagagcagcaggaggcacggcaggcacatcaactgccccagcggctacaagccctgcgagcacgaggagtacggcaagggatctggctccggcagcggccccaagaaaaagagaaaagtctaagctgccttctgcggggcttgccttctggccatgcccttcttctctcccttgcacctgtacctcttggtctttgaataaagcctgagtaggaaggctagcaaaaaaaaaaaaaaaaaaaaaaaaaaaaaaaaaaaaaaaaaaaaaaaaaaaaaaaaaaaaaaaaaaaaaaaaaaaaaaaa

SEQ ID NO: 15768 - RNA, 9485 nt, synthetic construct
  source 1..9485: mol_type = other RNA
aggaaataagagagaaaagaagagtaagaagaaatataagagccaccatggcccctaagaagaagcgtaaagtgagccggatggaacgcctcgtctacgaggtgcggcagaagtgcagaaacatcgaggacatctgcatctcctgcggatctctgaacgtgaccctggagcacccactgttcatcggcggcatgtgccagaactgtaaaaactgttttctggagtgtgcctatcaatacgacgatgacggctaccagagctactgcaccatctgttgcggcggaagagaggtgctgatgtgtggaaataacaactgctgccggtgcttctgcgtggaatgcgtggacctgctggtgggccccggcgccgcccaggccgctattaaggaagatccttggaactgctacatgtgcggccacaagggcacatacggcctgctgagacggagagaggactggcctagcagactgcagatgttcttcgccaataaccacgaccaggagttcgacccccctaaggtgtaccctcccgtccccgccgagaagagaaagcccatccgggtcctgagcctgttcgatggcatcgccaccggtctgctggtgctgaaggacctgggcatccaggtggataggtacattgcctccgaggtgtgcgaggactccatcaccgtgggaatggtgcgtcatcagggcaagatcatgtacgtgggcgacgtgcggagcgtgacacagaagcatatccaggagtggggccctttcgacctggtgatcggcggcagcccttgcaatgacctgagcatcgtgaacccagcccggaagggcctgtacgagggaaccggcagactgttcttcgagttttacagactgctgcacgacgcccggcctaaggaaggcgacgaccggcccttcttttggctgttcgagaatgtggtggccatgggagtcagcgacaagcgggatattagccggttcctggagagcaaccccgtgatgatcgatgccaaggaagtgagcgccgcccaccgggccagatacttctggggcaatctgcctggcatgaacagacccctggccagcaccgtgaacgacaagctggagctgcaggagtgcctggagcacggccggatcgccaagttcagcaaggtgagaaccatcaccacccgaagcaacagcatcaaacaaggcaaggaccagcactttcctgtgttcatgaacgagaaggaggacatcctgtggtgtaccgagatggagagagtgttcgggttcccagtccactacacagatgtcagcaacatgtctagactggccagacagagactgctgggaagaagctggtccgtccctgtgatcagacacctgttcgcccctctgaaggagtacttcgcctgcgtgagcagcggcaacagcaacgccaacagccggggccccagcttctctagcggcctggtgccactgtccctgagagggagccacatgggccccatggagatctacaaaaccgtgagcgcctggaagcggcagcctgtgcgcgtgctgagcctgtttcggaatatcgataaagtcctgaaaagcctgggattcctggagagcggctctggctccggcggtggcaccctgaagtacgtggaggatgtgacaaacgtggtcagacgggatgtggagaagtggggccccttcgatctggtgtacggcagcacccaacccctgggcagctcttgtgaccggtgccctggctggtacatgtttcagttccaccggatcctgcagtacgccctgccgagacaggagtcccagcggccattcttttggattttcatggacaacttgctgctgaccgaggatgaccaggaaactaccactcggttcctgcagaccgaagccgtgaccctgcaggacgtgagaggccgggactaccagaacgccatgcgggtgtggtccaacatccctggactgaaaagcaagcacgcacctctgacccctaaagaagaggagtacctgcaggcccaggtgcggagcagaagcaagctggacgcccctaaggtggatctgctggtgaagaattgcctcctgcccctgagagagtacttcaagtatttcagccagaatagtctgcccctgggaggcagcggcggcggcgccctggtgacatttgaggacgtcgccgtgcggttcacccaggaggaatgggctctgctggatccttctcagaaaatcctgtaccgggacgtgatgagagagacataccggaatctgacctccgtgggcatcaactgggaatgttgggaccttgaagcctgcttcagaagcctgggaagaaacctgagagtgcaggtggtgaagagaaagtgcgagctgaccaacagcggcccctgcgccgagggcggcccaagcagcggcgcccctcctcccagcggcggcagcccagccggctccccaacctctaccgaggagggcacctctgagtccgccacccccgagagcggccctggcacctccaccgagcccagcgagggcagcgcacccggcagccctgccggcagccccacctccacagaggagggaaccagcaccgagcccagcgaaggcagcgccccaggcaccagcaccgagcctagtgagcaggagattaaacggatcaacaagatcagaagaagacttgtgaaagacagcaacaccaagaaggccggcaagacaggccccatgaaaaccctgctggttagagtgatgacacccgatctgagagagcggctggaaaacctgagaaagaagcctgaaaatatcccccagcccatcagcaatacatctagagccaacctgaataagctgctgaccgattacaccgaaatgaagaaggcgatcctgcatgtgtactgggaagagttccagaaggaccctgtgggcctgatgagccgggtggcccagcctgccagcaagaagatcgatcagaacaagctgaaacctgagatggacgagaagggcaacctgaccaccgccggctttgcctgctctcagtgtggccagcccctgttcgtgtacaagctggagcaggtgtctgagaagggcaaggcttacaccaactacttcggacggtgcaatgtggccgagcacgaaaagctgatcctgctggcccagctgaagcccgagaaggatagcgacgaagccgtgacatatagcctgggaaagtttgggcagagggccctggatttctacagcattcatgtgaccaaggagtccacccaccccgtgaagcccctggcccagatcgccggaaacagatacgcctccggacctgtgggaaaggccctgagcgacgcatgtatgggcacaatcgcctccttcctgtctaagtaccaggacatcatcatcgaacaccagaaggtggtgaagggcaaccagaagagactggagagcctgcgggagctggccggcaaggaaaacctggaataccctagcgtgaccctgccacctcagcctcacaccaaggagggcgttgatgcctacaacgaagtgatcgcccgggtgcgaatgtgggtgaacctgaacctgtggcagaagctgaagctaagcagagatgatgccaagcctctgctgagactgaagggattcccttcctttcctctggtcgagagacaggccaacgaagtggactggtgggacatggtgtgtaacgtgaagaagctgatcaacgagaaaaaggaggatggcaaggtgttttggcagaatctggctggctacaagagacaggaagccctgagaccatacctgagcagcgaggaagatcggaagaagggaaagaaattcgctcggtaccagctgggcgacctgctgctgcacctggaaaagaagcacggcgaggactggggaaaggtgtacgacgaggcctgggagcggattgacaagaaagtggaaggcctgagcaagcacatcaagctggaagaggaacggagaagcgaggacgcccagagcaaggccgccctgaccgactggctgcgggctaaggccagcttcgtgatcgagggcctgaaggaggccgacaaggacgagttctgcagatgcgagctgaagctgcagaagtggtacggggacctgcggggaaagcccttcgccatcgaagccgagaacagcatcctggacatcagcggcttcagcaagcagtacaactgtgccttcatctggcagaaggacggcgtgaagaagctgaacctgtacctgatcatcaactacttcaagggcggcaagctgcggttcaagaagatcaaacctgaagccttcgaagccaacagattctacaccgtgatcaacaaaaagagcggcgagatcgtgcccatggaggtgaacttcaacttcgacgaccccaacctgatcatcctgcctctggcctttggcaagagacagggcagagaattcatctggaacgacctgctgtccctggaaaccggcagcctgaagctggccaacggaagagtgatcgagaagacactgtacaacagaagaacccggcaggatgagcctgccctgttcgtggccctgaccttcgagcggcgggaggtcctggactcctccaatatcaaaccaatgaacctgatcggcgtggcaagaggcgaaaacatccccgccgtgatcgccctgaccgaccccgagggctgcccactgagccggtttaaggatagcctgggaaacccaacccacatcctgagaatcggcgagagctataaggagaagcagcggaccatccaggccaagaaggaggtggagcagcggagagccggcggctacagccggaagtacgccagcaaagccaagaatctggcagacgatatggtgagaaacaccgctagagatctgctgtactacgccgtgacccaggatgccatgctgatcttcgccaacctgagccggggcttcggccggcagggcaagcggaccttcatggccgagagacagtacacacggatggaggactggctgaccgccaagctggcctacgagggcctgagcaagacctacctgtccaagacactggcccagtacacctccaagacatgcagcaactgtgggtttaccatcaccagcgccgactacgacagggtgctggagaagctgaagaagacagcaacaggctggatgaccacaattaacggcaaggagctgaaggtggagggccagattacctactacaacagatacaagagacagaacgtagtcaaggacctgtccgtcgagctggatagactgagcgaagaatctgtgaacaacgacatctcctcctggacaaagggcagaagcggagaagctctgagcctcctgaagaaaagattctcccatagacccgtgcaggagaagttcgtgtgcctgaactgcggcttcgagacacacgcagccgagcaagccgccctgaacatcgccagatcctggctgttcctgcggagccaggagtacaagaaataccagacaaacaagacaaccggcaacaccgataagagagccttcgtcgagacctggcagtccttttaccggaagaagcttaaggaggtgtggaaacctgccgtgcggtctggcggatctggcggaggctccttccaggaggccgtgaccttcaaggacgtggccgtgaccttcaccgaggaggagctgggcctgctggacagcacccagaggaagctgtacagggacgtgatgctggagaacttcaggaacctgctgctggtgggcaaccagcccttcaagcccgagctgatcttccagctggagagggaggagatgctgctgatgctggagaccgagatccagaggggcaccaagagccaccacagcctggagggcggcccaagcagcggcgcccctcctcccagcggcggcagcccagccggctccccaacctctaccgaggagggcacctctgagtccgccacccccgagagcggccctggcacctccaccgagcccagcgagggcagcgcacccggcagccctgccggcagccccacctccacagaggagggaaccagcaccgagcccagcgaaggcagcgccccaggcaccagcaccgagcctagtgagcaggagattaaacggatcaacaagatcagaagaagacttgtgaaagacagcaacaccaagaaggccggcaagacaggccccatgaaaaccctgctggttagagtgatgacacccgatctgagagagcggctggaaaacctgagaaagaagcctgaaaatatcccccagcccatcagcaatacatctagagccaacctgaataagctgctgaccgattacaccgaaatgaagaaggcgatcctgcatgtgtactgggaagagttccagaaggaccctgtgggcctgatgagccgggtggcccagcctgccagcaagaagatcgatcagaacaagctgaaacctgagatggacgagaagggcaacctgaccaccgccggctttgcctgctctcagtgtggccagcccctgttcgtgtacaagctggagcaggtgtctgagaagggcaaggcttacaccaactacttcggacggtgcaatgtggccgagcacgaaaagctgatcctgctggcccagctgaagcccgagaaggatagcgacgaagccgtgacatatagcctgggaaagtttgggcagagggccctggatttctacagcattcatgtgaccaaggagtccacccaccccgtgaagcccctggcccagatcgccggaaacagatacgcctccggacctgtgggaaaggccctgagcgacgcatgtatgggcacaatcgcctccttcctgtctaagtaccaggacatcatcatcgaacaccagaaggtggtgaagggcaaccagaagagactggagagcctgcgggagctggccggcaaggaaaacctggaataccctagcgtgaccctgccacctcagcctcacaccaaggagggcgttgatgcctacaacgaagtgatcgcccgggtgcgaatgtgggtgaacctgaacctgtggcagaagctgaagctaagcagagatgatgccaagcctctgctgagactgaagggattcccttcctttcctctggtcgagagacaggccaacgaagtggactggtgggacatggtgtgtaacgtgaagaagctgatcaacgagaaaaaggaggatggcaaggtgttttggcagaatctggctggctacaagagacaggaagccctgagaccatacctgagcagcgaggaagatcggaagaagggaaagaaattcgctcggtaccagctgggcgacctgctgctgcacctggaaaagaagcacggcgaggactggggaaaggtgtacgacgaggcctgggagcggattgacaagaaagtggaaggcctgagcaagcacatcaagctggaagaggaacggagaagcgaggacgcccagagcaaggccgccctgaccgactggctgcgggctaaggccagcttcgtgatcgagggcctgaaggaggccgacaaggacgagttctgcagatgcgagctgaagctgcagaagtggtacggggacctgcggggaaagcccttcgccatcgaagccgagaacagcatcctggacatcagcggcttcagcaagcagtacaactgtgccttcatctggcagaaggacggcgtgaagaagctgaacctgtacctgatcatcaactacttcaagggcggcaagctgcggttcaagaagatcaaacctgaagccttcgaagccaacagattctacaccgtgatcaacaaaaagagcggcgagatcgtgcccatggaggtgaacttcaacttcgacgaccccaacctgatcatcctgcctctggcctttggcaagagacagggcagagaattcatctggaacgacctgctgtccctggaaaccggcagcctgaagctggccaacggaagagtgatcgagaagacactgtacaacagaagaacccggcaggatgagcctgccctgttcgtggccctgaccttcgagcggcgggaggtcctggactcctccaatatcaaaccaatgaacctgatcggcgtggcaagaggcgaaaacatccccgccgtgatcgccctgaccgaccccgagggctgcccactgagccggtttaaggatagcctgggaaacccaacccacatcctgagaatcggcgagagctataaggagaagcagcggaccatccaggccaagaaggaggtggagcagcggagagccggcggctacagccggaagtacgccagcaaagccaagaatctggcagacgatatggtgagaaacaccgctagagatctgctgtactacgccgtgacccaggatgccatgctgatcttcgccaacctgagccggggcttcggccggcagggcaagcggaccttcatggccgagagacagtacacacggatggaggactggctgaccgccaagctggcctacgagggcctgagcaagacctacctgtccaagacactggcccagtacacctccaagacatgcagcaactgtgggtttaccatcaccagcgccgactacgacagggtgctggagaagctgaagaagacagcaacaggctggatgaccacaattaacggcaaggagctgaaggtggagggccagattacctactacaacagatacaagagacagaacgtagtcaaggacctgtccgtcgagctggatagactgagcgaagaatctgtgaacaacgacatctcctcctggacaaagggcagaagcggagaagctctgagcctcctgaagaaaagattctcccatagacccgtgcaggagaagttcgtgtgcctgaactgcggcttcgagacacacgcagccgagcaagccgccctgaacatcgccagatcctggctgttcctgcggagccaggagtacaagaaataccagacaaacaagacaaccggcaacaccgataagagagccttcgtcgagacctggcagtccttttaccggaagaagcttaaggaggtgtggaaacctgccgtgcggtctggcggatctggcggaggctcctttccaggaggccgtgaccttcaaggacgtggccgtgaccttcaccgaggaggagctgggcctgctggacagcacccagaggaagctgtacagggacgtgatgctggagaacttcaggaacctgctgctggtgggcaaccagcccttcaagcccgagctgatcttccagctggagagggaggagatgctgctgatgctggagaccgagatccagaggggcaccaagagccaccacagcctggagggatctggctccggcagcggccccaagaaaaagagaaaagtctaagctgccttctgcggggcttgccttctggccatgcccttcttctctcccttgcacctgtacctcttggtctttgaataaagcctgagtaggaaggctagcaaaaaaaaaaaaaaaaaaaaaaaaaaaaaaaaaaaaaaaaaaaaaaaaaaaaaaaaaaaaaaaaaaaaaaaaaaaaaaaa

SEQ ID NO: 15769 - RNA, 9485 nt, synthetic construct
  source 1..9485: mol_type = other RNA
aggaaataagagagaaaagaagagtaagaagaaatataagagccaccatggcccctaagaagaagcgtaaagtgagccggatggaacgcctcgtctacgaggtgcggcagaagtgcagaaacatcgaggacatctgcatctcctgcggatctctgaacgtgaccctggagcacccactgttcatcggcggcatgtgccagaactgtaaaaactgttttctggagtgtgcctatcaatacgacgatgacggctaccagagctactgcaccatctgttgcggcggaagagaggtgctgatgtgtggaaataacaactgctgccggtgcttctgcgtggaatgcgtggacctgctggtgggccccggcgccgcccaggccgctattaaggaagatccttggaactgctacatgtgcggccacaagggcacatacggcctgctgagacggagagaggactggcctagcagactgcagatgttcttcgccaataaccacgaccaggagttcgacccccctaaggtgtaccctcccgtccccgccgagaagagaaagcccatccgggtcctgagcctgttcgatggcatcgccaccggtctgctggtgctgaaggacctgggcatccaggtggataggtacattgcctccgaggtgtgcgaggactccatcaccgtgggaatggtgcgtcatcagggcaagatcatgtacgtgggcgacgtgcggagcgtgacacagaagcatatccaggagtggggccctttcgacctggtgatcggcggcagcccttgcaatgacctgagcatcgtgaacccagcccggaagggcctgtacgagggaaccggcagactgttcttcgagttttacagactgctgcacgacgcccggcctaaggaaggcgacgaccggcccttcttttggctgttcgagaatgtggtggccatgggagtcagcgacaagcgggatattagccggttcctggagagcaaccccgtgatgatcgatgccaaggaagtgagcgccgcccaccgggccagatacttctggggcaatctgcctggcatgaacagacccctggccagcaccgtgaacgacaagctggagctgcaggagtgcctggagcacggccggatcgccaagttcagcaaggtgagaaccatcaccacccgaagcaacagcatcaaacaaggcaaggaccagcactttcctgtgttcatgaacgagaaggaggacatcctgtggtgtaccgagatggagagagtgttcgggttcccagtccactacacagatgtcagcaacatgtctagactggccagacagagactgctgggaagaagctggtccgtccctgtgatcagacacctgttcgcccctctgaaggagtacttcgcctgcgtgagcagcggcaacagcaacgccaacagccggggccccagcttctctagcggcctggtgccactgtccctgagagggagccacatgggccccatggagatctacaaaaccgtgagcgcctggaagcggcagcctgtgcgcgtgctgagcctgtttcggaatatcgataaagtcctgaaaagcctgggattcctggagagcggctctggctccggcggtggcaccctgaagtacgtggaggatgtgacaaacgtggtcagacgggatgtggagaagtggggccccttcgatctggtgtacggcagcacccaacccctgggcagctcttgtgaccggtgccctggctggtacatgtttcagttccaccggatcctgcagtacgccctgccgagacaggagtcccagcggccattcttttggattttcatggacaacttgctgctgaccgaggatgaccaggaaactaccactcggttcctgcagaccgaagccgtgaccctgcaggacgtgagaggccgggactaccagaacgccatgcgggtgtggtccaacatccctggactgaaaagcaagcacgcacctctgacccctaaagaagaggagtacctgcaggcccaggtgcggagcagaagcaagctggacgcccctaaggtggatctgctggtgaagaattgcctcctgcccctgagagagtacttcaagtatttcagccagaatagtctgcccctgggaggcagcggcggcggcgccctggtgacatttgaggacgtcgccgtgcggttcacccaggaggaatgggctctgctggatccttctcagaaaatcctgtaccgggacgtgatgagagagacataccggaatctgacctccgtgggcatcaactgggaatgttgggaccttgaagcctgcttcagaagcctgggaagaaacctgagagtgcaggtggtgaagagaaagtgcgagctgaccaacagcggcccctgcgccgagggcggcccaagcagcggcgcccctcctcccagcggcggcagcccagccggctccccaacctctaccgaggagggcacctctgagtccgccacccccgagagcggccctggcacctccaccgagcccagcgagggcagcgcacccggcagccctgccggcagccccacctccacagaggagggaaccagcaccgagcccagcgaaggcagcgccccaggcaccagcaccgagcctagtgagcaggagattaaacggatcaacaagatcagaagaagacttgtgaaagacagcaacaccaagaaggccggcaagacaggccccatgaaaaccctgctggttagagtgatgacacccgatctgagagagcggctggaaaacctgagaaagaagcctgaaaatatcccccagcccatcagcaatacatctagagccaacctgaataagctgctgaccgattacaccgaaatgaagaaggcgatcctgcatgtgtactgggaagagttccagaaggaccctgtgggcctgatgagccgggtggcccagcctgccagcaagaagatcgatcagaacaagctgaaacctgagatggacgagaagggcaacctgaccaccgccggctttgcctgctctcagtgtggccagcccctgttcgtgtacaagctggagcaggtgtctgagaagggcaaggcttacaccaactacttcggacggtgcaatgtggccgagcacgaaaagctgatcctgctggcccagctgaagcccgagaaggatagcgacgaagccgtgacatatagcctgggaaagtttgggcagagggccctggatttctacagcattcatgtgaccaaggagtccacccaccccgtgaagcccctggcccagatcgccggaaacagatacgcctccggacctgtgggaaaggccctgagcgacgcatgtatgggcacaatcgcctccttcctgtctaagtaccaggacatcatcatcgaacaccagaaggtggtgaagggcaaccagaagagactggagagcctgcgggagctggccggcaaggaaaacctggaataccctagcgtgaccctgccacctcagcctcacaccaaggagggcgttgatgcctacaacgaagtgatcgcccgggtgcgaatgtgggtgaacctgaacctgtggcagaagctgaagctaagcagagatgatgccaagcctctgctgagactgaagggattcccttcctttcctctggtcgagagacaggccaacgaagtggactggtgggacatggtgtgtaacgtgaagaagctgatcaacgagaaaaaggaggatggcaaggtgttttggcagaatctggctggctacaagagacaggaagccctgagaccatacctgagcagcgaggaagatcggaagaagggaaagaaattcgctcggtaccagctgggcgacctgctgctgcacctggaaaagaagcacggcgaggactggggaaaggtgtacgacgaggcctgggagcggattgacaagaaagtggaaggcctgagcaagcacatcaagctggaagaggaacggagaagcgaggacgcccagagcaaggccgccctgaccgactggctgcgggctaaggccagcttcgtgatcgagggcctgaaggaggccgacaaggacgagttctgcagatgcgagctgaagctgcagaagtggtacggggacctgcggggaaagcccttcgccatcgaagccgagaacagcatcctggacatcagcggcttcagcaagcagtacaactgtgccttcatctggcagaaggacggcgtgaagaagctgaacctgtacctgatcatcaactacttcaagggcggcaagctgcggttcaagaagatcaaacctgaagccttcgaagccaacagattctacaccgtgatcaacaaaaagagcggcgagatcgtgcccatggaggtgaacttcaacttcgacgaccccaacctgatcatcctgcctctggcctttggcaagagacagggcagagaattcatctggaacgacctgctgtccctggaaaccggcagcctgaagctggccaacggaagagtgatcgagaagacactgtacaacagaagaacccggcaggatgagcctgccctgttcgtggccctgaccttcgagcggcgggaggtcctggactcctccaatatcaaaccaatgaacctgatcggcgtggcaagaggcgaaaacatccccgccgtgatcgccctgaccgaccccgagggctgcccactgagccggtttaaggatagcctgggaaacccaacccacatcctgagaatcggcgagagctataaggagaagcagcggaccatccaggccaagaaggaggtggagcagcggagagccggcggctacagccggaagtacgccagcaaagccaagaatctggcagacgatatggtgagaaacaccgctagagatctgctgtactacgccgtgacccaggatgccatgctgatcttcgccaacctgagccggggcttcggccggcagggcaagcggaccttcatggccgagagacagtacacacggatggaggactggctgaccgccaagctggcctacgagggcctgagcaagacctacctgtccaagacactggcccagtacacctccaagacatgcagcaactgtgggtttaccatcaccagcgccgactacgacagggtgctggagaagctgaagaagacagcaacaggctggatgaccacaattaacggcaaggagctgaaggtggagggccagattacctactacaacagatacaagagacagaacgtagtcaaggacctgtccgtcgagctggatagactgagcgaagaatctgtgaacaacgacatctcctcctggacaaagggcagaagcggagaagctctgagcctcctgaagaaaagattctcccatagacccgtgcaggagaagttcgtgtgcctgaactgcggcttcgagacacacgcagccgagcaagccgccctgaacatcgccagatcctggctgttcctgcggagccaggagtacaagaaataccagacaaacaagacaaccggcaacaccgataagagagccttcgtcgagacctggcagtccttttaccggaagaagcttaaggaggtgtggaaacctgccgtgcggtctggcggatctggcggaggctccatggagggcctggtgatgttccaggacctgagcatcgacttcagccaggaggagtgggagtgcctggacgccgcccagaaggacctgtacagggacgtgatgatggagaactacagcagcctggtgagcctgggcctgagcacccccaagcccgacgtgatcagcctgctggagcagggcaaggagccctggatggtgagcagggacgtgctgggcggctggtgccccgacaggctgaagaagggcggcccaagcagcggcgcccctcctcccagcggcggcagcccagccggctccccaacctctaccgaggagggcacctctgagtccgccacccccgagagcggccctggcacctccaccgagcccagcgagggcagcgcacccggcagccctgccggcagccccacctccacagaggagggaaccagcaccgagcccagcgaaggcagcgccccaggcaccagcaccgagcctagtgagcaggagattaaacggatcaacaagatcagaagaagacttgtgaaagacagcaacaccaagaaggccggcaagacaggccccatgaaaaccctgctggttagagtgatgacacccgatctgagagagcggctggaaaacctgagaaagaagcctgaaaatatcccccagcccatcagcaatacatctagagccaacctgaataagctgctgaccgattacaccgaaatgaagaaggcgatcctgcatgtgtactgggaagagttccagaaggaccctgtgggcctgatgagccgggtggcccagcctgccagcaagaagatcgatcagaacaagctgaaacctgagatggacgagaagggcaacctgaccaccgccggctttgcctgctctcagtgtggccagcccctgttcgtgtacaagctggagcaggtgtctgagaagggcaaggcttacaccaactacttcggacggtgcaatgtggccgagcacgaaaagctgatcctgctggcccagctgaagcccgagaaggatagcgacgaagccgtgacatatagcctgggaaagtttgggcagagggccctggatttctacagcattcatgtgaccaaggagtccacccaccccgtgaagcccctggcccagatcgccggaaacagatacgcctccggacctgtgggaaaggccctgagcgacgcatgtatgggcacaatcgcctccttcctgtctaagtaccaggacatcatcatcgaacaccagaaggtggtgaagggcaaccagaagagactggagagcctgcgggagctggccggcaaggaaaacctggaataccctagcgtgaccctgccacctcagcctcacaccaaggagggcgttgatgcctacaacgaagtgatcgcccgggtgcgaatgtgggtgaacctgaacctgtggcagaagctgaagctaagcagagatgatgccaagcctctgctgagactgaagggattcccttcctttcctctggtcgagagacaggccaacgaagtggactggtgggacatggtgtgtaacgtgaagaagctgatcaacgagaaaaaggaggatggcaaggtgttttggcagaatctggctggctacaagagacaggaagccctgagaccatacctgagcagcgaggaagatcggaagaagggaaagaaattcgctcggtaccagctgggcgacctgctgctgcacctggaaaagaagcacggcgaggactggggaaaggtgtacgacgaggcctgggagcggattgacaagaaagtggaaggcctgagcaagcacatcaagctggaagaggaacggagaagcgaggacgcccagagcaaggccgccctgaccgactggctgcgggctaaggccagcttcgtgatcgagggcctgaaggaggccgacaaggacgagttctgcagatgcgagctgaagctgcagaagtggtacggggacctgcggggaaagcccttcgccatcgaagccgagaacagcatcctggacatcagcggcttcagcaagcagtacaactgtgccttcatctggcagaaggacggcgtgaagaagctgaacctgtacctgatcatcaactacttcaagggcggcaagctgcggttcaagaagatcaaacctgaagccttcgaagccaacagattctacaccgtgatcaacaaaaagagcggcgagatcgtgcccatggaggtgaacttcaacttcgacgaccccaacctgatcatcctgcctctggcctttggcaagagacagggcagagaattcatctggaacgacctgctgtccctggaaaccggcagcctgaagctggccaacggaagagtgatcgagaagacactgtacaacagaagaacccggcaggatgagcctgccctgttcgtggccctgaccttcgagcggcgggaggtcctggactcctccaatatcaaaccaatgaacctgatcggcgtggcaagaggcgaaaacatccccgccgtgatcgccctgaccgaccccgagggctgcccactgagccggtttaaggatagcctgggaaacccaacccacatcctgagaatcggcgagagctataaggagaagcagcggaccatccaggccaagaaggaggtggagcagcggagagccggcggctacagccggaagtacgccagcaaagccaagaatctggcagacgatatggtgagaaacaccgctagagatctgctgtactacgccgtgacccaggatgccatgctgatcttcgccaacctgagccggggcttcggccggcagggcaagcggaccttcatggccgagagacagtacacacggatggaggactggctgaccgccaagctggcctacgagggcctgagcaagacctacctgtccaagacactggcccagtacacctccaagacatgcagcaactgtgggtttaccatcaccagcgccgactacgacagggtgctggagaagctgaagaagacagcaacaggctggatgaccacaattaacggcaaggagctgaaggtggagggccagattacctactacaacagatacaagagacagaacgtagtcaaggacctgtccgtcgagctggatagactgagcgaagaatctgtgaacaacgacatctcctcctggacaaagggcagaagcggagaagctctgagcctcctgaagaaaagattctcccatagacccgtgcaggagaagttcgtgtgcctgaactgcggcttcgagacacacgcagccgagcaagccgccctgaacatcgccagatcctggctgttcctgcggagccaggagtacaagaaataccagacaaacaagacaaccggcaacaccgataagagagccttcgtcgagacctggcagtccttttaccggaagaagcttaaggaggtgtggaaacctgccgtgcggtctggcggatctggcggaggctcctatggagggcctggtgatgttccaggacctgagcatcgacttcagccaggaggagtgggagtgcctggacgccgcccagaaggacctgtacagggacgtgatgatggagaactacagcagcctggtgagcctgggcctgagcacccccaagcccgacgtgatcagcctgctggagcagggcaaggagccctggatggtgagcagggacgtgctgggcggctggtgccccgacaggctgaagaagggatctggctccggcagcggccccaagaaaaagagaaaagtctaagctgccttctgcggggcttgccttctggccatgcccttcttctctcccttgcacctgtacctcttggtctttgaataaagcctgagtaggaaggctagcaaaaaaaaaaaaaaaaaaaaaaaaaaaaaaaaaaaaaaaaaaaaaaaaaaaaaaaaaaaaaaaaaaaaaaaaaaaaaaaa

SEQ ID NO: 15770 - RNA, 9485 nt, synthetic construct
  source 1..9485: mol_type = other RNA
aggaaataagagagaaaagaagagtaagaagaaatataagagccaccatggcccctaagaagaagcgtaaagtgagccggatggaacgcctcgtctacgaggtgcggcagaagtgcagaaacatcgaggacatctgcatctcctgcggatctctgaacgtgaccctggagcacccactgttcatcggcggcatgtgccagaactgtaaaaactgttttctggagtgtgcctatcaatacgacgatgacggctaccagagctactgcaccatctgttgcggcggaagagaggtgctgatgtgtggaaataacaactgctgccggtgcttctgcgtggaatgcgtggacctgctggtgggccccggcgccgcccaggccgctattaaggaagatccttggaactgctacatgtgcggccacaagggcacatacggcctgctgagacggagagaggactggcctagcagactgcagatgttcttcgccaataaccacgaccaggagttcgacccccctaaggtgtaccctcccgtccccgccgagaagagaaagcccatccgggtcctgagcctgttcgatggcatcgccaccggtctgctggtgctgaaggacctgggcatccaggtggataggtacattgcctccgaggtgtgcgaggactccatcaccgtgggaatggtgcgtcatcagggcaagatcatgtacgtgggcgacgtgcggagcgtgacacagaagcatatccaggagtggggccctttcgacctggtgatcggcggcagcccttgcaatgacctgagcatcgtgaacccagcccggaagggcctgtacgagggaaccggcagactgttcttcgagttttacagactgctgcacgacgcccggcctaaggaaggcgacgaccggcccttcttttggctgttcgagaatgtggtggccatgggagtcagcgacaagcgggatattagccggttcctggagagcaaccccgtgatgatcgatgccaaggaagtgagcgccgcccaccgggccagatacttctggggcaatctgcctggcatgaacagacccctggccagcaccgtgaacgacaagctggagctgcaggagtgcctggagcacggccggatcgccaagttcagcaaggtgagaaccatcaccacccgaagcaacagcatcaaacaaggcaaggaccagcactttcctgtgttcatgaacgagaaggaggacatcctgtggtgtaccgagatggagagagtgttcgggttcccagtccactacacagatgtcagcaacatgtctagactggccagacagagactgctgggaagaagctggtccgtccctgtgatcagacacctgttcgcccctctgaaggagtacttcgcctgcgtgagcagcggcaacagcaacgccaacagccggggccccagcttctctagcggcctggtgccactgtccctgagagggagccacatgggccccatggagatctacaaaaccgtgagcgcctggaagcggcagcctgtgcgcgtgctgagcctgtttcggaatatcgataaagtcctgaaaagcctgggattcctggagagcggctctggctccggcggtggcaccctgaagtacgtggaggatgtgacaaacgtggtcagacgggatgtggagaagtggggccccttcgatctggtgtacggcagcacccaacccctgggcagctcttgtgaccggtgccctggctggtacatgtttcagttccaccggatcctgcagtacgccctgccgagacaggagtcccagcggccattcttttggattttcatggacaacttgctgctgaccgaggatgaccaggaaactaccactcggttcctgcagaccgaagccgtgaccctgcaggacgtgagaggccgggactaccagaacgccatgcgggtgtggtccaacatccctggactgaaaagcaagcacgcacctctgacccctaaagaagaggagtacctgcaggcccaggtgcggagcagaagcaagctggacgcccctaaggtggatctgctggtgaagaattgcctcctgcccctgagagagtacttcaagtatttcagccagaatagtctgcccctgggaggcagcggcggcggcgccctggtgacatttgaggacgtcgccgtgcggttcacccaggaggaatgggctctgctggatccttctcagaaaatcctgtaccgggacgtgatgagagagacataccggaatctgacctccgtgggcatcaactgggaatgttgggaccttgaagcctgcttcagaagcctgggaagaaacctgagagtgcaggtggtgaagagaaagtgcgagctgaccaacagcggcccctgcgccgagggcggcccaagcagcggcgcccctcctcccagcggcggcagcccagccggctccccaacctctaccgaggagggcacctctgagtccgccacccccgagagcggccctggcacctccaccgagcccagcgagggcagcgcacccggcagccctgccggcagccccacctccacagaggagggaaccagcaccgagcccagcgaaggcagcgccccaggcaccagcaccgagcctagtgagcaggagattaaacggatcaacaagatcagaagaagacttgtgaaagacagcaacaccaagaaggccggcaagacaggccccatgaaaaccctgctggttagagtgatgacacccgatctgagagagcggctggaaaacctgagaaagaagcctgaaaatatcccccagcccatcagcaatacatctagagccaacctgaataagctgctgaccgattacaccgaaatgaagaaggcgatcctgcatgtgtactgggaagagttccagaaggaccctgtgggcctgatgagccgggtggcccagcctgccagcaagaagatcgatcagaacaagctgaaacctgagatggacgagaagggcaacctgaccaccgccggctttgcctgctctcagtgtggccagcccctgttcgtgtacaagctggagcaggtgtctgagaagggcaaggcttacaccaactacttcggacggtgcaatgtggccgagcacgaaaagctgatcctgctggcccagctgaagcccgagaaggatagcgacgaagccgtgacatatagcctgggaaagtttgggcagagggccctggatttctacagcattcatgtgaccaaggagtccacccaccccgtgaagcccctggcccagatcgccggaaacagatacgcctccggacctgtgggaaaggccctgagcgacgcatgtatgggcacaatcgcctccttcctgtctaagtaccaggacatcatcatcgaacaccagaaggtggtgaagggcaaccagaagagactggagagcctgcgggagctggccggcaaggaaaacctggaataccctagcgtgaccctgccacctcagcctcacaccaaggagggcgttgatgcctacaacgaagtgatcgcccgggtgcgaatgtgggtgaacctgaacctgtggcagaagctgaagctaagcagagatgatgccaagcctctgctgagactgaagggattcccttcctttcctctggtcgagagacaggccaacgaagtggactggtgggacatggtgtgtaacgtgaagaagctgatcaacgagaaaaaggaggatggcaaggtgttttggcagaatctggctggctacaagagacaggaagccctgagaccatacctgagcagcgaggaagatcggaagaagggaaagaaattcgctcggtaccagctgggcgacctgctgctgcacctggaaaagaagcacggcgaggactggggaaaggtgtacgacgaggcctgggagcggattgacaagaaagtggaaggcctgagcaagcacatcaagctggaagaggaacggagaagcgaggacgcccagagcaaggccgccctgaccgactggctgcgggctaaggccagcttcgtgatcgagggcctgaaggaggccgacaaggacgagttctgcagatgcgagctgaagctgcagaagtggtacggggacctgcggggaaagcccttcgccatcgaagccgagaacagcatcctggacatcagcggcttcagcaagcagtacaactgtgccttcatctggcagaaggacggcgtgaagaagctgaacctgtacctgatcatcaactacttcaagggcggcaagctgcggttcaagaagatcaaacctgaagccttcgaagccaacagattctacaccgtgatcaacaaaaagagcggcgagatcgtgcccatggaggtgaacttcaacttcgacgaccccaacctgatcatcctgcctctggcctttggcaagagacagggcagagaattcatctggaacgacctgctgtccctggaaaccggcagcctgaagctggccaacggaagagtgatcgagaagacactgtacaacagaagaacccggcaggatgagcctgccctgttcgtggccctgaccttcgagcggcgggaggtcctggactcctccaatatcaaaccaatgaacctgatcggcgtggcaagaggcgaaaacatccccgccgtgatcgccctgaccgaccccgagggctgcccactgagccggtttaaggatagcctgggaaacccaacccacatcctgagaatcggcgagagctataaggagaagcagcggaccatccaggccaagaaggaggtggagcagcggagagccggcggctacagccggaagtacgccagcaaagccaagaatctggcagacgatatggtgagaaacaccgctagagatctgctgtactacgccgtgacccaggatgccatgctgatcttcgccaacctgagccggggcttcggccggcagggcaagcggaccttcatggccgagagacagtacacacggatggaggactggctgaccgccaagctggcctacgagggcctgagcaagacctacctgtccaagacactggcccagtacacctccaagacatgcagcaactgtgggtttaccatcaccagcgccgactacgacagggtgctggagaagctgaagaagacagcaacaggctggatgaccacaattaacggcaaggagctgaaggtggagggccagattacctactacaacagatacaagagacagaacgtagtcaaggacctgtccgtcgagctggatagactgagcgaagaatctgtgaacaacgacatctcctcctggacaaagggcagaagcggagaagctctgagcctcctgaagaaaagattctcccatagacccgtgcaggagaagttcgtgtgcctgaactgcggcttcgagacacacgcagccgagcaagccgccctgaacatcgccagatcctggctgttcctgcggagccaggagtacaagaaataccagacaaacaagacaaccggcaacaccgataagagagccttcgtcgagacctggcagtccttttaccggaagaagcttaaggaggtgtggaaacctgccgtgcggtctggcggatctggcggaggctccacccaggagcacgtgaccttcagggacgtggccgtgttcttcagccaggacgagtggctgcacctggacagcgcccagagggccctgtacagggaggtgatgctggagaactacagcagcctggtgagcctgggcatccccttcagcatgcccaagctgatccaccagctgcagcagggcgaggacccctgcatggtggagagggaggtgagcgccgacacctgcctgggcttcaagacctggggcggcccaagcagcggcgcccctcctcccagcggcggcagcccagccggctccccaacctctaccgaggagggcacctctgagtccgccacccccgagagcggccctggcacctccaccgagcccagcgagggcagcgcacccggcagccctgccggcagccccacctccacagaggagggaaccagcaccgagcccagcgaaggcagcgccccaggcaccagcaccgagcctagtgagcaggagattaaacggatcaacaagatcagaagaagacttgtgaaagacagcaacaccaagaaggccggcaagacaggccccatgaaaaccctgctggttagagtgatgacacccgatctgagagagcggctggaaaacctgagaaagaagcctgaaaatatcccccagcccatcagcaatacatctagagccaacctgaataagctgctgaccgattacaccgaaatgaagaaggcgatcctgcatgtgtactgggaagagttccagaaggaccctgtgggcctgatgagccgggtggcccagcctgccagcaagaagatcgatcagaacaagctgaaacctgagatggacgagaagggcaacctgaccaccgccggctttgcctgctctcagtgtggccagcccctgttcgtgtacaagctggagcaggtgtctgagaagggcaaggcttacaccaactacttcggacggtgcaatgtggccgagcacgaaaagctgatcctgctggcccagctgaagcccgagaaggatagcgacgaagccgtgacatatagcctgggaaagtttgggcagagggccctggatttctacagcattcatgtgaccaaggagtccacccaccccgtgaagcccctggcccagatcgccggaaacagatacgcctccggacctgtgggaaaggccctgagcgacgcatgtatgggcacaatcgcctccttcctgtctaagtaccaggacatcatcatcgaacaccagaaggtggtgaagggcaaccagaagagactggagagcctgcgggagctggccggcaaggaaaacctggaataccctagcgtgaccctgccacctcagcctcacaccaaggagggcgttgatgcctacaacgaagtgatcgcccgggtgcgaatgtgggtgaacctgaacctgtggcagaagctgaagctaagcagagatgatgccaagcctctgctgagactgaagggattcccttcctttcctctggtcgagagacaggccaacgaagtggactggtgggacatggtgtgtaacgtgaagaagctgatcaacgagaaaaaggaggatggcaaggtgttttggcagaatctggctggctacaagagacaggaagccctgagaccatacctgagcagcgaggaagatcggaagaagggaaagaaattcgctcggtaccagctgggcgacctgctgctgcacctggaaaagaagcacggcgaggactggggaaaggtgtacgacgaggcctgggagcggattgacaagaaagtggaaggcctgagcaagcacatcaagctggaagaggaacggagaagcgaggacgcccagagcaaggccgccctgaccgactggctgcgggctaaggccagcttcgtgatcgagggcctgaaggaggccgacaaggacgagttctgcagatgcgagctgaagctgcagaagtggtacggggacctgcggggaaagcccttcgccatcgaagccgagaacagcatcctggacatcagcggcttcagcaagcagtacaactgtgccttcatctggcagaaggacggcgtgaagaagctgaacctgtacctgatcatcaactacttcaagggcggcaagctgcggttcaagaagatcaaacctgaagccttcgaagccaacagattctacaccgtgatcaacaaaaagagcggcgagatcgtgcccatggaggtgaacttcaacttcgacgaccccaacctgatcatcctgcctctggcctttggcaagagacagggcagagaattcatctggaacgacctgctgtccctggaaaccggcagcctgaagctggccaacggaagagtgatcgagaagacactgtacaacagaagaacccggcaggatgagcctgccctgttcgtggccctgaccttcgagcggcgggaggtcctggactcctccaatatcaaaccaatgaacctgatcggcgtggcaagaggcgaaaacatccccgccgtgatcgccctgaccgaccccgagggctgcccactgagccggtttaaggatagcctgggaaacccaacccacatcctgagaatcggcgagagctataaggagaagcagcggaccatccaggccaagaaggaggtggagcagcggagagccggcggctacagccggaagtacgccagcaaagccaagaatctggcagacgatatggtgagaaacaccgctagagatctgctgtactacgccgtgacccaggatgccatgctgatcttcgccaacctgagccggggcttcggccggcagggcaagcggaccttcatggccgagagacagtacacacggatggaggactggctgaccgccaagctggcctacgagggcctgagcaagacctacctgtccaagacactggcccagtacacctccaagacatgcagcaactgtgggtttaccatcaccagcgccgactacgacagggtgctggagaagctgaagaagacagcaacaggctggatgaccacaattaacggcaaggagctgaaggtggagggccagattacctactacaacagatacaagagacagaacgtagtcaaggacctgtccgtcgagctggatagactgagcgaagaatctgtgaacaacgacatctcctcctggacaaagggcagaagcggagaagctctgagcctcctgaagaaaagattctcccatagacccgtgcaggagaagttcgtgtgcctgaactgcggcttcgagacacacgcagccgagcaagccgccctgaacatcgccagatcctggctgttcctgcggagccaggagtacaagaaataccagacaaacaagacaaccggcaacaccgataagagagccttcgtcgagacctggcagtccttttaccggaagaagcttaaggaggtgtggaaacctgccgtgcggtctggcggatctggcggaggctcctacccaggagcacgtgaccttcagggacgtggccgtgttcttcagccaggacgagtggctgcacctggacagcgcccagagggccctgtacagggaggtgatgctggagaactacagcagcctggtgagcctgggcatccccttcagcatgcccaagctgatccaccagctgcagcagggcgaggacccctgcatggtggagagggaggtgagcgccgacacctgcctgggcttcaagacctggggatctggctccggcagcggccccaagaaaaagagaaaagtctaagctgccttctgcggggcttgccttctggccatgcccttcttctctcccttgcacctgtacctcttggtctttgaataaagcctgagtaggaaggctagcaaaaaaaaaaaaaaaaaaaaaaaaaaaaaaaaaaaaaaaaaaaaaaaaaaaaaaaaaaaaaaaaaaaaaaaaaaaaaaaa

SEQ ID NO: 15771 - RNA, 9485 nt, synthetic construct
  source 1..9485: mol_type = other RNA
aggaaataagagagaaaagaagagtaagaagaaatataagagccaccatggcccctaagaagaagcgtaaagtgagccggatggaacgcctcgtctacgaggtgcggcagaagtgcagaaacatcgaggacatctgcatctcctgcggatctctgaacgtgaccctggagcacccactgttcatcggcggcatgtgccagaactgtaaaaactgttttctggagtgtgcctatcaatacgacgatgacggctaccagagctactgcaccatctgttgcggcggaagagaggtgctgatgtgtggaaataacaactgctgccggtgcttctgcgtggaatgcgtggacctgctggtgggccccggcgccgcccaggccgctattaaggaagatccttggaactgctacatgtgcggccacaagggcacatacggcctgctgagacggagagaggactggcctagcagactgcagatgttcttcgccaataaccacgaccaggagttcgacccccctaaggtgtaccctcccgtccccgccgagaagagaaagcccatccgggtcctgagcctgttcgatggcatcgccaccggtctgctggtgctgaaggacctgggcatccaggtggataggtacattgcctccgaggtgtgcgaggactccatcaccgtgggaatggtgcgtcatcagggcaagatcatgtacgtgggcgacgtgcggagcgtgacacagaagcatatccaggagtggggccctttcgacctggtgatcggcggcagcccttgcaatgacctgagcatcgtgaacccagcccggaagggcctgtacgagggaaccggcagactgttcttcgagttttacagactgctgcacgacgcccggcctaaggaaggcgacgaccggcccttcttttggctgttcgagaatgtggtggccatgggagtcagcgacaagcgggatattagccggttcctggagagcaaccccgtgatgatcgatgccaaggaagtgagcgccgcccaccgggccagatacttctggggcaatctgcctggcatgaacagacccctggccagcaccgtgaacgacaagctggagctgcaggagtgcctggagcacggccggatcgccaagttcagcaaggtgagaaccatcaccacccgaagcaacagcatcaaacaaggcaaggaccagcactttcctgtgttcatgaacgagaaggaggacatcctgtggtgtaccgagatggagagagtgttcgggttcccagtccactacacagatgtcagcaacatgtctagactggccagacagagactgctgggaagaagctggtccgtccctgtgatcagacacctgttcgcccctctgaaggagtacttcgcctgcgtgagcagcggcaacagcaacgccaacagccggggccccagcttctctagcggcctggtgccactgtccctgagagggagccacatgggccccatggagatctacaaaaccgtgagcgcctggaagcggcagcctgtgcgcgtgctgagcctgtttcggaatatcgataaagtcctgaaaagcctgggattcctggagagcggctctggctccggcggtggcaccctgaagtacgtggaggatgtgacaaacgtggtcagacgggatgtggagaagtggggccccttcgatctggtgtacggcagcacccaacccctgggcagctcttgtgaccggtgccctggctggtacatgtttcagttccaccggatcctgcagtacgccctgccgagacaggagtcccagcggccattcttttggattttcatggacaacttgctgctgaccgaggatgaccaggaaactaccactcggttcctgcagaccgaagccgtgaccctgcaggacgtgagaggccgggactaccagaacgccatgcgggtgtggtccaacatccctggactgaaaagcaagcacgcacctctgacccctaaagaagaggagtacctgcaggcccaggtgcggagcagaagcaagctggacgcccctaaggtggatctgctggtgaagaattgcctcctgcccctgagagagtacttcaagtatttcagccagaatagtctgcccctgggaggcagcggcggcggcgccctggtgacatttgaggacgtcgccgtgcggttcacccaggaggaatgggctctgctggatccttctcagaaaatcctgtaccgggacgtgatgagagagacataccggaatctgacctccgtgggcatcaactgggaatgttgggaccttgaagcctgcttcagaagcctgggaagaaacctgagagtgcaggtggtgaagagaaagtgcgagctgaccaacagcggcccctgcgccgagggcggcccaagcagcggcgcccctcctcccagcggcggcagcccagccggctccccaacctctaccgaggagggcacctctgagtccgccacccccgagagcggccctggcacctccaccgagcccagcgagggcagcgcacccggcagccctgccggcagccccacctccacagaggagggaaccagcaccgagcccagcgaaggcagcgccccaggcaccagcaccgagcctagtgagcaggagattaaacggatcaacaagatcagaagaagacttgtgaaagacagcaacaccaagaaggccggcaagacaggccccatgaaaaccctgctggttagagtgatgacacccgatctgagagagcggctggaaaacctgagaaagaagcctgaaaatatcccccagcccatcagcaatacatctagagccaacctgaataagctgctgaccgattacaccgaaatgaagaaggcgatcctgcatgtgtactgggaagagttccagaaggaccctgtgggcctgatgagccgggtggcccagcctgccagcaagaagatcgatcagaacaagctgaaacctgagatggacgagaagggcaacctgaccaccgccggctttgcctgctctcagtgtggccagcccctgttcgtgtacaagctggagcaggtgtctgagaagggcaaggcttacaccaactacttcggacggtgcaatgtggccgagcacgaaaagctgatcctgctggcccagctgaagcccgagaaggatagcgacgaagccgtgacatatagcctgggaaagtttgggcagagggccctggatttctacagcattcatgtgaccaaggagtccacccaccccgtgaagcccctggcccagatcgccggaaacagatacgcctccggacctgtgggaaaggccctgagcgacgcatgtatgggcacaatcgcctccttcctgtctaagtaccaggacatcatcatcgaacaccagaaggtggtgaagggcaaccagaagagactggagagcctgcgggagctggccggcaaggaaaacctggaataccctagcgtgaccctgccacctcagcctcacaccaaggagggcgttgatgcctacaacgaagtgatcgcccgggtgcgaatgtgggtgaacctgaacctgtggcagaagctgaagctaagcagagatgatgccaagcctctgctgagactgaagggattcccttcctttcctctggtcgagagacaggccaacgaagtggactggtgggacatggtgtgtaacgtgaagaagctgatcaacgagaaaaaggaggatggcaaggtgttttggcagaatctggctggctacaagagacaggaagccctgagaccatacctgagcagcgaggaagatcggaagaagggaaagaaattcgctcggtaccagctgggcgacctgctgctgcacctggaaaagaagcacggcgaggactggggaaaggtgtacgacgaggcctgggagcggattgacaagaaagtggaaggcctgagcaagcacatcaagctggaagaggaacggagaagcgaggacgcccagagcaaggccgccctgaccgactggctgcgggctaaggccagcttcgtgatcgagggcctgaaggaggccgacaaggacgagttctgcagatgcgagctgaagctgcagaagtggtacggggacctgcggggaaagcccttcgccatcgaagccgagaacagcatcctggacatcagcggcttcagcaagcagtacaactgtgccttcatctggcagaaggacggcgtgaagaagctgaacctgtacctgatcatcaactacttcaagggcggcaagctgcggttcaagaagatcaaacctgaagccttcgaagccaacagattctacaccgtgatcaacaaaaagagcggcgagatcgtgcccatggaggtgaacttcaacttcgacgaccccaacctgatcatcctgcctctggcctttggcaagagacagggcagagaattcatctggaacgacctgctgtccctggaaaccggcagcctgaagctggccaacggaagagtgatcgagaagacactgtacaacagaagaacccggcaggatgagcctgccctgttcgtggccctgaccttcgagcggcgggaggtcctggactcctccaatatcaaaccaatgaacctgatcggcgtggcaagaggcgaaaacatccccgccgtgatcgccctgaccgaccccgagggctgcccactgagccggtttaaggatagcctgggaaacccaacccacatcctgagaatcggcgagagctataaggagaagcagcggaccatccaggccaagaaggaggtggagcagcggagagccggcggctacagccggaagtacgccagcaaagccaagaatctggcagacgatatggtgagaaacaccgctagagatctgctgtactacgccgtgacccaggatgccatgctgatcttcgccaacctgagccggggcttcggccggcagggcaagcggaccttcatggccgagagacagtacacacggatggaggactggctgaccgccaagctggcctacgagggcctgagcaagacctacctgtccaagacactggcccagtacacctccaagacatgcagcaactgtgggtttaccatcaccagcgccgactacgacagggtgctggagaagctgaagaagacagcaacaggctggatgaccacaattaacggcaaggagctgaaggtggagggccagattacctactacaacagatacaagagacagaacgtagtcaaggacctgtccgtcgagctggatagactgagcgaagaatctgtgaacaacgacatctcctcctggacaaagggcagaagcggagaagctctgagcctcctgaagaaaagattctcccatagacccgtgcaggagaagttcgtgtgcctgaactgcggcttcgagacacacgcagccgagcaagccgccctgaacatcgccagatcctggctgttcctgcggagccaggagtacaagaaataccagacaaacaagacaaccggcaacaccgataagagagccttcgtcgagacctggcagtccttttaccggaagaagcttaaggaggtgtggaaacctgccgtgcggtctggcggatctggcggaggctcccaggccgaggtgaccttcgaggacgtggccgtgctgttcagcagggaggagtggggcaggctgggccccgcccagaggggcctgtacagggacgtgatgctggagacctacaggaacctggtgagcctgggcgccggccccgccggccccaagcccggcgtgatcacccagctggagcagggcgacgagccctgggtgctggacgcccagggcgccaagggcaaggagaggctgagggtgagcggcggcccaagcagcggcgcccctcctcccagcggcggcagcccagccggctccccaacctctaccgaggagggcacctctgagtccgccacccccgagagcggccctggcacctccaccgagcccagcgagggcagcgcacccggcagccctgccggcagccccacctccacagaggagggaaccagcaccgagcccagcgaaggcagcgccccaggcaccagcaccgagcctagtgagcaggagattaaacggatcaacaagatcagaagaagacttgtgaaagacagcaacaccaagaaggccggcaagacaggccccatgaaaaccctgctggttagagtgatgacacccgatctgagagagcggctggaaaacctgagaaagaagcctgaaaatatcccccagcccatcagcaatacatctagagccaacctgaataagctgctgaccgattacaccgaaatgaagaaggcgatcctgcatgtgtactgggaagagttccagaaggaccctgtgggcctgatgagccgggtggcccagcctgccagcaagaagatcgatcagaacaagctgaaacctgagatggacgagaagggcaacctgaccaccgccggctttgcctgctctcagtgtggccagcccctgttcgtgtacaagctggagcaggtgtctgagaagggcaaggcttacaccaactacttcggacggtgcaatgtggccgagcacgaaaagctgatcctgctggcccagctgaagcccgagaaggatagcgacgaagccgtgacatatagcctgggaaagtttgggcagagggccctggatttctacagcattcatgtgaccaaggagtccacccaccccgtgaagcccctggcccagatcgccggaaacagatacgcctccggacctgtgggaaaggccctgagcgacgcatgtatgggcacaatcgcctccttcctgtctaagtaccaggacatcatcatcgaacaccagaaggtggtgaagggcaaccagaagagactggagagcctgcgggagctggccggcaaggaaaacctggaataccctagcgtgaccctgccacctcagcctcacaccaaggagggcgttgatgcctacaacgaagtgatcgcccgggtgcgaatgtgggtgaacctgaacctgtggcagaagctgaagctaagcagagatgatgccaagcctctgctgagactgaagggattcccttcctttcctctggtcgagagacaggccaacgaagtggactggtgggacatggtgtgtaacgtgaagaagctgatcaacgagaaaaaggaggatggcaaggtgttttggcagaatctggctggctacaagagacaggaagccctgagaccatacctgagcagcgaggaagatcggaagaagggaaagaaattcgctcggtaccagctgggcgacctgctgctgcacctggaaaagaagcacggcgaggactggggaaaggtgtacgacgaggcctgggagcggattgacaagaaagtggaaggcctgagcaagcacatcaagctggaagaggaacggagaagcgaggacgcccagagcaaggccgccctgaccgactggctgcgggctaaggccagcttcgtgatcgagggcctgaaggaggccgacaaggacgagttctgcagatgcgagctgaagctgcagaagtggtacggggacctgcggggaaagcccttcgccatcgaagccgagaacagcatcctggacatcagcggcttcagcaagcagtacaactgtgccttcatctggcagaaggacggcgtgaagaagctgaacctgtacctgatcatcaactacttcaagggcggcaagctgcggttcaagaagatcaaacctgaagccttcgaagccaacagattctacaccgtgatcaacaaaaagagcggcgagatcgtgcccatggaggtgaacttcaacttcgacgaccccaacctgatcatcctgcctctggcctttggcaagagacagggcagagaattcatctggaacgacctgctgtccctggaaaccggcagcctgaagctggccaacggaagagtgatcgagaagacactgtacaacagaagaacccggcaggatgagcctgccctgttcgtggccctgaccttcgagcggcgggaggtcctggactcctccaatatcaaaccaatgaacctgatcggcgtggcaagaggcgaaaacatccccgccgtgatcgccctgaccgaccccgagggctgcccactgagccggtttaaggatagcctgggaaacccaacccacatcctgagaatcggcgagagctataaggagaagcagcggaccatccaggccaagaaggaggtggagcagcggagagccggcggctacagccggaagtacgccagcaaagccaagaatctggcagacgatatggtgagaaacaccgctagagatctgctgtactacgccgtgacccaggatgccatgctgatcttcgccaacctgagccggggcttcggccggcagggcaagcggaccttcatggccgagagacagtacacacggatggaggactggctgaccgccaagctggcctacgagggcctgagcaagacctacctgtccaagacactggcccagtacacctccaagacatgcagcaactgtgggtttaccatcaccagcgccgactacgacagggtgctggagaagctgaagaagacagcaacaggctggatgaccacaattaacggcaaggagctgaaggtggagggccagattacctactacaacagatacaagagacagaacgtagtcaaggacctgtccgtcgagctggatagactgagcgaagaatctgtgaacaacgacatctcctcctggacaaagggcagaagcggagaagctctgagcctcctgaagaaaagattctcccatagacccgtgcaggagaagttcgtgtgcctgaactgcggcttcgagacacacgcagccgagcaagccgccctgaacatcgccagatcctggctgttcctgcggagccaggagtacaagaaataccagacaaacaagacaaccggcaacaccgataagagagccttcgtcgagacctggcagtccttttaccggaagaagcttaaggaggtgtggaaacctgccgtgcggtctggcggatctggcggaggctcctcaggccgaggtgaccttcgaggacgtggccgtgctgttcagcagggaggagtggggcaggctgggccccgcccagaggggcctgtacagggacgtgatgctggagacctacaggaacctggtgagcctgggcgccggccccgccggccccaagcccggcgtgatcacccagctggagcagggcgacgagccctgggtgctggacgcccagggcgccaagggcaaggagaggctgagggtgagcggatctggctccggcagcggccccaagaaaaagagaaaagtctaagctgccttctgcggggcttgccttctggccatgcccttcttctctcccttgcacctgtacctcttggtctttgaataaagcctgagtaggaaggctagcaaaaaaaaaaaaaaaaaaaaaaaaaaaaaaaaaaaaaaaaaaaaaaaaaaaaaaaaaaaaaaaaaaaaaaaaaaaaaaaa

SEQ ID NO: 15772 - RNA, 9485 nt, synthetic construct
  source 1..9485: mol_type = other RNA
aggaaataagagagaaaagaagagtaagaagaaatataagagccaccatggcccctaagaagaagcgtaaagtgagccggatggaacgcctcgtctacgaggtgcggcagaagtgcagaaacatcgaggacatctgcatctcctgcggatctctgaacgtgaccctggagcacccactgttcatcggcggcatgtgccagaactgtaaaaactgttttctggagtgtgcctatcaatacgacgatgacggctaccagagctactgcaccatctgttgcggcggaagagaggtgctgatgtgtggaaataacaactgctgccggtgcttctgcgtggaatgcgtggacctgctggtgggccccggcgccgcccaggccgctattaaggaagatccttggaactgctacatgtgcggccacaagggcacatacggcctgctgagacggagagaggactggcctagcagactgcagatgttcttcgccaataaccacgaccaggagttcgacccccctaaggtgtaccctcccgtccccgccgagaagagaaagcccatccgggtcctgagcctgttcgatggcatcgccaccggtctgctggtgctgaaggacctgggcatccaggtggataggtacattgcctccgaggtgtgcgaggactccatcaccgtgggaatggtgcgtcatcagggcaagatcatgtacgtgggcgacgtgcggagcgtgacacagaagcatatccaggagtggggccctttcgacctggtgatcggcggcagcccttgcaatgacctgagcatcgtgaacccagcccggaagggcctgtacgagggaaccggcagactgttcttcgagttttacagactgctgcacgacgcccggcctaaggaaggcgacgaccggcccttcttttggctgttcgagaatgtggtggccatgggagtcagcgacaagcgggatattagccggttcctggagagcaaccccgtgatgatcgatgccaaggaagtgagcgccgcccaccgggccagatacttctggggcaatctgcctggcatgaacagacccctggccagcaccgtgaacgacaagctggagctgcaggagtgcctggagcacggccggatcgccaagttcagcaaggtgagaaccatcaccacccgaagcaacagcatcaaacaaggcaaggaccagcactttcctgtgttcatgaacgagaaggaggacatcctgtggtgtaccgagatggagagagtgttcgggttcccagtccactacacagatgtcagcaacatgtctagactggccagacagagactgctgggaagaagctggtccgtccctgtgatcagacacctgttcgcccctctgaaggagtacttcgcctgcgtgagcagcggcaacagcaacgccaacagccggggccccagcttctctagcggcctggtgccactgtccctgagagggagccacatgggccccatggagatctacaaaaccgtgagcgcctggaagcggcagcctgtgcgcgtgctgagcctgtttcggaatatcgataaagtcctgaaaagcctgggattcctggagagcggctctggctccggcggtggcaccctgaagtacgtggaggatgtgacaaacgtggtcagacgggatgtggagaagtggggccccttcgatctggtgtacggcagcacccaacccctgggcagctcttgtgaccggtgccctggctggtacatgtttcagttccaccggatcctgcagtacgccctgccgagacaggagtcccagcggccattcttttggattttcatggacaacttgctgctgaccgaggatgaccaggaaactaccactcggttcctgcagaccgaagccgtgaccctgcaggacgtgagaggccgggactaccagaacgccatgcgggtgtggtccaacatccctggactgaaaagcaagcacgcacctctgacccctaaagaagaggagtacctgcaggcccaggtgcggagcagaagcaagctggacgcccctaaggtggatctgctggtgaagaattgcctcctgcccctgagagagtacttcaagtatttcagccagaatagtctgcccctgggaggcagcggcggcggcgccctggtgacatttgaggacgtcgccgtgcggttcacccaggaggaatgggctctgctggatccttctcagaaaatcctgtaccgggacgtgatgagagagacataccggaatctgacctccgtgggcatcaactgggaatgttgggaccttgaagcctgcttcagaagcctgggaagaaacctgagagtgcaggtggtgaagagaaagtgcgagctgaccaacagcggcccctgcgccgagggcggcccaagcagcggcgcccctcctcccagcggcggcagcccagccggctccccaacctctaccgaggagggcacctctgagtccgccacccccgagagcggccctggcacctccaccgagcccagcgagggcagcgcacccggcagccctgccggcagccccacctccacagaggagggaaccagcaccgagcccagcgaaggcagcgccccaggcaccagcaccgagcctagtgagcaggagattaaacggatcaacaagatcagaagaagacttgtgaaagacagcaacaccaagaaggccggcaagacaggccccatgaaaaccctgctggttagagtgatgacacccgatctgagagagcggctggaaaacctgagaaagaagcctgaaaatatcccccagcccatcagcaatacatctagagccaacctgaataagctgctgaccgattacaccgaaatgaagaaggcgatcctgcatgtgtactgggaagagttccagaaggaccctgtgggcctgatgagccgggtggcccagcctgccagcaagaagatcgatcagaacaagctgaaacctgagatggacgagaagggcaacctgaccaccgccggctttgcctgctctcagtgtggccagcccctgttcgtgtacaagctggagcaggtgtctgagaagggcaaggcttacaccaactacttcggacggtgcaatgtggccgagcacgaaaagctgatcctgctggcccagctgaagcccgagaaggatagcgacgaagccgtgacatatagcctgggaaagtttgggcagagggccctggatttctacagcattcatgtgaccaaggagtccacccaccccgtgaagcccctggcccagatcgccggaaacagatacgcctccggacctgtgggaaaggccctgagcgacgcatgtatgggcacaatcgcctccttcctgtctaagtaccaggacatcatcatcgaacaccagaaggtggtgaagggcaaccagaagagactggagagcctgcgggagctggccggcaaggaaaacctggaataccctagcgtgaccctgccacctcagcctcacaccaaggagggcgttgatgcctacaacgaagtgatcgcccgggtgcgaatgtgggtgaacctgaacctgtggcagaagctgaagctaagcagagatgatgccaagcctctgctgagactgaagggattcccttcctttcctctggtcgagagacaggccaacgaagtggactggtgggacatggtgtgtaacgtgaagaagctgatcaacgagaaaaaggaggatggcaaggtgttttggcagaatctggctggctacaagagacaggaagccctgagaccatacctgagcagcgaggaagatcggaagaagggaaagaaattcgctcggtaccagctgggcgacctgctgctgcacctggaaaagaagcacggcgaggactggggaaaggtgtacgacgaggcctgggagcggattgacaagaaagtggaaggcctgagcaagcacatcaagctggaagaggaacggagaagcgaggacgcccagagcaaggccgccctgaccgactggctgcgggctaaggccagcttcgtgatcgagggcctgaaggaggccgacaaggacgagttctgcagatgcgagctgaagctgcagaagtggtacggggacctgcggggaaagcccttcgccatcgaagccgagaacagcatcctggacatcagcggcttcagcaagcagtacaactgtgccttcatctggcagaaggacggcgtgaagaagctgaacctgtacctgatcatcaactacttcaagggcggcaagctgcggttcaagaagatcaaacctgaagccttcgaagccaacagattctacaccgtgatcaacaaaaagagcggcgagatcgtgcccatggaggtgaacttcaacttcgacgaccccaacctgatcatcctgcctctggcctttggcaagagacagggcagagaattcatctggaacgacctgctgtccctggaaaccggcagcctgaagctggccaacggaagagtgatcgagaagacactgtacaacagaagaacccggcaggatgagcctgccctgttcgtggccctgaccttcgagcggcgggaggtcctggactcctccaatatcaaaccaatgaacctgatcggcgtggcaagaggcgaaaacatccccgccgtgatcgccctgaccgaccccgagggctgcccactgagccggtttaaggatagcctgggaaacccaacccacatcctgagaatcggcgagagctataaggagaagcagcggaccatccaggccaagaaggaggtggagcagcggagagccggcggctacagccggaagtacgccagcaaagccaagaatctggcagacgatatggtgagaaacaccgctagagatctgctgtactacgccgtgacccaggatgccatgctgatcttcgccaacctgagccggggcttcggccggcagggcaagcggaccttcatggccgagagacagtacacacggatggaggactggctgaccgccaagctggcctacgagggcctgagcaagacctacctgtccaagacactggcccagtacacctccaagacatgcagcaactgtgggtttaccatcaccagcgccgactacgacagggtgctggagaagctgaagaagacagcaacaggctggatgaccacaattaacggcaaggagctgaaggtggagggccagattacctactacaacagatacaagagacagaacgtagtcaaggacctgtccgtcgagctggatagactgagcgaagaatctgtgaacaacgacatctcctcctggacaaagggcagaagcggagaagctctgagcctcctgaagaaaagattctcccatagacccgtgcaggagaagttcgtgtgcctgaactgcggcttcgagacacacgcagccgagcaagccgccctgaacatcgccagatcctggctgttcctgcggagccaggagtacaagaaataccagacaaacaagacaaccggcaacaccgataagagagccttcgtcgagacctggcagtccttttaccggaagaagcttaaggaggtgtggaaacctgccgtgcggtctggcggatctggcggaggctccgagccctgggccatcaccttcgccgacgtggccgtgtacttcagccccgaggagtggggctgcctgcagcccacccagagggccctgtacagggacgtgatgagggacacctacgtgctgctgagcgccctgggcggcggcggcggcgccaagcccgccctgatcagctgggtggagagggagagcgagctgtgggacagcgacgcccaggaccccgaggtgcccaagtggcccaccgaggccggcggcccaagcagcggcgcccctcctcccagcggcggcagcccagccggctccccaacctctaccgaggagggcacctctgagtccgccacccccgagagcggccctggcacctccaccgagcccagcgagggcagcgcacccggcagccctgccggcagccccacctccacagaggagggaaccagcaccgagcccagcgaaggcagcgccccaggcaccagcaccgagcctagtgagcaggagattaaacggatcaacaagatcagaagaagacttgtgaaagacagcaacaccaagaaggccggcaagacaggccccatgaaaaccctgctggttagagtgatgacacccgatctgagagagcggctggaaaacctgagaaagaagcctgaaaatatcccccagcccatcagcaatacatctagagccaacctgaataagctgctgaccgattacaccgaaatgaagaaggcgatcctgcatgtgtactgggaagagttccagaaggaccctgtgggcctgatgagccgggtggcccagcctgccagcaagaagatcgatcagaacaagctgaaacctgagatggacgagaagggcaacctgaccaccgccggctttgcctgctctcagtgtggccagcccctgttcgtgtacaagctggagcaggtgtctgagaagggcaaggcttacaccaactacttcggacggtgcaatgtggccgagcacgaaaagctgatcctgctggcccagctgaagcccgagaaggatagcgacgaagccgtgacatatagcctgggaaagtttgggcagagggccctggatttctacagcattcatgtgaccaaggagtccacccaccccgtgaagcccctggcccagatcgccggaaacagatacgcctccggacctgtgggaaaggccctgagcgacgcatgtatgggcacaatcgcctccttcctgtctaagtaccaggacatcatcatcgaacaccagaaggtggtgaagggcaaccagaagagactggagagcctgcgggagctggccggcaaggaaaacctggaataccctagcgtgaccctgccacctcagcctcacaccaaggagggcgttgatgcctacaacgaagtgatcgcccgggtgcgaatgtgggtgaacctgaacctgtggcagaagctgaagctaagcagagatgatgccaagcctctgctgagactgaagggattcccttcctttcctctggtcgagagacaggccaacgaagtggactggtgggacatggtgtgtaacgtgaagaagctgatcaacgagaaaaaggaggatggcaaggtgttttggcagaatctggctggctacaagagacaggaagccctgagaccatacctgagcagcgaggaagatcggaagaagggaaagaaattcgctcggtaccagctgggcgacctgctgctgcacctggaaaagaagcacggcgaggactggggaaaggtgtacgacgaggcctgggagcggattgacaagaaagtggaaggcctgagcaagcacatcaagctggaagaggaacggagaagcgaggacgcccagagcaaggccgccctgaccgactggctgcgggctaaggccagcttcgtgatcgagggcctgaaggaggccgacaaggacgagttctgcagatgcgagctgaagctgcagaagtggtacggggacctgcggggaaagcccttcgccatcgaagccgagaacagcatcctggacatcagcggcttcagcaagcagtacaactgtgccttcatctggcagaaggacggcgtgaagaagctgaacctgtacctgatcatcaactacttcaagggcggcaagctgcggttcaagaagatcaaacctgaagccttcgaagccaacagattctacaccgtgatcaacaaaaagagcggcgagatcgtgcccatggaggtgaacttcaacttcgacgaccccaacctgatcatcctgcctctggcctttggcaagagacagggcagagaattcatctggaacgacctgctgtccctggaaaccggcagcctgaagctggccaacggaagagtgatcgagaagacactgtacaacagaagaacccggcaggatgagcctgccctgttcgtggccctgaccttcgagcggcgggaggtcctggactcctccaatatcaaaccaatgaacctgatcggcgtggcaagaggcgaaaacatccccgccgtgatcgccctgaccgaccccgagggctgcccactgagccggtttaaggatagcctgggaaacccaacccacatcctgagaatcggcgagagctataaggagaagcagcggaccatccaggccaagaaggaggtggagcagcggagagccggcggctacagccggaagtacgccagcaaagccaagaatctggcagacgatatggtgagaaacaccgctagagatctgctgtactacgccgtgacccaggatgccatgctgatcttcgccaacctgagccggggcttcggccggcagggcaagcggaccttcatggccgagagacagtacacacggatggaggactggctgaccgccaagctggcctacgagggcctgagcaagacctacctgtccaagacactggcccagtacacctccaagacatgcagcaactgtgggtttaccatcaccagcgccgactacgacagggtgctggagaagctgaagaagacagcaacaggctggatgaccacaattaacggcaaggagctgaaggtggagggccagattacctactacaacagatacaagagacagaacgtagtcaaggacctgtccgtcgagctggatagactgagcgaagaatctgtgaacaacgacatctcctcctggacaaagggcagaagcggagaagctctgagcctcctgaagaaaagattctcccatagacccgtgcaggagaagttcgtgtgcctgaactgcggcttcgagacacacgcagccgagcaagccgccctgaacatcgccagatcctggctgttcctgcggagccaggagtacaagaaataccagacaaacaagacaaccggcaacaccgataagagagccttcgtcgagacctggcagtccttttaccggaagaagcttaaggaggtgtggaaacctgccgtgcggtctggcggatctggcggaggctcctgagccctgggccatcaccttcgccgacgtggccgtgtacttcagccccgaggagtggggctgcctgcagcccacccagagggccctgtacagggacgtgatgagggacacctacgtgctgctgagcgccctgggcggcggcggcggcgccaagcccgccctgatcagctgggtggagagggagagcgagctgtgggacagcgacgcccaggaccccgaggtgcccaagtggcccaccgaggccggatctggctccggcagcggccccaagaaaaagagaaaagtctaagctgccttctgcggggcttgccttctggccatgcccttcttctctcccttgcacctgtacctcttggtctttgaataaagcctgagtaggaaggctagcaaaaaaaaaaaaaaaaaaaaaaaaaaaaaaaaaaaaaaaaaaaaaaaaaaaaaaaaaaaaaaaaaaaaaaaaaaaaaaaa

SEQ ID NO: 15773 - RNA, 9485 nt, synthetic construct
  source 1..9485: mol_type = other RNA
aggaaataagagagaaaagaagagtaagaagaaatataagagccaccatggcccctaagaagaagcgtaaagtgagccggatggaacgcctcgtctacgaggtgcggcagaagtgcagaaacatcgaggacatctgcatctcctgcggatctctgaacgtgaccctggagcacccactgttcatcggcggcatgtgccagaactgtaaaaactgttttctggagtgtgcctatcaatacgacgatgacggctaccagagctactgcaccatctgttgcggcggaagagaggtgctgatgtgtggaaataacaactgctgccggtgcttctgcgtggaatgcgtggacctgctggtgggccccggcgccgcccaggccgctattaaggaagatccttggaactgctacatgtgcggccacaagggcacatacggcctgctgagacggagagaggactggcctagcagactgcagatgttcttcgccaataaccacgaccaggagttcgacccccctaaggtgtaccctcccgtccccgccgagaagagaaagcccatccgggtcctgagcctgttcgatggcatcgccaccggtctgctggtgctgaaggacctgggcatccaggtggataggtacattgcctccgaggtgtgcgaggactccatcaccgtgggaatggtgcgtcatcagggcaagatcatgtacgtgggcgacgtgcggagcgtgacacagaagcatatccaggagtggggccctttcgacctggtgatcggcggcagcccttgcaatgacctgagcatcgtgaacccagcccggaagggcctgtacgagggaaccggcagactgttcttcgagttttacagactgctgcacgacgcccggcctaaggaaggcgacgaccggcccttcttttggctgttcgagaatgtggtggccatgggagtcagcgacaagcgggatattagccggttcctggagagcaaccccgtgatgatcgatgccaaggaagtgagcgccgcccaccgggccagatacttctggggcaatctgcctggcatgaacagacccctggccagcaccgtgaacgacaagctggagctgcaggagtgcctggagcacggccggatcgccaagttcagcaaggtgagaaccatcaccacccgaagcaacagcatcaaacaaggcaaggaccagcactttcctgtgttcatgaacgagaaggaggacatcctgtggtgtaccgagatggagagagtgttcgggttcccagtccactacacagatgtcagcaacatgtctagactggccagacagagactgctgggaagaagctggtccgtccctgtgatcagacacctgttcgcccctctgaaggagtacttcgcctgcgtgagcagcggcaacagcaacgccaacagccggggccccagcttctctagcggcctggtgccactgtccctgagagggagccacatgggccccatggagatctacaaaaccgtgagcgcctggaagcggcagcctgtgcgcgtgctgagcctgtttcggaatatcgataaagtcctgaaaagcctgggattcctggagagcggctctggctccggcggtggcaccctgaagtacgtggaggatgtgacaaacgtggtcagacgggatgtggagaagtggggccccttcgatctggtgtacggcagcacccaacccctgggcagctcttgtgaccggtgccctggctggtacatgtttcagttccaccggatcctgcagtacgccctgccgagacaggagtcccagcggccattcttttggattttcatggacaacttgctgctgaccgaggatgaccaggaaactaccactcggttcctgcagaccgaagccgtgaccctgcaggacgtgagaggccgggactaccagaacgccatgcgggtgtggtccaacatccctggactgaaaagcaagcacgcacctctgacccctaaagaagaggagtacctgcaggcccaggtgcggagcagaagcaagctggacgcccctaaggtggatctgctggtgaagaattgcctcctgcccctgagagagtacttcaagtatttcagccagaatagtctgcccctgggaggcagcggcggcggcgccctggtgacatttgaggacgtcgccgtgcggttcacccaggaggaatgggctctgctggatccttctcagaaaatcctgtaccgggacgtgatgagagagacataccggaatctgacctccgtgggcatcaactgggaatgttgggaccttgaagcctgcttcagaagcctgggaagaaacctgagagtgcaggtggtgaagagaaagtgcgagctgaccaacagcggcccctgcgccgagggcggcccaagcagcggcgcccctcctcccagcggcggcagcccagccggctccccaacctctaccgaggagggcacctctgagtccgccacccccgagagcggccctggcacctccaccgagcccagcgagggcagcgcacccggcagccctgccggcagccccacctccacagaggagggaaccagcaccgagcccagcgaaggcagcgccccaggcaccagcaccgagcctagtgagcaggagattaaacggatcaacaagatcagaagaagacttgtgaaagacagcaacaccaagaaggccggcaagacaggccccatgaaaaccctgctggttagagtgatgacacccgatctgagagagcggctggaaaacctgagaaagaagcctgaaaatatcccccagcccatcagcaatacatctagagccaacctgaataagctgctgaccgattacaccgaaatgaagaaggcgatcctgcatgtgtactgggaagagttccagaaggaccctgtgggcctgatgagccgggtggcccagcctgccagcaagaagatcgatcagaacaagctgaaacctgagatggacgagaagggcaacctgaccaccgccggctttgcctgctctcagtgtggccagcccctgttcgtgtacaagctggagcaggtgtctgagaagggcaaggcttacaccaactacttcggacggtgcaatgtggccgagcacgaaaagctgatcctgctggcccagctgaagcccgagaaggatagcgacgaagccgtgacatatagcctgggaaagtttgggcagagggccctggatttctacagcattcatgtgaccaaggagtccacccaccccgtgaagcccctggcccagatcgccggaaacagatacgcctccggacctgtgggaaaggccctgagcgacgcatgtatgggcacaatcgcctccttcctgtctaagtaccaggacatcatcatcgaacaccagaaggtggtgaagggcaaccagaagagactggagagcctgcgggagctggccggcaaggaaaacctggaataccctagcgtgaccctgccacctcagcctcacaccaaggagggcgttgatgcctacaacgaagtgatcgcccgggtgcgaatgtgggtgaacctgaacctgtggcagaagctgaagctaagcagagatgatgccaagcctctgctgagactgaagggattcccttcctttcctctggtcgagagacaggccaacgaagtggactggtgggacatggtgtgtaacgtgaagaagctgatcaacgagaaaaaggaggatggcaaggtgttttggcagaatctggctggctacaagagacaggaagccctgagaccatacctgagcagcgaggaagatcggaagaagggaaagaaattcgctcggtaccagctgggcgacctgctgctgcacctggaaaagaagcacggcgaggactggggaaaggtgtacgacgaggcctgggagcggattgacaagaaagtggaaggcctgagcaagcacatcaagctggaagaggaacggagaagcgaggacgcccagagcaaggccgccctgaccgactggctgcgggctaaggccagcttcgtgatcgagggcctgaaggaggccgacaaggacgagttctgcagatgcgagctgaagctgcagaagtggtacggggacctgcggggaaagcccttcgccatcgaagccgagaacagcatcctggacatcagcggcttcagcaagcagtacaactgtgccttcatctggcagaaggacggcgtgaagaagctgaacctgtacctgatcatcaactacttcaagggcggcaagctgcggttcaagaagatcaaacctgaagccttcgaagccaacagattctacaccgtgatcaacaaaaagagcggcgagatcgtgcccatggaggtgaacttcaacttcgacgaccccaacctgatcatcctgcctctggcctttggcaagagacagggcagagaattcatctggaacgacctgctgtccctggaaaccggcagcctgaagctggccaacggaagagtgatcgagaagacactgtacaacagaagaacccggcaggatgagcctgccctgttcgtggccctgaccttcgagcggcgggaggtcctggactcctccaatatcaaaccaatgaacctgatcggcgtggcaagaggcgaaaacatccccgccgtgatcgccctgaccgaccccgagggctgcccactgagccggtttaaggatagcctgggaaacccaacccacatcctgagaatcggcgagagctataaggagaagcagcggaccatccaggccaagaaggaggtggagcagcggagagccggcggctacagccggaagtacgccagcaaagccaagaatctggcagacgatatggtgagaaacaccgctagagatctgctgtactacgccgtgacccaggatgccatgctgatcttcgccaacctgagccggggcttcggccggcagggcaagcggaccttcatggccgagagacagtacacacggatggaggactggctgaccgccaagctggcctacgagggcctgagcaagacctacctgtccaagacactggcccagtacacctccaagacatgcagcaactgtgggtttaccatcaccagcgccgactacgacagggtgctggagaagctgaagaagacagcaacaggctggatgaccacaattaacggcaaggagctgaaggtggagggccagattacctactacaacagatacaagagacagaacgtagtcaaggacctgtccgtcgagctggatagactgagcgaagaatctgtgaacaacgacatctcctcctggacaaagggcagaagcggagaagctctgagcctcctgaagaaaagattctcccatagacccgtgcaggagaagttcgtgtgcctgaactgcggcttcgagacacacgcagccgagcaagccgccctgaacatcgccagatcctggctgttcctgcggagccaggagtacaagaaataccagacaaacaagacaaccggcaacaccgataagagagccttcgtcgagacctggcagtccttttaccggaagaagcttaaggaggtgtggaaacctgccgtgcggtctggcggatctggcggaggctcctgccaggagcccgtgagcttcgcccaggtggccgtgtacttcagcagggaggagtgggccctgctggaccccgcccagagggccctgtacagggacgtgatgctggagacctaccagtgcgtggccagcctggcccccctgcccgcccacaagcccatggtgatcagcctgctggagggcggcgaggacccctggatccccgacgtgaggagccccgaggccgtgcccggcgacctgagccccggcggcccaagcagcggcgcccctcctcccagcggcggcagcccagccggctccccaacctctaccgaggagggcacctctgagtccgccacccccgagagcggccctggcacctccaccgagcccagcgagggcagcgcacccggcagccctgccggcagccccacctccacagaggagggaaccagcaccgagcccagcgaaggcagcgccccaggcaccagcaccgagcctagtgagcaggagattaaacggatcaacaagatcagaagaagacttgtgaaagacagcaacaccaagaaggccggcaagacaggccccatgaaaaccctgctggttagagtgatgacacccgatctgagagagcggctggaaaacctgagaaagaagcctgaaaatatcccccagcccatcagcaatacatctagagccaacctgaataagctgctgaccgattacaccgaaatgaagaaggcgatcctgcatgtgtactgggaagagttccagaaggaccctgtgggcctgatgagccgggtggcccagcctgccagcaagaagatcgatcagaacaagctgaaacctgagatggacgagaagggcaacctgaccaccgccggctttgcctgctctcagtgtggccagcccctgttcgtgtacaagctggagcaggtgtctgagaagggcaaggcttacaccaactacttcggacggtgcaatgtggccgagcacgaaaagctgatcctgctggcccagctgaagcccgagaaggatagcgacgaagccgtgacatatagcctgggaaagtttgggcagagggccctggatttctacagcattcatgtgaccaaggagtccacccaccccgtgaagcccctggcccagatcgccggaaacagatacgcctccggacctgtgggaaaggccctgagcgacgcatgtatgggcacaatcgcctccttcctgtctaagtaccaggacatcatcatcgaacaccagaaggtggtgaagggcaaccagaagagactggagagcctgcgggagctggccggcaaggaaaacctggaataccctagcgtgaccctgccacctcagcctcacaccaaggagggcgttgatgcctacaacgaagtgatcgcccgggtgcgaatgtgggtgaacctgaacctgtggcagaagctgaagctaagcagagatgatgccaagcctctgctgagactgaagggattcccttcctttcctctggtcgagagacaggccaacgaagtggactggtgggacatggtgtgtaacgtgaagaagctgatcaacgagaaaaaggaggatggcaaggtgttttggcagaatctggctggctacaagagacaggaagccctgagaccatacctgagcagcgaggaagatcggaagaagggaaagaaattcgctcggtaccagctgggcgacctgctgctgcacctggaaaagaagcacggcgaggactggggaaaggtgtacgacgaggcctgggagcggattgacaagaaagtggaaggcctgagcaagcacatcaagctggaagaggaacggagaagcgaggacgcccagagcaaggccgccctgaccgactggctgcgggctaaggccagcttcgtgatcgagggcctgaaggaggccgacaaggacgagttctgcagatgcgagctgaagctgcagaagtggtacggggacctgcggggaaagcccttcgccatcgaagccgagaacagcatcctggacatcagcggcttcagcaagcagtacaactgtgccttcatctggcagaaggacggcgtgaagaagctgaacctgtacctgatcatcaactacttcaagggcggcaagctgcggttcaagaagatcaaacctgaagccttcgaagccaacagattctacaccgtgatcaacaaaaagagcggcgagatcgtgcccatggaggtgaacttcaacttcgacgaccccaacctgatcatcctgcctctggcctttggcaagagacagggcagagaattcatctggaacgacctgctgtccctggaaaccggcagcctgaagctggccaacggaagagtgatcgagaagacactgtacaacagaagaacccggcaggatgagcctgccctgttcgtggccctgaccttcgagcggcgggaggtcctggactcctccaatatcaaaccaatgaacctgatcggcgtggcaagaggcgaaaacatccccgccgtgatcgccctgaccgaccccgagggctgcccactgagccggtttaaggatagcctgggaaacccaacccacatcctgagaatcggcgagagctataaggagaagcagcggaccatccaggccaagaaggaggtggagcagcggagagccggcggctacagccggaagtacgccagcaaagccaagaatctggcagacgatatggtgagaaacaccgctagagatctgctgtactacgccgtgacccaggatgccatgctgatcttcgccaacctgagccggggcttcggccggcagggcaagcggaccttcatggccgagagacagtacacacggatggaggactggctgaccgccaagctggcctacgagggcctgagcaagacctacctgtccaagacactggcccagtacacctccaagacatgcagcaactgtgggtttaccatcaccagcgccgactacgacagggtgctggagaagctgaagaagacagcaacaggctggatgaccacaattaacggcaaggagctgaaggtggagggccagattacctactacaacagatacaagagacagaacgtagtcaaggacctgtccgtcgagctggatagactgagcgaagaatctgtgaacaacgacatctcctcctggacaaagggcagaagcggagaagctctgagcctcctgaagaaaagattctcccatagacccgtgcaggagaagttcgtgtgcctgaactgcggcttcgagacacacgcagccgagcaagccgccctgaacatcgccagatcctggctgttcctgcggagccaggagtacaagaaataccagacaaacaagacaaccggcaacaccgataagagagccttcgtcgagacctggcagtccttttaccggaagaagcttaaggaggtgtggaaacctgccgtgcggtctggcggatctggcggaggctccttgccaggagcccgtgagcttcgcccaggtggccgtgtacttcagcagggaggagtgggccctgctggaccccgcccagagggccctgtacagggacgtgatgctggagacctaccagtgcgtggccagcctggcccccctgcccgcccacaagcccatggtgatcagcctgctggagggcggcgaggacccctggatccccgacgtgaggagccccgaggccgtgcccggcgacctgagccccggatctggctccggcagcggccccaagaaaaagagaaaagtctaagctgccttctgcggggcttgccttctggccatgcccttcttctctcccttgcacctgtacctcttggtctttgaataaagcctgagtaggaaggctagcaaaaaaaaaaaaaaaaaaaaaaaaaaaaaaaaaaaaaaaaaaaaaaaaaaaaaaaaaaaaaaaaaaaaaaaaaaaaaaaa

SEQ ID NO: 15774 - RNA, 9485 nt, synthetic construct
  source 1..9485: mol_type = other RNA
aggaaataagagagaaaagaagagtaagaagaaatataagagccaccatggcccctaagaagaagcgtaaagtgagccggatggaacgcctcgtctacgaggtgcggcagaagtgcagaaacatcgaggacatctgcatctcctgcggatctctgaacgtgaccctggagcacccactgttcatcggcggcatgtgccagaactgtaaaaactgttttctggagtgtgcctatcaatacgacgatgacggctaccagagctactgcaccatctgttgcggcggaagagaggtgctgatgtgtggaaataacaactgctgccggtgcttctgcgtggaatgcgtggacctgctggtgggccccggcgccgcccaggccgctattaaggaagatccttggaactgctacatgtgcggccacaagggcacatacggcctgctgagacggagagaggactggcctagcagactgcagatgttcttcgccaataaccacgaccaggagttcgacccccctaaggtgtaccctcccgtccccgccgagaagagaaagcccatccgggtcctgagcctgttcgatggcatcgccaccggtctgctggtgctgaaggacctgggcatccaggtggataggtacattgcctccgaggtgtgcgaggactccatcaccgtgggaatggtgcgtcatcagggcaagatcatgtacgtgggcgacgtgcggagcgtgacacagaagcatatccaggagtggggccctttcgacctggtgatcggcggcagcccttgcaatgacctgagcatcgtgaacccagcccggaagggcctgtacgagggaaccggcagactgttcttcgagttttacagactgctgcacgacgcccggcctaaggaaggcgacgaccggcccttcttttggctgttcgagaatgtggtggccatgggagtcagcgacaagcgggatattagccggttcctggagagcaaccccgtgatgatcgatgccaaggaagtgagcgccgcccaccgggccagatacttctggggcaatctgcctggcatgaacagacccctggccagcaccgtgaacgacaagctggagctgcaggagtgcctggagcacggccggatcgccaagttcagcaaggtgagaaccatcaccacccgaagcaacagcatcaaacaaggcaaggaccagcactttcctgtgttcatgaacgagaaggaggacatcctgtggtgtaccgagatggagagagtgttcgggttcccagtccactacacagatgtcagcaacatgtctagactggccagacagagactgctgggaagaagctggtccgtccctgtgatcagacacctgttcgcccctctgaaggagtacttcgcctgcgtgagcagcggcaacagcaacgccaacagccggggccccagcttctctagcggcctggtgccactgtccctgagagggagccacatgggccccatggagatctacaaaaccgtgagcgcctggaagcggcagcctgtgcgcgtgctgagcctgtttcggaatatcgataaagtcctgaaaagcctgggattcctggagagcggctctggctccggcggtggcaccctgaagtacgtggaggatgtgacaaacgtggtcagacgggatgtggagaagtggggccccttcgatctggtgtacggcagcacccaacccctgggcagctcttgtgaccggtgccctggctggtacatgtttcagttccaccggatcctgcagtacgccctgccgagacaggagtcccagcggccattcttttggattttcatggacaacttgctgctgaccgaggatgaccaggaaactaccactcggttcctgcagaccgaagccgtgaccctgcaggacgtgagaggccgggactaccagaacgccatgcgggtgtggtccaacatccctggactgaaaagcaagcacgcacctctgacccctaaagaagaggagtacctgcaggcccaggtgcggagcagaagcaagctggacgcccctaaggtggatctgctggtgaagaattgcctcctgcccctgagagagtacttcaagtatttcagccagaatagtctgcccctgggaggcagcggcggcggcgccctggtgacatttgaggacgtcgccgtgcggttcacccaggaggaatgggctctgctggatccttctcagaaaatcctgtaccgggacgtgatgagagagacataccggaatctgacctccgtgggcatcaactgggaatgttgggaccttgaagcctgcttcagaagcctgggaagaaacctgagagtgcaggtggtgaagagaaagtgcgagctgaccaacagcggcccctgcgccgagggcggcccaagcagcggcgcccctcctcccagcggcggcagcccagccggctccccaacctctaccgaggagggcacctctgagtccgccacccccgagagcggccctggcacctccaccgagcccagcgagggcagcgcacccggcagccctgccggcagccccacctccacagaggagggaaccagcaccgagcccagcgaaggcagcgccccaggcaccagcaccgagcctagtgagcaggagattaaacggatcaacaagatcagaagaagacttgtgaaagacagcaacaccaagaaggccggcaagacaggccccatgaaaaccctgctggttagagtgatgacacccgatctgagagagcggctggaaaacctgagaaagaagcctgaaaatatcccccagcccatcagcaatacatctagagccaacctgaataagctgctgaccgattacaccgaaatgaagaaggcgatcctgcatgtgtactgggaagagttccagaaggaccctgtgggcctgatgagccgggtggcccagcctgccagcaagaagatcgatcagaacaagctgaaacctgagatggacgagaagggcaacctgaccaccgccggctttgcctgctctcagtgtggccagcccctgttcgtgtacaagctggagcaggtgtctgagaagggcaaggcttacaccaactacttcggacggtgcaatgtggccgagcacgaaaagctgatcctgctggcccagctgaagcccgagaaggatagcgacgaagccgtgacatatagcctgggaaagtttgggcagagggccctggatttctacagcattcatgtgaccaaggagtccacccaccccgtgaagcccctggcccagatcgccggaaacagatacgcctccggacctgtgggaaaggccctgagcgacgcatgtatgggcacaatcgcctccttcctgtctaagtaccaggacatcatcatcgaacaccagaaggtggtgaagggcaaccagaagagactggagagcctgcgggagctggccggcaaggaaaacctggaataccctagcgtgaccctgccacctcagcctcacaccaaggagggcgttgatgcctacaacgaagtgatcgcccgggtgcgaatgtgggtgaacctgaacctgtggcagaagctgaagctaagcagagatgatgccaagcctctgctgagactgaagggattcccttcctttcctctggtcgagagacaggccaacgaagtggactggtgggacatggtgtgtaacgtgaagaagctgatcaacgagaaaaaggaggatggcaaggtgttttggcagaatctggctggctacaagagacaggaagccctgagaccatacctgagcagcgaggaagatcggaagaagggaaagaaattcgctcggtaccagctgggcgacctgctgctgcacctggaaaagaagcacggcgaggactggggaaaggtgtacgacgaggcctgggagcggattgacaagaaagtggaaggcctgagcaagcacatcaagctggaagaggaacggagaagcgaggacgcccagagcaaggccgccctgaccgactggctgcgggctaaggccagcttcgtgatcgagggcctgaaggaggccgacaaggacgagttctgcagatgcgagctgaagctgcagaagtggtacggggacctgcggggaaagcccttcgccatcgaagccgagaacagcatcctggacatcagcggcttcagcaagcagtacaactgtgccttcatctggcagaaggacggcgtgaagaagctgaacctgtacctgatcatcaactacttcaagggcggcaagctgcggttcaagaagatcaaacctgaagccttcgaagccaacagattctacaccgtgatcaacaaaaagagcggcgagatcgtgcccatggaggtgaacttcaacttcgacgaccccaacctgatcatcctgcctctggcctttggcaagagacagggcagagaattcatctggaacgacctgctgtccctggaaaccggcagcctgaagctggccaacggaagagtgatcgagaagacactgtacaacagaagaacccggcaggatgagcctgccctgttcgtggccctgaccttcgagcggcgggaggtcctggactcctccaatatcaaaccaatgaacctgatcggcgtggcaagaggcgaaaacatccccgccgtgatcgccctgaccgaccccgagggctgcccactgagccggtttaaggatagcctgggaaacccaacccacatcctgagaatcggcgagagctataaggagaagcagcggaccatccaggccaagaaggaggtggagcagcggagagccggcggctacagccggaagtacgccagcaaagccaagaatctggcagacgatatggtgagaaacaccgctagagatctgctgtactacgccgtgacccaggatgccatgctgatcttcgccaacctgagccggggcttcggccggcagggcaagcggaccttcatggccgagagacagtacacacggatggaggactggctgaccgccaagctggcctacgagggcctgagcaagacctacctgtccaagacactggcccagtacacctccaagacatgcagcaactgtgggtttaccatcaccagcgccgactacgacagggtgctggagaagctgaagaagacagcaacaggctggatgaccacaattaacggcaaggagctgaaggtggagggccagattacctactacaacagatacaagagacagaacgtagtcaaggacctgtccgtcgagctggatagactgagcgaagaatctgtgaacaacgacatctcctcctggacaaagggcagaagcggagaagctctgagcctcctgaagaaaagattctcccatagacccgtgcaggagaagttcgtgtgcctgaactgcggcttcgagacacacgcagccgagcaagccgccctgaacatcgccagatcctggctgttcctgcggagccaggagtacaagaaataccagacaaacaagacaaccggcaacaccgataagagagccttcgtcgagacctggcagtccttttaccggaagaagcttaaggaggtgtggaaacctgccgtgcggtctggcggatctggcggaggctccagccagagcctggtggagttcggcgacgtggccatcgacttcagccaggaggagtgggagtggctgaaccccgcccagaggaccctgtacaggaaggtgatgctggagaactacaggaacctggccagcctgggcctgtgcggcagcaagcccgccgtgatcagcagcctggagcagggcaaggagccctgggccgtgaagaggaaggtggccaggggctggagccccgacctgaagaccgtgggcggcccaagcagcggcgcccctcctcccagcggcggcagcccagccggctccccaacctctaccgaggagggcacctctgagtccgccacccccgagagcggccctggcacctccaccgagcccagcgagggcagcgcacccggcagccctgccggcagccccacctccacagaggagggaaccagcaccgagcccagcgaaggcagcgccccaggcaccagcaccgagcctagtgagcaggagattaaacggatcaacaagatcagaagaagacttgtgaaagacagcaacaccaagaaggccggcaagacaggccccatgaaaaccctgctggttagagtgatgacacccgatctgagagagcggctggaaaacctgagaaagaagcctgaaaatatcccccagcccatcagcaatacatctagagccaacctgaataagctgctgaccgattacaccgaaatgaagaaggcgatcctgcatgtgtactgggaagagttccagaaggaccctgtgggcctgatgagccgggtggcccagcctgccagcaagaagatcgatcagaacaagctgaaacctgagatggacgagaagggcaacctgaccaccgccggctttgcctgctctcagtgtggccagcccctgttcgtgtacaagctggagcaggtgtctgagaagggcaaggcttacaccaactacttcggacggtgcaatgtggccgagcacgaaaagctgatcctgctggcccagctgaagcccgagaaggatagcgacgaagccgtgacatatagcctgggaaagtttgggcagagggccctggatttctacagcattcatgtgaccaaggagtccacccaccccgtgaagcccctggcccagatcgccggaaacagatacgcctccggacctgtgggaaaggccctgagcgacgcatgtatgggcacaatcgcctccttcctgtctaagtaccaggacatcatcatcgaacaccagaaggtggtgaagggcaaccagaagagactggagagcctgcgggagctggccggcaaggaaaacctggaataccctagcgtgaccctgccacctcagcctcacaccaaggagggcgttgatgcctacaacgaagtgatcgcccgggtgcgaatgtgggtgaacctgaacctgtggcagaagctgaagctaagcagagatgatgccaagcctctgctgagactgaagggattcccttcctttcctctggtcgagagacaggccaacgaagtggactggtgggacatggtgtgtaacgtgaagaagctgatcaacgagaaaaaggaggatggcaaggtgttttggcagaatctggctggctacaagagacaggaagccctgagaccatacctgagcagcgaggaagatcggaagaagggaaagaaattcgctcggtaccagctgggcgacctgctgctgcacctggaaaagaagcacggcgaggactggggaaaggtgtacgacgaggcctgggagcggattgacaagaaagtggaaggcctgagcaagcacatcaagctggaagaggaacggagaagcgaggacgcccagagcaaggccgccctgaccgactggctgcgggctaaggccagcttcgtgatcgagggcctgaaggaggccgacaaggacgagttctgcagatgcgagctgaagctgcagaagtggtacggggacctgcggggaaagcccttcgccatcgaagccgagaacagcatcctggacatcagcggcttcagcaagcagtacaactgtgccttcatctggcagaaggacggcgtgaagaagctgaacctgtacctgatcatcaactacttcaagggcggcaagctgcggttcaagaagatcaaacctgaagccttcgaagccaacagattctacaccgtgatcaacaaaaagagcggcgagatcgtgcccatggaggtgaacttcaacttcgacgaccccaacctgatcatcctgcctctggcctttggcaagagacagggcagagaattcatctggaacgacctgctgtccctggaaaccggcagcctgaagctggccaacggaagagtgatcgagaagacactgtacaacagaagaacccggcaggatgagcctgccctgttcgtggccctgaccttcgagcggcgggaggtcctggactcctccaatatcaaaccaatgaacctgatcggcgtggcaagaggcgaaaacatccccgccgtgatcgccctgaccgaccccgagggctgcccactgagccggtttaaggatagcctgggaaacccaacccacatcctgagaatcggcgagagctataaggagaagcagcggaccatccaggccaagaaggaggtggagcagcggagagccggcggctacagccggaagtacgccagcaaagccaagaatctggcagacgatatggtgagaaacaccgctagagatctgctgtactacgccgtgacccaggatgccatgctgatcttcgccaacctgagccggggcttcggccggcagggcaagcggaccttcatggccgagagacagtacacacggatggaggactggctgaccgccaagctggcctacgagggcctgagcaagacctacctgtccaagacactggcccagtacacctccaagacatgcagcaactgtgggtttaccatcaccagcgccgactacgacagggtgctggagaagctgaagaagacagcaacaggctggatgaccacaattaacggcaaggagctgaaggtggagggccagattacctactacaacagatacaagagacagaacgtagtcaaggacctgtccgtcgagctggatagactgagcgaagaatctgtgaacaacgacatctcctcctggacaaagggcagaagcggagaagctctgagcctcctgaagaaaagattctcccatagacccgtgcaggagaagttcgtgtgcctgaactgcggcttcgagacacacgcagccgagcaagccgccctgaacatcgccagatcctggctgttcctgcggagccaggagtacaagaaataccagacaaacaagacaaccggcaacaccgataagagagccttcgtcgagacctggcagtccttttaccggaagaagcttaaggaggtgtggaaacctgccgtgcggtctggcggatctggcggaggctcctagccagagcctggtggagttcggcgacgtggccatcgacttcagccaggaggagtgggagtggctgaaccccgcccagaggaccctgtacaggaaggtgatgctggagaactacaggaacctggccagcctgggcctgtgcggcagcaagcccgccgtgatcagcagcctggagcagggcaaggagccctgggccgtgaagaggaaggtggccaggggctggagccccgacctgaagaccgtgggatctggctccggcagcggccccaagaaaaagagaaaagtctaagctgccttctgcggggcttgccttctggccatgcccttcttctctcccttgcacctgtacctcttggtctttgaataaagcctgagtaggaaggctagcaaaaaaaaaaaaaaaaaaaaaaaaaaaaaaaaaaaaaaaaaaaaaaaaaaaaaaaaaaaaaaaaaaaaaaaaaaaaaaaa

SEQ ID NO: 15775 - RNA, 9485 nt, synthetic construct
  source 1..9485: mol_type = other RNA
aggaaataagagagaaaagaagagtaagaagaaatataagagccaccatggcccctaagaagaagcgtaaagtgagccggatggaacgcctcgtctacgaggtgcggcagaagtgcagaaacatcgaggacatctgcatctcctgcggatctctgaacgtgaccctggagcacccactgttcatcggcggcatgtgccagaactgtaaaaactgttttctggagtgtgcctatcaatacgacgatgacggctaccagagctactgcaccatctgttgcggcggaagagaggtgctgatgtgtggaaataacaactgctgccggtgcttctgcgtggaatgcgtggacctgctggtgggccccggcgccgcccaggccgctattaaggaagatccttggaactgctacatgtgcggccacaagggcacatacggcctgctgagacggagagaggactggcctagcagactgcagatgttcttcgccaataaccacgaccaggagttcgacccccctaaggtgtaccctcccgtccccgccgagaagagaaagcccatccgggtcctgagcctgttcgatggcatcgccaccggtctgctggtgctgaaggacctgggcatccaggtggataggtacattgcctccgaggtgtgcgaggactccatcaccgtgggaatggtgcgtcatcagggcaagatcatgtacgtgggcgacgtgcggagcgtgacacagaagcatatccaggagtggggccctttcgacctggtgatcggcggcagcccttgcaatgacctgagcatcgtgaacccagcccggaagggcctgtacgagggaaccggcagactgttcttcgagttttacagactgctgcacgacgcccggcctaaggaaggcgacgaccggcccttcttttggctgttcgagaatgtggtggccatgggagtcagcgacaagcgggatattagccggttcctggagagcaaccccgtgatgatcgatgccaaggaagtgagcgccgcccaccgggccagatacttctggggcaatctgcctggcatgaacagacccctggccagcaccgtgaacgacaagctggagctgcaggagtgcctggagcacggccggatcgccaagttcagcaaggtgagaaccatcaccacccgaagcaacagcatcaaacaaggcaaggaccagcactttcctgtgttcatgaacgagaaggaggacatcctgtggtgtaccgagatggagagagtgttcgggttcccagtccactacacagatgtcagcaacatgtctagactggccagacagagactgctgggaagaagctggtccgtccctgtgatcagacacctgttcgcccctctgaaggagtacttcgcctgcgtgagcagcggcaacagcaacgccaacagccggggccccagcttctctagcggcctggtgccactgtccctgagagggagccacatgggccccatggagatctacaaaaccgtgagcgcctggaagcggcagcctgtgcgcgtgctgagcctgtttcggaatatcgataaagtcctgaaaagcctgggattcctggagagcggctctggctccggcggtggcaccctgaagtacgtggaggatgtgacaaacgtggtcagacgggatgtggagaagtggggccccttcgatctggtgtacggcagcacccaacccctgggcagctcttgtgaccggtgccctggctggtacatgtttcagttccaccggatcctgcagtacgccctgccgagacaggagtcccagcggccattcttttggattttcatggacaacttgctgctgaccgaggatgaccaggaaactaccactcggttcctgcagaccgaagccgtgaccctgcaggacgtgagaggccgggactaccagaacgccatgcgggtgtggtccaacatccctggactgaaaagcaagcacgcacctctgacccctaaagaagaggagtacctgcaggcccaggtgcggagcagaagcaagctggacgcccctaaggtggatctgctggtgaagaattgcctcctgcccctgagagagtacttcaagtatttcagccagaatagtctgcccctgggaggcagcggcggcggcgccctggtgacatttgaggacgtcgccgtgcggttcacccaggaggaatgggctctgctggatccttctcagaaaatcctgtaccgggacgtgatgagagagacataccggaatctgacctccgtgggcatcaactgggaatgttgggaccttgaagcctgcttcagaagcctgggaagaaacctgagagtgcaggtggtgaagagaaagtgcgagctgaccaacagcggcccctgcgccgagggcggcccaagcagcggcgcccctcctcccagcggcggcagcccagccggctccccaacctctaccgaggagggcacctctgagtccgccacccccgagagcggccctggcacctccaccgagcccagcgagggcagcgcacccggcagccctgccggcagccccacctccacagaggagggaaccagcaccgagcccagcgaaggcagcgccccaggcaccagcaccgagcctagtgagcaggagattaaacggatcaacaagatcagaagaagacttgtgaaagacagcaacaccaagaaggccggcaagacaggccccatgaaaaccctgctggttagagtgatgacacccgatctgagagagcggctggaaaacctgagaaagaagcctgaaaatatcccccagcccatcagcaatacatctagagccaacctgaataagctgctgaccgattacaccgaaatgaagaaggcgatcctgcatgtgtactgggaagagttccagaaggaccctgtgggcctgatgagccgggtggcccagcctgccagcaagaagatcgatcagaacaagctgaaacctgagatggacgagaagggcaacctgaccaccgccggctttgcctgctctcagtgtggccagcccctgttcgtgtacaagctggagcaggtgtctgagaagggcaaggcttacaccaactacttcggacggtgcaatgtggccgagcacgaaaagctgatcctgctggcccagctgaagcccgagaaggatagcgacgaagccgtgacatatagcctgggaaagtttgggcagagggccctggatttctacagcattcatgtgaccaaggagtccacccaccccgtgaagcccctggcccagatcgccggaaacagatacgcctccggacctgtgggaaaggccctgagcgacgcatgtatgggcacaatcgcctccttcctgtctaagtaccaggacatcatcatcgaacaccagaaggtggtgaagggcaaccagaagagactggagagcctgcgggagctggccggcaaggaaaacctggaataccctagcgtgaccctgccacctcagcctcacaccaaggagggcgttgatgcctacaacgaagtgatcgcccgggtgcgaatgtgggtgaacctgaacctgtggcagaagctgaagctaagcagagatgatgccaagcctctgctgagactgaagggattcccttcctttcctctggtcgagagacaggccaacgaagtggactggtgggacatggtgtgtaacgtgaagaagctgatcaacgagaaaaaggaggatggcaaggtgttttggcagaatctggctggctacaagagacaggaagccctgagaccatacctgagcagcgaggaagatcggaagaagggaaagaaattcgctcggtaccagctgggcgacctgctgctgcacctggaaaagaagcacggcgaggactggggaaaggtgtacgacgaggcctgggagcggattgacaagaaagtggaaggcctgagcaagcacatcaagctggaagaggaacggagaagcgaggacgcccagagcaaggccgccctgaccgactggctgcgggctaaggccagcttcgtgatcgagggcctgaaggaggccgacaaggacgagttctgcagatgcgagctgaagctgcagaagtggtacggggacctgcggggaaagcccttcgccatcgaagccgagaacagcatcctggacatcagcggcttcagcaagcagtacaactgtgccttcatctggcagaaggacggcgtgaagaagctgaacctgtacctgatcatcaactacttcaagggcggcaagctgcggttcaagaagatcaaacctgaagccttcgaagccaacagattctacaccgtgatcaacaaaaagagcggcgagatcgtgcccatggaggtgaacttcaacttcgacgaccccaacctgatcatcctgcctctggcctttggcaagagacagggcagagaattcatctggaacgacctgctgtccctggaaaccggcagcctgaagctggccaacggaagagtgatcgagaagacactgtacaacagaagaacccggcaggatgagcctgccctgttcgtggccctgaccttcgagcggcgggaggtcctggactcctccaatatcaaaccaatgaacctgatcggcgtggcaagaggcgaaaacatccccgccgtgatcgccctgaccgaccccgagggctgcccactgagccggtttaaggatagcctgggaaacccaacccacatcctgagaatcggcgagagctataaggagaagcagcggaccatccaggccaagaaggaggtggagcagcggagagccggcggctacagccggaagtacgccagcaaagccaagaatctggcagacgatatggtgagaaacaccgctagagatctgctgtactacgccgtgacccaggatgccatgctgatcttcgccaacctgagccggggcttcggccggcagggcaagcggaccttcatggccgagagacagtacacacggatggaggactggctgaccgccaagctggcctacgagggcctgagcaagacctacctgtccaagacactggcccagtacacctccaagacatgcagcaactgtgggtttaccatcaccagcgccgactacgacagggtgctggagaagctgaagaagacagcaacaggctggatgaccacaattaacggcaaggagctgaaggtggagggccagattacctactacaacagatacaagagacagaacgtagtcaaggacctgtccgtcgagctggatagactgagcgaagaatctgtgaacaacgacatctcctcctggacaaagggcagaagcggagaagctctgagcctcctgaagaaaagattctcccatagacccgtgcaggagaagttcgtgtgcctgaactgcggcttcgagacacacgcagccgagcaagccgccctgaacatcgccagatcctggctgttcctgcggagccaggagtacaagaaataccagacaaacaagacaaccggcaacaccgataagagagccttcgtcgagacctggcagtccttttaccggaagaagcttaaggaggtgtggaaacctgccgtgcggtctggcggatctggcggaggctccctggcccccgaggaccacggcagcagctacgagggcagcgtgagcttcagggacgtggccatcgacttcagcagggaggagtggaggcacctggaccccagccagaggaacctgtacagggacgtgatgctggagacctacagccacctgctgagcgtgggctaccaggtgcccgaggccgaggtggtgatgctggagcagggcaaggagccctgggccctgcagggcgagaggcccaggcagggcggcccaagcagcggcgcccctcctcccagcggcggcagcccagccggctccccaacctctaccgaggagggcacctctgagtccgccacccccgagagcggccctggcacctccaccgagcccagcgagggcagcgcacccggcagccctgccggcagccccacctccacagaggagggaaccagcaccgagcccagcgaaggcagcgccccaggcaccagcaccgagcctagtgagcaggagattaaacggatcaacaagatcagaagaagacttgtgaaagacagcaacaccaagaaggccggcaagacaggccccatgaaaaccctgctggttagagtgatgacacccgatctgagagagcggctggaaaacctgagaaagaagcctgaaaatatcccccagcccatcagcaatacatctagagccaacctgaataagctgctgaccgattacaccgaaatgaagaaggcgatcctgcatgtgtactgggaagagttccagaaggaccctgtgggcctgatgagccgggtggcccagcctgccagcaagaagatcgatcagaacaagctgaaacctgagatggacgagaagggcaacctgaccaccgccggctttgcctgctctcagtgtggccagcccctgttcgtgtacaagctggagcaggtgtctgagaagggcaaggcttacaccaactacttcggacggtgcaatgtggccgagcacgaaaagctgatcctgctggcccagctgaagcccgagaaggatagcgacgaagccgtgacatatagcctgggaaagtttgggcagagggccctggatttctacagcattcatgtgaccaaggagtccacccaccccgtgaagcccctggcccagatcgccggaaacagatacgcctccggacctgtgggaaaggccctgagcgacgcatgtatgggcacaatcgcctccttcctgtctaagtaccaggacatcatcatcgaacaccagaaggtggtgaagggcaaccagaagagactggagagcctgcgggagctggccggcaaggaaaacctggaataccctagcgtgaccctgccacctcagcctcacaccaaggagggcgttgatgcctacaacgaagtgatcgcccgggtgcgaatgtgggtgaacctgaacctgtggcagaagctgaagctaagcagagatgatgccaagcctctgctgagactgaagggattcccttcctttcctctggtcgagagacaggccaacgaagtggactggtgggacatggtgtgtaacgtgaagaagctgatcaacgagaaaaaggaggatggcaaggtgttttggcagaatctggctggctacaagagacaggaagccctgagaccatacctgagcagcgaggaagatcggaagaagggaaagaaattcgctcggtaccagctgggcgacctgctgctgcacctggaaaagaagcacggcgaggactggggaaaggtgtacgacgaggcctgggagcggattgacaagaaagtggaaggcctgagcaagcacatcaagctggaagaggaacggagaagcgaggacgcccagagcaaggccgccctgaccgactggctgcgggctaaggccagcttcgtgatcgagggcctgaaggaggccgacaaggacgagttctgcagatgcgagctgaagctgcagaagtggtacggggacctgcggggaaagcccttcgccatcgaagccgagaacagcatcctggacatcagcggcttcagcaagcagtacaactgtgccttcatctggcagaaggacggcgtgaagaagctgaacctgtacctgatcatcaactacttcaagggcggcaagctgcggttcaagaagatcaaacctgaagccttcgaagccaacagattctacaccgtgatcaacaaaaagagcggcgagatcgtgcccatggaggtgaacttcaacttcgacgaccccaacctgatcatcctgcctctggcctttggcaagagacagggcagagaattcatctggaacgacctgctgtccctggaaaccggcagcctgaagctggccaacggaagagtgatcgagaagacactgtacaacagaagaacccggcaggatgagcctgccctgttcgtggccctgaccttcgagcggcgggaggtcctggactcctccaatatcaaaccaatgaacctgatcggcgtggcaagaggcgaaaacatccccgccgtgatcgccctgaccgaccccgagggctgcccactgagccggtttaaggatagcctgggaaacccaacccacatcctgagaatcggcgagagctataaggagaagcagcggaccatccaggccaagaaggaggtggagcagcggagagccggcggctacagccggaagtacgccagcaaagccaagaatctggcagacgatatggtgagaaacaccgctagagatctgctgtactacgccgtgacccaggatgccatgctgatcttcgccaacctgagccggggcttcggccggcagggcaagcggaccttcatggccgagagacagtacacacggatggaggactggctgaccgccaagctggcctacgagggcctgagcaagacctacctgtccaagacactggcccagtacacctccaagacatgcagcaactgtgggtttaccatcaccagcgccgactacgacagggtgctggagaagctgaagaagacagcaacaggctggatgaccacaattaacggcaaggagctgaaggtggagggccagattacctactacaacagatacaagagacagaacgtagtcaaggacctgtccgtcgagctggatagactgagcgaagaatctgtgaacaacgacatctcctcctggacaaagggcagaagcggagaagctctgagcctcctgaagaaaagattctcccatagacccgtgcaggagaagttcgtgtgcctgaactgcggcttcgagacacacgcagccgagcaagccgccctgaacatcgccagatcctggctgttcctgcggagccaggagtacaagaaataccagacaaacaagacaaccggcaacaccgataagagagccttcgtcgagacctggcagtccttttaccggaagaagcttaaggaggtgtggaaacctgccgtgcggtctggcggatctggcggaggctcctctggcccccgaggaccacggcagcagctacgagggcagcgtgagcttcagggacgtggccatcgacttcagcagggaggagtggaggcacctggaccccagccagaggaacctgtacagggacgtgatgctggagacctacagccacctgctgagcgtgggctaccaggtgcccgaggccgaggtggtgatgctggagcagggcaaggagccctgggccctgcagggcgagaggcccaggcagggatctggctccggcagcggccccaagaaaaagagaaaagtctaagctgccttctgcggggcttgccttctggccatgcccttcttctctcccttgcacctgtacctcttggtctttgaataaagcctgagtaggaaggctagcaaaaaaaaaaaaaaaaaaaaaaaaaaaaaaaaaaaaaaaaaaaaaaaaaaaaaaaaaaaaaaaaaaaaaaaaaaaaaaaa

SEQ ID NO: 15776 - RNA, 9485 nt, synthetic construct
  source 1..9485: mol_type = other RNA
aggaaataagagagaaaagaagagtaagaagaaatataagagccaccatggcccctaagaagaagcgtaaagtgagccggatggaacgcctcgtctacgaggtgcggcagaagtgcagaaacatcgaggacatctgcatctcctgcggatctctgaacgtgaccctggagcacccactgttcatcggcggcatgtgccagaactgtaaaaactgttttctggagtgtgcctatcaatacgacgatgacggctaccagagctactgcaccatctgttgcggcggaagagaggtgctgatgtgtggaaataacaactgctgccggtgcttctgcgtggaatgcgtggacctgctggtgggccccggcgccgcccaggccgctattaaggaagatccttggaactgctacatgtgcggccacaagggcacatacggcctgctgagacggagagaggactggcctagcagactgcagatgttcttcgccaataaccacgaccaggagttcgacccccctaaggtgtaccctcccgtccccgccgagaagagaaagcccatccgggtcctgagcctgttcgatggcatcgccaccggtctgctggtgctgaaggacctgggcatccaggtggataggtacattgcctccgaggtgtgcgaggactccatcaccgtgggaatggtgcgtcatcagggcaagatcatgtacgtgggcgacgtgcggagcgtgacacagaagcatatccaggagtggggccctttcgacctggtgatcggcggcagcccttgcaatgacctgagcatcgtgaacccagcccggaagggcctgtacgagggaaccggcagactgttcttcgagttttacagactgctgcacgacgcccggcctaaggaaggcgacgaccggcccttcttttggctgttcgagaatgtggtggccatgggagtcagcgacaagcgggatattagccggttcctggagagcaaccccgtgatgatcgatgccaaggaagtgagcgccgcccaccgggccagatacttctggggcaatctgcctggcatgaacagacccctggccagcaccgtgaacgacaagctggagctgcaggagtgcctggagcacggccggatcgccaagttcagcaaggtgagaaccatcaccacccgaagcaacagcatcaaacaaggcaaggaccagcactttcctgtgttcatgaacgagaaggaggacatcctgtggtgtaccgagatggagagagtgttcgggttcccagtccactacacagatgtcagcaacatgtctagactggccagacagagactgctgggaagaagctggtccgtccctgtgatcagacacctgttcgcccctctgaaggagtacttcgcctgcgtgagcagcggcaacagcaacgccaacagccggggccccagcttctctagcggcctggtgccactgtccctgagagggagccacatgggccccatggagatctacaaaaccgtgagcgcctggaagcggcagcctgtgcgcgtgctgagcctgtttcggaatatcgataaagtcctgaaaagcctgggattcctggagagcggctctggctccggcggtggcaccctgaagtacgtggaggatgtgacaaacgtggtcagacgggatgtggagaagtggggccccttcgatctggtgtacggcagcacccaacccctgggcagctcttgtgaccggtgccctggctggtacatgtttcagttccaccggatcctgcagtacgccctgccgagacaggagtcccagcggccattcttttggattttcatggacaacttgctgctgaccgaggatgaccaggaaactaccactcggttcctgcagaccgaagccgtgaccctgcaggacgtgagaggccgggactaccagaacgccatgcgggtgtggtccaacatccctggactgaaaagcaagcacgcacctctgacccctaaagaagaggagtacctgcaggcccaggtgcggagcagaagcaagctggacgcccctaaggtggatctgctggtgaagaattgcctcctgcccctgagagagtacttcaagtatttcagccagaatagtctgcccctgggaggcagcggcggcggcgccctggtgacatttgaggacgtcgccgtgcggttcacccaggaggaatgggctctgctggatccttctcagaaaatcctgtaccgggacgtgatgagagagacataccggaatctgacctccgtgggcatcaactgggaatgttgggaccttgaagcctgcttcagaagcctgggaagaaacctgagagtgcaggtggtgaagagaaagtgcgagctgaccaacagcggcccctgcgccgagggcggcccaagcagcggcgcccctcctcccagcggcggcagcccagccggctccccaacctctaccgaggagggcacctctgagtccgccacccccgagagcggccctggcacctccaccgagcccagcgagggcagcgcacccggcagccctgccggcagccccacctccacagaggagggaaccagcaccgagcccagcgaaggcagcgccccaggcaccagcaccgagcctagtgagcaggagattaaacggatcaacaagatcagaagaagacttgtgaaagacagcaacaccaagaaggccggcaagacaggccccatgaaaaccctgctggttagagtgatgacacccgatctgagagagcggctggaaaacctgagaaagaagcctgaaaatatcccccagcccatcagcaatacatctagagccaacctgaataagctgctgaccgattacaccgaaatgaagaaggcgatcctgcatgtgtactgggaagagttccagaaggaccctgtgggcctgatgagccgggtggcccagcctgccagcaagaagatcgatcagaacaagctgaaacctgagatggacgagaagggcaacctgaccaccgccggctttgcctgctctcagtgtggccagcccctgttcgtgtacaagctggagcaggtgtctgagaagggcaaggcttacaccaactacttcggacggtgcaatgtggccgagcacgaaaagctgatcctgctggcccagctgaagcccgagaaggatagcgacgaagccgtgacatatagcctgggaaagtttgggcagagggccctggatttctacagcattcatgtgaccaaggagtccacccaccccgtgaagcccctggcccagatcgccggaaacagatacgcctccggacctgtgggaaaggccctgagcgacgcatgtatgggcacaatcgcctccttcctgtctaagtaccaggacatcatcatcgaacaccagaaggtggtgaagggcaaccagaagagactggagagcctgcgggagctggccggcaaggaaaacctggaataccctagcgtgaccctgccacctcagcctcacaccaaggagggcgttgatgcctacaacgaagtgatcgcccgggtgcgaatgtgggtgaacctgaacctgtggcagaagctgaagctaagcagagatgatgccaagcctctgctgagactgaagggattcccttcctttcctctggtcgagagacaggccaacgaagtggactggtgggacatggtgtgtaacgtgaagaagctgatcaacgagaaaaaggaggatggcaaggtgttttggcagaatctggctggctacaagagacaggaagccctgagaccatacctgagcagcgaggaagatcggaagaagggaaagaaattcgctcggtaccagctgggcgacctgctgctgcacctggaaaagaagcacggcgaggactggggaaaggtgtacgacgaggcctgggagcggattgacaagaaagtggaaggcctgagcaagcacatcaagctggaagaggaacggagaagcgaggacgcccagagcaaggccgccctgaccgactggctgcgggctaaggccagcttcgtgatcgagggcctgaaggaggccgacaaggacgagttctgcagatgcgagctgaagctgcagaagtggtacggggacctgcggggaaagcccttcgccatcgaagccgagaacagcatcctggacatcagcggcttcagcaagcagtacaactgtgccttcatctggcagaaggacggcgtgaagaagctgaacctgtacctgatcatcaactacttcaagggcggcaagctgcggttcaagaagatcaaacctgaagccttcgaagccaacagattctacaccgtgatcaacaaaaagagcggcgagatcgtgcccatggaggtgaacttcaacttcgacgaccccaacctgatcatcctgcctctggcctttggcaagagacagggcagagaattcatctggaacgacctgctgtccctggaaaccggcagcctgaagctggccaacggaagagtgatcgagaagacactgtacaacagaagaacccggcaggatgagcctgccctgttcgtggccctgaccttcgagcggcgggaggtcctggactcctccaatatcaaaccaatgaacctgatcggcgtggcaagaggcgaaaacatccccgccgtgatcgccctgaccgaccccgagggctgcccactgagccggtttaaggatagcctgggaaacccaacccacatcctgagaatcggcgagagctataaggagaagcagcggaccatccaggccaagaaggaggtggagcagcggagagccggcggctacagccggaagtacgccagcaaagccaagaatctggcagacgatatggtgagaaacaccgctagagatctgctgtactacgccgtgacccaggatgccatgctgatcttcgccaacctgagccggggcttcggccggcagggcaagcggaccttcatggccgagagacagtacacacggatggaggactggctgaccgccaagctggcctacgagggcctgagcaagacctacctgtccaagacactggcccagtacacctccaagacatgcagcaactgtgggtttaccatcaccagcgccgactacgacagggtgctggagaagctgaagaagacagcaacaggctggatgaccacaattaacggcaaggagctgaaggtggagggccagattacctactacaacagatacaagagacagaacgtagtcaaggacctgtccgtcgagctggatagactgagcgaagaatctgtgaacaacgacatctcctcctggacaaagggcagaagcggagaagctctgagcctcctgaagaaaagattctcccatagacccgtgcaggagaagttcgtgtgcctgaactgcggcttcgagacacacgcagccgagcaagccgccctgaacatcgccagatcctggctgttcctgcggagccaggagtacaagaaataccagacaaacaagacaaccggcaacaccgataagagagccttcgtcgagacctggcagtccttttaccggaagaagcttaaggaggtgtggaaacctgccgtgcggtctggcggatctggcggaggctccatggagggcctggtgatgttccaggacctgttcatcgacttcagccaggaggagtgggagtgcctggacgccgcccagaaggacctgtacagggacgtgatgatggagaactacagcagcctggtgagcctgggcctgtgcatccccaagcccgacgtgatcagcctgctggagcagggcaaggagccctggatggtgagcagggacgtgctgggcggctggtgccccgacaggctgaagaagggcggcccaagcagcggcgcccctcctcccagcggcggcagcccagccggctccccaacctctaccgaggagggcacctctgagtccgccacccccgagagcggccctggcacctccaccgagcccagcgagggcagcgcacccggcagccctgccggcagccccacctccacagaggagggaaccagcaccgagcccagcgaaggcagcgccccaggcaccagcaccgagcctagtgagcaggagattaaacggatcaacaagatcagaagaagacttgtgaaagacagcaacaccaagaaggccggcaagacaggccccatgaaaaccctgctggttagagtgatgacacccgatctgagagagcggctggaaaacctgagaaagaagcctgaaaatatcccccagcccatcagcaatacatctagagccaacctgaataagctgctgaccgattacaccgaaatgaagaaggcgatcctgcatgtgtactgggaagagttccagaaggaccctgtgggcctgatgagccgggtggcccagcctgccagcaagaagatcgatcagaacaagctgaaacctgagatggacgagaagggcaacctgaccaccgccggctttgcctgctctcagtgtggccagcccctgttcgtgtacaagctggagcaggtgtctgagaagggcaaggcttacaccaactacttcggacggtgcaatgtggccgagcacgaaaagctgatcctgctggcccagctgaagcccgagaaggatagcgacgaagccgtgacatatagcctgggaaagtttgggcagagggccctggatttctacagcattcatgtgaccaaggagtccacccaccccgtgaagcccctggcccagatcgccggaaacagatacgcctccggacctgtgggaaaggccctgagcgacgcatgtatgggcacaatcgcctccttcctgtctaagtaccaggacatcatcatcgaacaccagaaggtggtgaagggcaaccagaagagactggagagcctgcgggagctggccggcaaggaaaacctggaataccctagcgtgaccctgccacctcagcctcacaccaaggagggcgttgatgcctacaacgaagtgatcgcccgggtgcgaatgtgggtgaacctgaacctgtggcagaagctgaagctaagcagagatgatgccaagcctctgctgagactgaagggattcccttcctttcctctggtcgagagacaggccaacgaagtggactggtgggacatggtgtgtaacgtgaagaagctgatcaacgagaaaaaggaggatggcaaggtgttttggcagaatctggctggctacaagagacaggaagccctgagaccatacctgagcagcgaggaagatcggaagaagggaaagaaattcgctcggtaccagctgggcgacctgctgctgcacctggaaaagaagcacggcgaggactggggaaaggtgtacgacgaggcctgggagcggattgacaagaaagtggaaggcctgagcaagcacatcaagctggaagaggaacggagaagcgaggacgcccagagcaaggccgccctgaccgactggctgcgggctaaggccagcttcgtgatcgagggcctgaaggaggccgacaaggacgagttctgcagatgcgagctgaagctgcagaagtggtacggggacctgcggggaaagcccttcgccatcgaagccgagaacagcatcctggacatcagcggcttcagcaagcagtacaactgtgccttcatctggcagaaggacggcgtgaagaagctgaacctgtacctgatcatcaactacttcaagggcggcaagctgcggttcaagaagatcaaacctgaagccttcgaagccaacagattctacaccgtgatcaacaaaaagagcggcgagatcgtgcccatggaggtgaacttcaacttcgacgaccccaacctgatcatcctgcctctggcctttggcaagagacagggcagagaattcatctggaacgacctgctgtccctggaaaccggcagcctgaagctggccaacggaagagtgatcgagaagacactgtacaacagaagaacccggcaggatgagcctgccctgttcgtggccctgaccttcgagcggcgggaggtcctggactcctccaatatcaaaccaatgaacctgatcggcgtggcaagaggcgaaaacatccccgccgtgatcgccctgaccgaccccgagggctgcccactgagccggtttaaggatagcctgggaaacccaacccacatcctgagaatcggcgagagctataaggagaagcagcggaccatccaggccaagaaggaggtggagcagcggagagccggcggctacagccggaagtacgccagcaaagccaagaatctggcagacgatatggtgagaaacaccgctagagatctgctgtactacgccgtgacccaggatgccatgctgatcttcgccaacctgagccggggcttcggccggcagggcaagcggaccttcatggccgagagacagtacacacggatggaggactggctgaccgccaagctggcctacgagggcctgagcaagacctacctgtccaagacactggcccagtacacctccaagacatgcagcaactgtgggtttaccatcaccagcgccgactacgacagggtgctggagaagctgaagaagacagcaacaggctggatgaccacaattaacggcaaggagctgaaggtggagggccagattacctactacaacagatacaagagacagaacgtagtcaaggacctgtccgtcgagctggatagactgagcgaagaatctgtgaacaacgacatctcctcctggacaaagggcagaagcggagaagctctgagcctcctgaagaaaagattctcccatagacccgtgcaggagaagttcgtgtgcctgaactgcggcttcgagacacacgcagccgagcaagccgccctgaacatcgccagatcctggctgttcctgcggagccaggagtacaagaaataccagacaaacaagacaaccggcaacaccgataagagagccttcgtcgagacctggcagtccttttaccggaagaagcttaaggaggtgtggaaacctgccgtgcggtctggcggatctggcggaggctcctatggagggcctggtgatgttccaggacctgttcatcgacttcagccaggaggagtgggagtgcctggacgccgcccagaaggacctgtacagggacgtgatgatggagaactacagcagcctggtgagcctgggcctgtgcatccccaagcccgacgtgatcagcctgctggagcagggcaaggagccctggatggtgagcagggacgtgctgggcggctggtgccccgacaggctgaagaagggatctggctccggcagcggccccaagaaaaagagaaaagtctaagctgccttctgcggggcttgccttctggccatgcccttcttctctcccttgcacctgtacctcttggtctttgaataaagcctgagtaggaaggctagcaaaaaaaaaaaaaaaaaaaaaaaaaaaaaaaaaaaaaaaaaaaaaaaaaaaaaaaaaaaaaaaaaaaaaaaaaaaaaaaa

SEQ ID NO: 15777 - RNA, 9485 nt, synthetic construct
  source 1..9485: mol_type = other RNA
aggaaataagagagaaaagaagagtaagaagaaatataagagccaccatggcccctaagaagaagcgtaaagtgagccggatggaacgcctcgtctacgaggtgcggcagaagtgcagaaacatcgaggacatctgcatctcctgcggatctctgaacgtgaccctggagcacccactgttcatcggcggcatgtgccagaactgtaaaaactgttttctggagtgtgcctatcaatacgacgatgacggctaccagagctactgcaccatctgttgcggcggaagagaggtgctgatgtgtggaaataacaactgctgccggtgcttctgcgtggaatgcgtggacctgctggtgggccccggcgccgcccaggccgctattaaggaagatccttggaactgctacatgtgcggccacaagggcacatacggcctgctgagacggagagaggactggcctagcagactgcagatgttcttcgccaataaccacgaccaggagttcgacccccctaaggtgtaccctcccgtccccgccgagaagagaaagcccatccgggtcctgagcctgttcgatggcatcgccaccggtctgctggtgctgaaggacctgggcatccaggtggataggtacattgcctccgaggtgtgcgaggactccatcaccgtgggaatggtgcgtcatcagggcaagatcatgtacgtgggcgacgtgcggagcgtgacacagaagcatatccaggagtggggccctttcgacctggtgatcggcggcagcccttgcaatgacctgagcatcgtgaacccagcccggaagggcctgtacgagggaaccggcagactgttcttcgagttttacagactgctgcacgacgcccggcctaaggaaggcgacgaccggcccttcttttggctgttcgagaatgtggtggccatgggagtcagcgacaagcgggatattagccggttcctggagagcaaccccgtgatgatcgatgccaaggaagtgagcgccgcccaccgggccagatacttctggggcaatctgcctggcatgaacagacccctggccagcaccgtgaacgacaagctggagctgcaggagtgcctggagcacggccggatcgccaagttcagcaaggtgagaaccatcaccacccgaagcaacagcatcaaacaaggcaaggaccagcactttcctgtgttcatgaacgagaaggaggacatcctgtggtgtaccgagatggagagagtgttcgggttcccagtccactacacagatgtcagcaacatgtctagactggccagacagagactgctgggaagaagctggtccgtccctgtgatcagacacctgttcgcccctctgaaggagtacttcgcctgcgtgagcagcggcaacagcaacgccaacagccggggccccagcttctctagcggcctggtgccactgtccctgagagggagccacatgggccccatggagatctacaaaaccgtgagcgcctggaagcggcagcctgtgcgcgtgctgagcctgtttcggaatatcgataaagtcctgaaaagcctgggattcctggagagcggctctggctccggcggtggcaccctgaagtacgtggaggatgtgacaaacgtggtcagacgggatgtggagaagtggggccccttcgatctggtgtacggcagcacccaacccctgggcagctcttgtgaccggtgccctggctggtacatgtttcagttccaccggatcctgcagtacgccctgccgagacaggagtcccagcggccattcttttggattttcatggacaacttgctgctgaccgaggatgaccaggaaactaccactcggttcctgcagaccgaagccgtgaccctgcaggacgtgagaggccgggactaccagaacgccatgcgggtgtggtccaacatccctggactgaaaagcaagcacgcacctctgacccctaaagaagaggagtacctgcaggcccaggtgcggagcagaagcaagctggacgcccctaaggtggatctgctggtgaagaattgcctcctgcccctgagagagtacttcaagtatttcagccagaatagtctgcccctgggaggcagcggcggcggcgccctggtgacatttgaggacgtcgccgtgcggttcacccaggaggaatgggctctgctggatccttctcagaaaatcctgtaccgggacgtgatgagagagacataccggaatctgacctccgtgggcatcaactgggaatgttgggaccttgaagcctgcttcagaagcctgggaagaaacctgagagtgcaggtggtgaagagaaagtgcgagctgaccaacagcggcccctgcgccgagggcggcccaagcagcggcgcccctcctcccagcggcggcagcccagccggctccccaacctctaccgaggagggcacctctgagtccgccacccccgagagcggccctggcacctccaccgagcccagcgagggcagcgcacccggcagccctgccggcagccccacctccacagaggagggaaccagcaccgagcccagcgaaggcagcgccccaggcaccagcaccgagcctagtgagcaggagattaaacggatcaacaagatcagaagaagacttgtgaaagacagcaacaccaagaaggccggcaagacaggccccatgaaaaccctgctggttagagtgatgacacccgatctgagagagcggctggaaaacctgagaaagaagcctgaaaatatcccccagcccatcagcaatacatctagagccaacctgaataagctgctgaccgattacaccgaaatgaagaaggcgatcctgcatgtgtactgggaagagttccagaaggaccctgtgggcctgatgagccgggtggcccagcctgccagcaagaagatcgatcagaacaagctgaaacctgagatggacgagaagggcaacctgaccaccgccggctttgcctgctctcagtgtggccagcccctgttcgtgtacaagctggagcaggtgtctgagaagggcaaggcttacaccaactacttcggacggtgcaatgtggccgagcacgaaaagctgatcctgctggcccagctgaagcccgagaaggatagcgacgaagccgtgacatatagcctgggaaagtttgggcagagggccctggatttctacagcattcatgtgaccaaggagtccacccaccccgtgaagcccctggcccagatcgccggaaacagatacgcctccggacctgtgggaaaggccctgagcgacgcatgtatgggcacaatcgcctccttcctgtctaagtaccaggacatcatcatcgaacaccagaaggtggtgaagggcaaccagaagagactggagagcctgcgggagctggccggcaaggaaaacctggaataccctagcgtgaccctgccacctcagcctcacaccaaggagggcgttgatgcctacaacgaagtgatcgcccgggtgcgaatgtgggtgaacctgaacctgtggcagaagctgaagctaagcagagatgatgccaagcctctgctgagactgaagggattcccttcctttcctctggtcgagagacaggccaacgaagtggactggtgggacatggtgtgtaacgtgaagaagctgatcaacgagaaaaaggaggatggcaaggtgttttggcagaatctggctggctacaagagacaggaagccctgagaccatacctgagcagcgaggaagatcggaagaagggaaagaaattcgctcggtaccagctgggcgacctgctgctgcacctggaaaagaagcacggcgaggactggggaaaggtgtacgacgaggcctgggagcggattgacaagaaagtggaaggcctgagcaagcacatcaagctggaagaggaacggagaagcgaggacgcccagagcaaggccgccctgaccgactggctgcgggctaaggccagcttcgtgatcgagggcctgaaggaggccgacaaggacgagttctgcagatgcgagctgaagctgcagaagtggtacggggacctgcggggaaagcccttcgccatcgaagccgagaacagcatcctggacatcagcggcttcagcaagcagtacaactgtgccttcatctggcagaaggacggcgtgaagaagctgaacctgtacctgatcatcaactacttcaagggcggcaagctgcggttcaagaagatcaaacctgaagccttcgaagccaacagattctacaccgtgatcaacaaaaagagcggcgagatcgtgcccatggaggtgaacttcaacttcgacgaccccaacctgatcatcctgcctctggcctttggcaagagacagggcagagaattcatctggaacgacctgctgtccctggaaaccggcagcctgaagctggccaacggaagagtgatcgagaagacactgtacaacagaagaacccggcaggatgagcctgccctgttcgtggccctgaccttcgagcggcgggaggtcctggactcctccaatatcaaaccaatgaacctgatcggcgtggcaagaggcgaaaacatccccgccgtgatcgccctgaccgaccccgagggctgcccactgagccggtttaaggatagcctgggaaacccaacccacatcctgagaatcggcgagagctataaggagaagcagcggaccatccaggccaagaaggaggtggagcagcggagagccggcggctacagccggaagtacgccagcaaagccaagaatctggcagacgatatggtgagaaacaccgctagagatctgctgtactacgccgtgacccaggatgccatgctgatcttcgccaacctgagccggggcttcggccggcagggcaagcggaccttcatggccgagagacagtacacacggatggaggactggctgaccgccaagctggcctacgagggcctgagcaagacctacctgtccaagacactggcccagtacacctccaagacatgcagcaactgtgggtttaccatcaccagcgccgactacgacagggtgctggagaagctgaagaagacagcaacaggctggatgaccacaattaacggcaaggagctgaaggtggagggccagattacctactacaacagatacaagagacagaacgtagtcaaggacctgtccgtcgagctggatagactgagcgaagaatctgtgaacaacgacatctcctcctggacaaagggcagaagcggagaagctctgagcctcctgaagaaaagattctcccatagacccgtgcaggagaagttcgtgtgcctgaactgcggcttcgagacacacgcagccgagcaagccgccctgaacatcgccagatcctggctgttcctgcggagccaggagtacaagaaataccagacaaacaagacaaccggcaacaccgataagagagccttcgtcgagacctggcagtccttttaccggaagaagcttaaggaggtgtggaaacctgccgtgcggtctggcggatctggcggaggctccccccaggccagcgtgagcttcaaggacgtgaccgtggagttcacccaggaggagtggtggcagatggacagcgcccagaggaccctgtacagggacgtgatgctggagaactacagccacctggtgagcgtgggctactgcttcaccaagcccgagctgatcttcatgctggagcagggcgaggacccctggctgctggagaaggagttcgtgaacaggagcagccccgaggagagccagcccggcggcccaagcagcggcgcccctcctcccagcggcggcagcccagccggctccccaacctctaccgaggagggcacctctgagtccgccacccccgagagcggccctggcacctccaccgagcccagcgagggcagcgcacccggcagccctgccggcagccccacctccacagaggagggaaccagcaccgagcccagcgaaggcagcgccccaggcaccagcaccgagcctagtgagcaggagattaaacggatcaacaagatcagaagaagacttgtgaaagacagcaacaccaagaaggccggcaagacaggccccatgaaaaccctgctggttagagtgatgacacccgatctgagagagcggctggaaaacctgagaaagaagcctgaaaatatcccccagcccatcagcaatacatctagagccaacctgaataagctgctgaccgattacaccgaaatgaagaaggcgatcctgcatgtgtactgggaagagttccagaaggaccctgtgggcctgatgagccgggtggcccagcctgccagcaagaagatcgatcagaacaagctgaaacctgagatggacgagaagggcaacctgaccaccgccggctttgcctgctctcagtgtggccagcccctgttcgtgtacaagctggagcaggtgtctgagaagggcaaggcttacaccaactacttcggacggtgcaatgtggccgagcacgaaaagctgatcctgctggcccagctgaagcccgagaaggatagcgacgaagccgtgacatatagcctgggaaagtttgggcagagggccctggatttctacagcattcatgtgaccaaggagtccacccaccccgtgaagcccctggcccagatcgccggaaacagatacgcctccggacctgtgggaaaggccctgagcgacgcatgtatgggcacaatcgcctccttcctgtctaagtaccaggacatcatcatcgaacaccagaaggtggtgaagggcaaccagaagagactggagagcctgcgggagctggccggcaaggaaaacctggaataccctagcgtgaccctgccacctcagcctcacaccaaggagggcgttgatgcctacaacgaagtgatcgcccgggtgcgaatgtgggtgaacctgaacctgtggcagaagctgaagctaagcagagatgatgccaagcctctgctgagactgaagggattcccttcctttcctctggtcgagagacaggccaacgaagtggactggtgggacatggtgtgtaacgtgaagaagctgatcaacgagaaaaaggaggatggcaaggtgttttggcagaatctggctggctacaagagacaggaagccctgagaccatacctgagcagcgaggaagatcggaagaagggaaagaaattcgctcggtaccagctgggcgacctgctgctgcacctggaaaagaagcacggcgaggactggggaaaggtgtacgacgaggcctgggagcggattgacaagaaagtggaaggcctgagcaagcacatcaagctggaagaggaacggagaagcgaggacgcccagagcaaggccgccctgaccgactggctgcgggctaaggccagcttcgtgatcgagggcctgaaggaggccgacaaggacgagttctgcagatgcgagctgaagctgcagaagtggtacggggacctgcggggaaagcccttcgccatcgaagccgagaacagcatcctggacatcagcggcttcagcaagcagtacaactgtgccttcatctggcagaaggacggcgtgaagaagctgaacctgtacctgatcatcaactacttcaagggcggcaagctgcggttcaagaagatcaaacctgaagccttcgaagccaacagattctacaccgtgatcaacaaaaagagcggcgagatcgtgcccatggaggtgaacttcaacttcgacgaccccaacctgatcatcctgcctctggcctttggcaagagacagggcagagaattcatctggaacgacctgctgtccctggaaaccggcagcctgaagctggccaacggaagagtgatcgagaagacactgtacaacagaagaacccggcaggatgagcctgccctgttcgtggccctgaccttcgagcggcgggaggtcctggactcctccaatatcaaaccaatgaacctgatcggcgtggcaagaggcgaaaacatccccgccgtgatcgccctgaccgaccccgagggctgcccactgagccggtttaaggatagcctgggaaacccaacccacatcctgagaatcggcgagagctataaggagaagcagcggaccatccaggccaagaaggaggtggagcagcggagagccggcggctacagccggaagtacgccagcaaagccaagaatctggcagacgatatggtgagaaacaccgctagagatctgctgtactacgccgtgacccaggatgccatgctgatcttcgccaacctgagccggggcttcggccggcagggcaagcggaccttcatggccgagagacagtacacacggatggaggactggctgaccgccaagctggcctacgagggcctgagcaagacctacctgtccaagacactggcccagtacacctccaagacatgcagcaactgtgggtttaccatcaccagcgccgactacgacagggtgctggagaagctgaagaagacagcaacaggctggatgaccacaattaacggcaaggagctgaaggtggagggccagattacctactacaacagatacaagagacagaacgtagtcaaggacctgtccgtcgagctggatagactgagcgaagaatctgtgaacaacgacatctcctcctggacaaagggcagaagcggagaagctctgagcctcctgaagaaaagattctcccatagacccgtgcaggagaagttcgtgtgcctgaactgcggcttcgagacacacgcagccgagcaagccgccctgaacatcgccagatcctggctgttcctgcggagccaggagtacaagaaataccagacaaacaagacaaccggcaacaccgataagagagccttcgtcgagacctggcagtccttttaccggaagaagcttaaggaggtgtggaaacctgccgtgcggtctggcggatctggcggaggctcctccccaggccagcgtgagcttcaaggacgtgaccgtggagttcacccaggaggagtggtggcagatggacagcgcccagaggaccctgtacagggacgtgatgctggagaactacagccacctggtgagcgtgggctactgcttcaccaagcccgagctgatcttcatgctggagcagggcgaggacccctggctgctggagaaggagttcgtgaacaggagcagccccgaggagagccagcccggatctggctccggcagcggccccaagaaaaagagaaaagtctaagctgccttctgcggggcttgccttctggccatgcccttcttctctcccttgcacctgtacctcttggtctttgaataaagcctgagtaggaaggctagcaaaaaaaaaaaaaaaaaaaaaaaaaaaaaaaaaaaaaaaaaaaaaaaaaaaaaaaaaaaaaaaaaaaaaaaaaaaaaaaa

SEQ ID NO: 15778 - RNA, 9485 nt, synthetic construct
  source 1..9485: mol_type = other RNA
aggaaataagagagaaaagaagagtaagaagaaatataagagccaccatggcccctaagaagaagcgtaaagtgagccggatggaacgcctcgtctacgaggtgcggcagaagtgcagaaacatcgaggacatctgcatctcctgcggatctctgaacgtgaccctggagcacccactgttcatcggcggcatgtgccagaactgtaaaaactgttttctggagtgtgcctatcaatacgacgatgacggctaccagagctactgcaccatctgttgcggcggaagagaggtgctgatgtgtggaaataacaactgctgccggtgcttctgcgtggaatgcgtggacctgctggtgggccccggcgccgcccaggccgctattaaggaagatccttggaactgctacatgtgcggccacaagggcacatacggcctgctgagacggagagaggactggcctagcagactgcagatgttcttcgccaataaccacgaccaggagttcgacccccctaaggtgtaccctcccgtccccgccgagaagagaaagcccatccgggtcctgagcctgttcgatggcatcgccaccggtctgctggtgctgaaggacctgggcatccaggtggataggtacattgcctccgaggtgtgcgaggactccatcaccgtgggaatggtgcgtcatcagggcaagatcatgtacgtgggcgacgtgcggagcgtgacacagaagcatatccaggagtggggccctttcgacctggtgatcggcggcagcccttgcaatgacctgagcatcgtgaacccagcccggaagggcctgtacgagggaaccggcagactgttcttcgagttttacagactgctgcacgacgcccggcctaaggaaggcgacgaccggcccttcttttggctgttcgagaatgtggtggccatgggagtcagcgacaagcgggatattagccggttcctggagagcaaccccgtgatgatcgatgccaaggaagtgagcgccgcccaccgggccagatacttctggggcaatctgcctggcatgaacagacccctggccagcaccgtgaacgacaagctggagctgcaggagtgcctggagcacggccggatcgccaagttcagcaaggtgagaaccatcaccacccgaagcaacagcatcaaacaaggcaaggaccagcactttcctgtgttcatgaacgagaaggaggacatcctgtggtgtaccgagatggagagagtgttcgggttcccagtccactacacagatgtcagcaacatgtctagactggccagacagagactgctgggaagaagctggtccgtccctgtgatcagacacctgttcgcccctctgaaggagtacttcgcctgcgtgagcagcggcaacagcaacgccaacagccggggccccagcttctctagcggcctggtgccactgtccctgagagggagccacatgggccccatggagatctacaaaaccgtgagcgcctggaagcggcagcctgtgcgcgtgctgagcctgtttcggaatatcgataaagtcctgaaaagcctgggattcctggagagcggctctggctccggcggtggcaccctgaagtacgtggaggatgtgacaaacgtggtcagacgggatgtggagaagtggggccccttcgatctggtgtacggcagcacccaacccctgggcagctcttgtgaccggtgccctggctggtacatgtttcagttccaccggatcctgcagtacgccctgccgagacaggagtcccagcggccattcttttggattttcatggacaacttgctgctgaccgaggatgaccaggaaactaccactcggttcctgcagaccgaagccgtgaccctgcaggacgtgagaggccgggactaccagaacgccatgcgggtgtggtccaacatccctggactgaaaagcaagcacgcacctctgacccctaaagaagaggagtacctgcaggcccaggtgcggagcagaagcaagctggacgcccctaaggtggatctgctggtgaagaattgcctcctgcccctgagagagtacttcaagtatttcagccagaatagtctgcccctgggaggcagcggcggcggcgccctggtgacatttgaggacgtcgccgtgcggttcacccaggaggaatgggctctgctggatccttctcagaaaatcctgtaccgggacgtgatgagagagacataccggaatctgacctccgtgggcatcaactgggaatgttgggaccttgaagcctgcttcagaagcctgggaagaaacctgagagtgcaggtggtgaagagaaagtgcgagctgaccaacagcggcccctgcgccgagggcggcccaagcagcggcgcccctcctcccagcggcggcagcccagccggctccccaacctctaccgaggagggcacctctgagtccgccacccccgagagcggccctggcacctccaccgagcccagcgagggcagcgcacccggcagccctgccggcagccccacctccacagaggagggaaccagcaccgagcccagcgaaggcagcgccccaggcaccagcaccgagcctagtgagcaggagattaaacggatcaacaagatcagaagaagacttgtgaaagacagcaacaccaagaaggccggcaagacaggccccatgaaaaccctgctggttagagtgatgacacccgatctgagagagcggctggaaaacctgagaaagaagcctgaaaatatcccccagcccatcagcaatacatctagagccaacctgaataagctgctgaccgattacaccgaaatgaagaaggcgatcctgcatgtgtactgggaagagttccagaaggaccctgtgggcctgatgagccgggtggcccagcctgccagcaagaagatcgatcagaacaagctgaaacctgagatggacgagaagggcaacctgaccaccgccggctttgcctgctctcagtgtggccagcccctgttcgtgtacaagctggagcaggtgtctgagaagggcaaggcttacaccaactacttcggacggtgcaatgtggccgagcacgaaaagctgatcctgctggcccagctgaagcccgagaaggatagcgacgaagccgtgacatatagcctgggaaagtttgggcagagggccctggatttctacagcattcatgtgaccaaggagtccacccaccccgtgaagcccctggcccagatcgccggaaacagatacgcctccggacctgtgggaaaggccctgagcgacgcatgtatgggcacaatcgcctccttcctgtctaagtaccaggacatcatcatcgaacaccagaaggtggtgaagggcaaccagaagagactggagagcctgcgggagctggccggcaaggaaaacctggaataccctagcgtgaccctgccacctcagcctcacaccaaggagggcgttgatgcctacaacgaagtgatcgcccgggtgcgaatgtgggtgaacctgaacctgtggcagaagctgaagctaagcagagatgatgccaagcctctgctgagactgaagggattcccttcctttcctctggtcgagagacaggccaacgaagtggactggtgggacatggtgtgtaacgtgaagaagctgatcaacgagaaaaaggaggatggcaaggtgttttggcagaatctggctggctacaagagacaggaagccctgagaccatacctgagcagcgaggaagatcggaagaagggaaagaaattcgctcggtaccagctgggcgacctgctgctgcacctggaaaagaagcacggcgaggactggggaaaggtgtacgacgaggcctgggagcggattgacaagaaagtggaaggcctgagcaagcacatcaagctggaagaggaacggagaagcgaggacgcccagagcaaggccgccctgaccgactggctgcgggctaaggccagcttcgtgatcgagggcctgaaggaggccgacaaggacgagttctgcagatgcgagctgaagctgcagaagtggtacggggacctgcggggaaagcccttcgccatcgaagccgagaacagcatcctggacatcagcggcttcagcaagcagtacaactgtgccttcatctggcagaaggacggcgtgaagaagctgaacctgtacctgatcatcaactacttcaagggcggcaagctgcggttcaagaagatcaaacctgaagccttcgaagccaacagattctacaccgtgatcaacaaaaagagcggcgagatcgtgcccatggaggtgaacttcaacttcgacgaccccaacctgatcatcctgcctctggcctttggcaagagacagggcagagaattcatctggaacgacctgctgtccctggaaaccggcagcctgaagctggccaacggaagagtgatcgagaagacactgtacaacagaagaacccggcaggatgagcctgccctgttcgtggccctgaccttcgagcggcgggaggtcctggactcctccaatatcaaaccaatgaacctgatcggcgtggcaagaggcgaaaacatccccgccgtgatcgccctgaccgaccccgagggctgcccactgagccggtttaaggatagcctgggaaacccaacccacatcctgagaatcggcgagagctataaggagaagcagcggaccatccaggccaagaaggaggtggagcagcggagagccggcggctacagccggaagtacgccagcaaagccaagaatctggcagacgatatggtgagaaacaccgctagagatctgctgtactacgccgtgacccaggatgccatgctgatcttcgccaacctgagccggggcttcggccggcagggcaagcggaccttcatggccgagagacagtacacacggatggaggactggctgaccgccaagctggcctacgagggcctgagcaagacctacctgtccaagacactggcccagtacacctccaagacatgcagcaactgtgggtttaccatcaccagcgccgactacgacagggtgctggagaagctgaagaagacagcaacaggctggatgaccacaattaacggcaaggagctgaaggtggagggccagattacctactacaacagatacaagagacagaacgtagtcaaggacctgtccgtcgagctggatagactgagcgaagaatctgtgaacaacgacatctcctcctggacaaagggcagaagcggagaagctctgagcctcctgaagaaaagattctcccatagacccgtgcaggagaagttcgtgtgcctgaactgcggcttcgagacacacgcagccgagcaagccgccctgaacatcgccagatcctggctgttcctgcggagccaggagtacaagaaataccagacaaacaagacaaccggcaacaccgataagagagccttcgtcgagacctggcagtccttttaccggaagaagcttaaggaggtgtggaaacctgccgtgcggtctggcggatctggcggaggctccttccaggagctggtgaccttcagggacgtggccatcgacttcagcaggcaggagtgggagtacctggacagcgtgcagagggacctgtacagggacgtgatgctggagaactacaggaacctggtgagcctgggccacagcatcagcaagcccgacgtggtggacctgctggagcagggcaaggagccctggatgatcctgagggaggagacccagaggcagtacaccgacctggacctgcacggcggcccaagcagcggcgcccctcctcccagcggcggcagcccagccggctccccaacctctaccgaggagggcacctctgagtccgccacccccgagagcggccctggcacctccaccgagcccagcgagggcagcgcacccggcagccctgccggcagccccacctccacagaggagggaaccagcaccgagcccagcgaaggcagcgccccaggcaccagcaccgagcctagtgagcaggagattaaacggatcaacaagatcagaagaagacttgtgaaagacagcaacaccaagaaggccggcaagacaggccccatgaaaaccctgctggttagagtgatgacacccgatctgagagagcggctggaaaacctgagaaagaagcctgaaaatatcccccagcccatcagcaatacatctagagccaacctgaataagctgctgaccgattacaccgaaatgaagaaggcgatcctgcatgtgtactgggaagagttccagaaggaccctgtgggcctgatgagccgggtggcccagcctgccagcaagaagatcgatcagaacaagctgaaacctgagatggacgagaagggcaacctgaccaccgccggctttgcctgctctcagtgtggccagcccctgttcgtgtacaagctggagcaggtgtctgagaagggcaaggcttacaccaactacttcggacggtgcaatgtggccgagcacgaaaagctgatcctgctggcccagctgaagcccgagaaggatagcgacgaagccgtgacatatagcctgggaaagtttgggcagagggccctggatttctacagcattcatgtgaccaaggagtccacccaccccgtgaagcccctggcccagatcgccggaaacagatacgcctccggacctgtgggaaaggccctgagcgacgcatgtatgggcacaatcgcctccttcctgtctaagtaccaggacatcatcatcgaacaccagaaggtggtgaagggcaaccagaagagactggagagcctgcgggagctggccggcaaggaaaacctggaataccctagcgtgaccctgccacctcagcctcacaccaaggagggcgttgatgcctacaacgaagtgatcgcccgggtgcgaatgtgggtgaacctgaacctgtggcagaagctgaagctaagcagagatgatgccaagcctctgctgagactgaagggattcccttcctttcctctggtcgagagacaggccaacgaagtggactggtgggacatggtgtgtaacgtgaagaagctgatcaacgagaaaaaggaggatggcaaggtgttttggcagaatctggctggctacaagagacaggaagccctgagaccatacctgagcagcgaggaagatcggaagaagggaaagaaattcgctcggtaccagctgggcgacctgctgctgcacctggaaaagaagcacggcgaggactggggaaaggtgtacgacgaggcctgggagcggattgacaagaaagtggaaggcctgagcaagcacatcaagctggaagaggaacggagaagcgaggacgcccagagcaaggccgccctgaccgactggctgcgggctaaggccagcttcgtgatcgagggcctgaaggaggccgacaaggacgagttctgcagatgcgagctgaagctgcagaagtggtacggggacctgcggggaaagcccttcgccatcgaagccgagaacagcatcctggacatcagcggcttcagcaagcagtacaactgtgccttcatctggcagaaggacggcgtgaagaagctgaacctgtacctgatcatcaactacttcaagggcggcaagctgcggttcaagaagatcaaacctgaagccttcgaagccaacagattctacaccgtgatcaacaaaaagagcggcgagatcgtgcccatggaggtgaacttcaacttcgacgaccccaacctgatcatcctgcctctggcctttggcaagagacagggcagagaattcatctggaacgacctgctgtccctggaaaccggcagcctgaagctggccaacggaagagtgatcgagaagacactgtacaacagaagaacccggcaggatgagcctgccctgttcgtggccctgaccttcgagcggcgggaggtcctggactcctccaatatcaaaccaatgaacctgatcggcgtggcaagaggcgaaaacatccccgccgtgatcgccctgaccgaccccgagggctgcccactgagccggtttaaggatagcctgggaaacccaacccacatcctgagaatcggcgagagctataaggagaagcagcggaccatccaggccaagaaggaggtggagcagcggagagccggcggctacagccggaagtacgccagcaaagccaagaatctggcagacgatatggtgagaaacaccgctagagatctgctgtactacgccgtgacccaggatgccatgctgatcttcgccaacctgagccggggcttcggccggcagggcaagcggaccttcatggccgagagacagtacacacggatggaggactggctgaccgccaagctggcctacgagggcctgagcaagacctacctgtccaagacactggcccagtacacctccaagacatgcagcaactgtgggtttaccatcaccagcgccgactacgacagggtgctggagaagctgaagaagacagcaacaggctggatgaccacaattaacggcaaggagctgaaggtggagggccagattacctactacaacagatacaagagacagaacgtagtcaaggacctgtccgtcgagctggatagactgagcgaagaatctgtgaacaacgacatctcctcctggacaaagggcagaagcggagaagctctgagcctcctgaagaaaagattctcccatagacccgtgcaggagaagttcgtgtgcctgaactgcggcttcgagacacacgcagccgagcaagccgccctgaacatcgccagatcctggctgttcctgcggagccaggagtacaagaaataccagacaaacaagacaaccggcaacaccgataagagagccttcgtcgagacctggcagtccttttaccggaagaagcttaaggaggtgtggaaacctgccgtgcggtctggcggatctggcggaggctcctttccaggagctggtgaccttcagggacgtggccatcgacttcagcaggcaggagtgggagtacctggacagcgtgcagagggacctgtacagggacgtgatgctggagaactacaggaacctggtgagcctgggccacagcatcagcaagcccgacgtggtggacctgctggagcagggcaaggagccctggatgatcctgagggaggagacccagaggcagtacaccgacctggacctgcacggatctggctccggcagcggccccaagaaaaagagaaaagtctaagctgccttctgcggggcttgccttctggccatgcccttcttctctcccttgcacctgtacctcttggtctttgaataaagcctgagtaggaaggctagcaaaaaaaaaaaaaaaaaaaaaaaaaaaaaaaaaaaaaaaaaaaaaaaaaaaaaaaaaaaaaaaaaaaaaaaaaaaaaaaa

SEQ ID NO: 15779 - RNA, 9485 nt, synthetic construct
  source 1..9485: mol_type = other RNA
aggaaataagagagaaaagaagagtaagaagaaatataagagccaccatggcccctaagaagaagcgtaaagtgagccggatggaacgcctcgtctacgaggtgcggcagaagtgcagaaacatcgaggacatctgcatctcctgcggatctctgaacgtgaccctggagcacccactgttcatcggcggcatgtgccagaactgtaaaaactgttttctggagtgtgcctatcaatacgacgatgacggctaccagagctactgcaccatctgttgcggcggaagagaggtgctgatgtgtggaaataacaactgctgccggtgcttctgcgtggaatgcgtggacctgctggtgggccccggcgccgcccaggccgctattaaggaagatccttggaactgctacatgtgcggccacaagggcacatacggcctgctgagacggagagaggactggcctagcagactgcagatgttcttcgccaataaccacgaccaggagttcgacccccctaaggtgtaccctcccgtccccgccgagaagagaaagcccatccgggtcctgagcctgttcgatggcatcgccaccggtctgctggtgctgaaggacctgggcatccaggtggataggtacattgcctccgaggtgtgcgaggactccatcaccgtgggaatggtgcgtcatcagggcaagatcatgtacgtgggcgacgtgcggagcgtgacacagaagcatatccaggagtggggccctttcgacctggtgatcggcggcagcccttgcaatgacctgagcatcgtgaacccagcccggaagggcctgtacgagggaaccggcagactgttcttcgagttttacagactgctgcacgacgcccggcctaaggaaggcgacgaccggcccttcttttggctgttcgagaatgtggtggccatgggagtcagcgacaagcgggatattagccggttcctggagagcaaccccgtgatgatcgatgccaaggaagtgagcgccgcccaccgggccagatacttctggggcaatctgcctggcatgaacagacccctggccagcaccgtgaacgacaagctggagctgcaggagtgcctggagcacggccggatcgccaagttcagcaaggtgagaaccatcaccacccgaagcaacagcatcaaacaaggcaaggaccagcactttcctgtgttcatgaacgagaaggaggacatcctgtggtgtaccgagatggagagagtgttcgggttcccagtccactacacagatgtcagcaacatgtctagactggccagacagagactgctgggaagaagctggtccgtccctgtgatcagacacctgttcgcccctctgaaggagtacttcgcctgcgtgagcagcggcaacagcaacgccaacagccggggccccagcttctctagcggcctggtgccactgtccctgagagggagccacatgggccccatggagatctacaaaaccgtgagcgcctggaagcggcagcctgtgcgcgtgctgagcctgtttcggaatatcgataaagtcctgaaaagcctgggattcctggagagcggctctggctccggcggtggcaccctgaagtacgtggaggatgtgacaaacgtggtcagacgggatgtggagaagtggggccccttcgatctggtgtacggcagcacccaacccctgggcagctcttgtgaccggtgccctggctggtacatgtttcagttccaccggatcctgcagtacgccctgccgagacaggagtcccagcggccattcttttggattttcatggacaacttgctgctgaccgaggatgaccaggaaactaccactcggttcctgcagaccgaagccgtgaccctgcaggacgtgagaggccgggactaccagaacgccatgcgggtgtggtccaacatccctggactgaaaagcaagcacgcacctctgacccctaaagaagaggagtacctgcaggcccaggtgcggagcagaagcaagctggacgcccctaaggtggatctgctggtgaagaattgcctcctgcccctgagagagtacttcaagtatttcagccagaatagtctgcccctgggaggcagcggcggcggcgccctggtgacatttgaggacgtcgccgtgcggttcacccaggaggaatgggctctgctggatccttctcagaaaatcctgtaccgggacgtgatgagagagacataccggaatctgacctccgtgggcatcaactgggaatgttgggaccttgaagcctgcttcagaagcctgggaagaaacctgagagtgcaggtggtgaagagaaagtgcgagctgaccaacagcggcccctgcgccgagggcggcccaagcagcggcgcccctcctcccagcggcggcagcccagccggctccccaacctctaccgaggagggcacctctgagtccgccacccccgagagcggccctggcacctccaccgagcccagcgagggcagcgcacccggcagccctgccggcagccccacctccacagaggagggaaccagcaccgagcccagcgaaggcagcgccccaggcaccagcaccgagcctagtgagcaggagattaaacggatcaacaagatcagaagaagacttgtgaaagacagcaacaccaagaaggccggcaagacaggccccatgaaaaccctgctggttagagtgatgacacccgatctgagagagcggctggaaaacctgagaaagaagcctgaaaatatcccccagcccatcagcaatacatctagagccaacctgaataagctgctgaccgattacaccgaaatgaagaaggcgatcctgcatgtgtactgggaagagttccagaaggaccctgtgggcctgatgagccgggtggcccagcctgccagcaagaagatcgatcagaacaagctgaaacctgagatggacgagaagggcaacctgaccaccgccggctttgcctgctctcagtgtggccagcccctgttcgtgtacaagctggagcaggtgtctgagaagggcaaggcttacaccaactacttcggacggtgcaatgtggccgagcacgaaaagctgatcctgctggcccagctgaagcccgagaaggatagcgacgaagccgtgacatatagcctgggaaagtttgggcagagggccctggatttctacagcattcatgtgaccaaggagtccacccaccccgtgaagcccctggcccagatcgccggaaacagatacgcctccggacctgtgggaaaggccctgagcgacgcatgtatgggcacaatcgcctccttcctgtctaagtaccaggacatcatcatcgaacaccagaaggtggtgaagggcaaccagaagagactggagagcctgcgggagctggccggcaaggaaaacctggaataccctagcgtgaccctgccacctcagcctcacaccaaggagggcgttgatgcctacaacgaagtgatcgcccgggtgcgaatgtgggtgaacctgaacctgtggcagaagctgaagctaagcagagatgatgccaagcctctgctgagactgaagggattcccttcctttcctctggtcgagagacaggccaacgaagtggactggtgggacatggtgtgtaacgtgaagaagctgatcaacgagaaaaaggaggatggcaaggtgttttggcagaatctggctggctacaagagacaggaagccctgagaccatacctgagcagcgaggaagatcggaagaagggaaagaaattcgctcggtaccagctgggcgacctgctgctgcacctggaaaagaagcacggcgaggactggggaaaggtgtacgacgaggcctgggagcggattgacaagaaagtggaaggcctgagcaagcacatcaagctggaagaggaacggagaagcgaggacgcccagagcaaggccgccctgaccgactggctgcgggctaaggccagcttcgtgatcgagggcctgaaggaggccgacaaggacgagttctgcagatgcgagctgaagctgcagaagtggtacggggacctgcggggaaagcccttcgccatcgaagccgagaacagcatcctggacatcagcggcttcagcaagcagtacaactgtgccttcatctggcagaaggacggcgtgaagaagctgaacctgtacctgatcatcaactacttcaagggcggcaagctgcggttcaagaagatcaaacctgaagccttcgaagccaacagattctacaccgtgatcaacaaaaagagcggcgagatcgtgcccatggaggtgaacttcaacttcgacgaccccaacctgatcatcctgcctctggcctttggcaagagacagggcagagaattcatctggaacgacctgctgtccctggaaaccggcagcctgaagctggccaacggaagagtgatcgagaagacactgtacaacagaagaacccggcaggatgagcctgccctgttcgtggccctgaccttcgagcggcgggaggtcctggactcctccaatatcaaaccaatgaacctgatcggcgtggcaagaggcgaaaacatccccgccgtgatcgccctgaccgaccccgagggctgcccactgagccggtttaaggatagcctgggaaacccaacccacatcctgagaatcggcgagagctataaggagaagcagcggaccatccaggccaagaaggaggtggagcagcggagagccggcggctacagccggaagtacgccagcaaagccaagaatctggcagacgatatggtgagaaacaccgctagagatctgctgtactacgccgtgacccaggatgccatgctgatcttcgccaacctgagccggggcttcggccggcagggcaagcggaccttcatggccgagagacagtacacacggatggaggactggctgaccgccaagctggcctacgagggcctgagcaagacctacctgtccaagacactggcccagtacacctccaagacatgcagcaactgtgggtttaccatcaccagcgccgactacgacagggtgctggagaagctgaagaagacagcaacaggctggatgaccacaattaacggcaaggagctgaaggtggagggccagattacctactacaacagatacaagagacagaacgtagtcaaggacctgtccgtcgagctggatagactgagcgaagaatctgtgaacaacgacatctcctcctggacaaagggcagaagcggagaagctctgagcctcctgaagaaaagattctcccatagacccgtgcaggagaagttcgtgtgcctgaactgcggcttcgagacacacgcagccgagcaagccgccctgaacatcgccagatcctggctgttcctgcggagccaggagtacaagaaataccagacaaacaagacaaccggcaacaccgataagagagccttcgtcgagacctggcagtccttttaccggaagaagcttaaggaggtgtggaaacctgccgtgcggtctggcggatctggcggaggctccacccagaggagcatcagcttcaaggacctggccgtggacttcaccagggaggagtggcagaggctgggccccgcccagaggctgctgtacagggacgtgatgctggagaactacagcaacctgatcgccgtgggcctgcacgtgagcaagcccgacgtgatcctgaagctggagcagggcaaggagccctgggtggtggagaacagcagcaggcagaaccacgccgaggacgacgagcccctgggcggcccaagcagcggcgcccctcctcccagcggcggcagcccagccggctccccaacctctaccgaggagggcacctctgagtccgccacccccgagagcggccctggcacctccaccgagcccagcgagggcagcgcacccggcagccctgccggcagccccacctccacagaggagggaaccagcaccgagcccagcgaaggcagcgccccaggcaccagcaccgagcctagtgagcaggagattaaacggatcaacaagatcagaagaagacttgtgaaagacagcaacaccaagaaggccggcaagacaggccccatgaaaaccctgctggttagagtgatgacacccgatctgagagagcggctggaaaacctgagaaagaagcctgaaaatatcccccagcccatcagcaatacatctagagccaacctgaataagctgctgaccgattacaccgaaatgaagaaggcgatcctgcatgtgtactgggaagagttccagaaggaccctgtgggcctgatgagccgggtggcccagcctgccagcaagaagatcgatcagaacaagctgaaacctgagatggacgagaagggcaacctgaccaccgccggctttgcctgctctcagtgtggccagcccctgttcgtgtacaagctggagcaggtgtctgagaagggcaaggcttacaccaactacttcggacggtgcaatgtggccgagcacgaaaagctgatcctgctggcccagctgaagcccgagaaggatagcgacgaagccgtgacatatagcctgggaaagtttgggcagagggccctggatttctacagcattcatgtgaccaaggagtccacccaccccgtgaagcccctggcccagatcgccggaaacagatacgcctccggacctgtgggaaaggccctgagcgacgcatgtatgggcacaatcgcctccttcctgtctaagtaccaggacatcatcatcgaacaccagaaggtggtgaagggcaaccagaagagactggagagcctgcgggagctggccggcaaggaaaacctggaataccctagcgtgaccctgccacctcagcctcacaccaaggagggcgttgatgcctacaacgaagtgatcgcccgggtgcgaatgtgggtgaacctgaacctgtggcagaagctgaagctaagcagagatgatgccaagcctctgctgagactgaagggattcccttcctttcctctggtcgagagacaggccaacgaagtggactggtgggacatggtgtgtaacgtgaagaagctgatcaacgagaaaaaggaggatggcaaggtgttttggcagaatctggctggctacaagagacaggaagccctgagaccatacctgagcagcgaggaagatcggaagaagggaaagaaattcgctcggtaccagctgggcgacctgctgctgcacctggaaaagaagcacggcgaggactggggaaaggtgtacgacgaggcctgggagcggattgacaagaaagtggaaggcctgagcaagcacatcaagctggaagaggaacggagaagcgaggacgcccagagcaaggccgccctgaccgactggctgcgggctaaggccagcttcgtgatcgagggcctgaaggaggccgacaaggacgagttctgcagatgcgagctgaagctgcagaagtggtacggggacctgcggggaaagcccttcgccatcgaagccgagaacagcatcctggacatcagcggcttcagcaagcagtacaactgtgccttcatctggcagaaggacggcgtgaagaagctgaacctgtacctgatcatcaactacttcaagggcggcaagctgcggttcaagaagatcaaacctgaagccttcgaagccaacagattctacaccgtgatcaacaaaaagagcggcgagatcgtgcccatggaggtgaacttcaacttcgacgaccccaacctgatcatcctgcctctggcctttggcaagagacagggcagagaattcatctggaacgacctgctgtccctggaaaccggcagcctgaagctggccaacggaagagtgatcgagaagacactgtacaacagaagaacccggcaggatgagcctgccctgttcgtggccctgaccttcgagcggcgggaggtcctggactcctccaatatcaaaccaatgaacctgatcggcgtggcaagaggcgaaaacatccccgccgtgatcgccctgaccgaccccgagggctgcccactgagccggtttaaggatagcctgggaaacccaacccacatcctgagaatcggcgagagctataaggagaagcagcggaccatccaggccaagaaggaggtggagcagcggagagccggcggctacagccggaagtacgccagcaaagccaagaatctggcagacgatatggtgagaaacaccgctagagatctgctgtactacgccgtgacccaggatgccatgctgatcttcgccaacctgagccggggcttcggccggcagggcaagcggaccttcatggccgagagacagtacacacggatggaggactggctgaccgccaagctggcctacgagggcctgagcaagacctacctgtccaagacactggcccagtacacctccaagacatgcagcaactgtgggtttaccatcaccagcgccgactacgacagggtgctggagaagctgaagaagacagcaacaggctggatgaccacaattaacggcaaggagctgaaggtggagggccagattacctactacaacagatacaagagacagaacgtagtcaaggacctgtccgtcgagctggatagactgagcgaagaatctgtgaacaacgacatctcctcctggacaaagggcagaagcggagaagctctgagcctcctgaagaaaagattctcccatagacccgtgcaggagaagttcgtgtgcctgaactgcggcttcgagacacacgcagccgagcaagccgccctgaacatcgccagatcctggctgttcctgcggagccaggagtacaagaaataccagacaaacaagacaaccggcaacaccgataagagagccttcgtcgagacctggcagtccttttaccggaagaagcttaaggaggtgtggaaacctgccgtgcggtctggcggatctggcggaggctcctacccagaggagcatcagcttcaaggacctggccgtggacttcaccagggaggagtggcagaggctgggccccgcccagaggctgctgtacagggacgtgatgctggagaactacagcaacctgatcgccgtgggcctgcacgtgagcaagcccgacgtgatcctgaagctggagcagggcaaggagccctgggtggtggagaacagcagcaggcagaaccacgccgaggacgacgagcccctgggatctggctccggcagcggccccaagaaaaagagaaaagtctaagctgccttctgcggggcttgccttctggccatgcccttcttctctcccttgcacctgtacctcttggtctttgaataaagcctgagtaggaaggctagcaaaaaaaaaaaaaaaaaaaaaaaaaaaaaaaaaaaaaaaaaaaaaaaaaaaaaaaaaaaaaaaaaaaaaaaaaaaaaaaa

SEQ ID NO: 15780 - RNA, 9485 nt, synthetic construct
  source 1..9485: mol_type = other RNA
aggaaataagagagaaaagaagagtaagaagaaatataagagccaccatggcccctaagaagaagcgtaaagtgagccggatggaacgcctcgtctacgaggtgcggcagaagtgcagaaacatcgaggacatctgcatctcctgcggatctctgaacgtgaccctggagcacccactgttcatcggcggcatgtgccagaactgtaaaaactgttttctggagtgtgcctatcaatacgacgatgacggctaccagagctactgcaccatctgttgcggcggaagagaggtgctgatgtgtggaaataacaactgctgccggtgcttctgcgtggaatgcgtggacctgctggtgggccccggcgccgcccaggccgctattaaggaagatccttggaactgctacatgtgcggccacaagggcacatacggcctgctgagacggagagaggactggcctagcagactgcagatgttcttcgccaataaccacgaccaggagttcgacccccctaaggtgtaccctcccgtccccgccgagaagagaaagcccatccgggtcctgagcctgttcgatggcatcgccaccggtctgctggtgctgaaggacctgggcatccaggtggataggtacattgcctccgaggtgtgcgaggactccatcaccgtgggaatggtgcgtcatcagggcaagatcatgtacgtgggcgacgtgcggagcgtgacacagaagcatatccaggagtggggccctttcgacctggtgatcggcggcagcccttgcaatgacctgagcatcgtgaacccagcccggaagggcctgtacgagggaaccggcagactgttcttcgagttttacagactgctgcacgacgcccggcctaaggaaggcgacgaccggcccttcttttggctgttcgagaatgtggtggccatgggagtcagcgacaagcgggatattagccggttcctggagagcaaccccgtgatgatcgatgccaaggaagtgagcgccgcccaccgggccagatacttctggggcaatctgcctggcatgaacagacccctggccagcaccgtgaacgacaagctggagctgcaggagtgcctggagcacggccggatcgccaagttcagcaaggtgagaaccatcaccacccgaagcaacagcatcaaacaaggcaaggaccagcactttcctgtgttcatgaacgagaaggaggacatcctgtggtgtaccgagatggagagagtgttcgggttcccagtccactacacagatgtcagcaacatgtctagactggccagacagagactgctgggaagaagctggtccgtccctgtgatcagacacctgttcgcccctctgaaggagtacttcgcctgcgtgagcagcggcaacagcaacgccaacagccggggccccagcttctctagcggcctggtgccactgtccctgagagggagccacatgggccccatggagatctacaaaaccgtgagcgcctggaagcggcagcctgtgcgcgtgctgagcctgtttcggaatatcgataaagtcctgaaaagcctgggattcctggagagcggctctggctccggcggtggcaccctgaagtacgtggaggatgtgacaaacgtggtcagacgggatgtggagaagtggggccccttcgatctggtgtacggcagcacccaacccctgggcagctcttgtgaccggtgccctggctggtacatgtttcagttccaccggatcctgcagtacgccctgccgagacaggagtcccagcggccattcttttggattttcatggacaacttgctgctgaccgaggatgaccaggaaactaccactcggttcctgcagaccgaagccgtgaccctgcaggacgtgagaggccgggactaccagaacgccatgcgggtgtggtccaacatccctggactgaaaagcaagcacgcacctctgacccctaaagaagaggagtacctgcaggcccaggtgcggagcagaagcaagctggacgcccctaaggtggatctgctggtgaagaattgcctcctgcccctgagagagtacttcaagtatttcagccagaatagtctgcccctgggaggcagcggcggcggcgccctggtgacatttgaggacgtcgccgtgcggttcacccaggaggaatgggctctgctggatccttctcagaaaatcctgtaccgggacgtgatgagagagacataccggaatctgacctccgtgggcatcaactgggaatgttgggaccttgaagcctgcttcagaagcctgggaagaaacctgagagtgcaggtggtgaagagaaagtgcgagctgaccaacagcggcccctgcgccgagggcggcccaagcagcggcgcccctcctcccagcggcggcagcccagccggctccccaacctctaccgaggagggcacctctgagtccgccacccccgagagcggccctggcacctccaccgagcccagcgagggcagcgcacccggcagccctgccggcagccccacctccacagaggagggaaccagcaccgagcccagcgaaggcagcgccccaggcaccagcaccgagcctagtgagcaggagattaaacggatcaacaagatcagaagaagacttgtgaaagacagcaacaccaagaaggccggcaagacaggccccatgaaaaccctgctggttagagtgatgacacccgatctgagagagcggctggaaaacctgagaaagaagcctgaaaatatcccccagcccatcagcaatacatctagagccaacctgaataagctgctgaccgattacaccgaaatgaagaaggcgatcctgcatgtgtactgggaagagttccagaaggaccctgtgggcctgatgagccgggtggcccagcctgccagcaagaagatcgatcagaacaagctgaaacctgagatggacgagaagggcaacctgaccaccgccggctttgcctgctctcagtgtggccagcccctgttcgtgtacaagctggagcaggtgtctgagaagggcaaggcttacaccaactacttcggacggtgcaatgtggccgagcacgaaaagctgatcctgctggcccagctgaagcccgagaaggatagcgacgaagccgtgacatatagcctgggaaagtttgggcagagggccctggatttctacagcattcatgtgaccaaggagtccacccaccccgtgaagcccctggcccagatcgccggaaacagatacgcctccggacctgtgggaaaggccctgagcgacgcatgtatgggcacaatcgcctccttcctgtctaagtaccaggacatcatcatcgaacaccagaaggtggtgaagggcaaccagaagagactggagagcctgcgggagctggccggcaaggaaaacctggaataccctagcgtgaccctgccacctcagcctcacaccaaggagggcgttgatgcctacaacgaagtgatcgcccgggtgcgaatgtgggtgaacctgaacctgtggcagaagctgaagctaagcagagatgatgccaagcctctgctgagactgaagggattcccttcctttcctctggtcgagagacaggccaacgaagtggactggtgggacatggtgtgtaacgtgaagaagctgatcaacgagaaaaaggaggatggcaaggtgttttggcagaatctggctggctacaagagacaggaagccctgagaccatacctgagcagcgaggaagatcggaagaagggaaagaaattcgctcggtaccagctgggcgacctgctgctgcacctggaaaagaagcacggcgaggactggggaaaggtgtacgacgaggcctgggagcggattgacaagaaagtggaaggcctgagcaagcacatcaagctggaagaggaacggagaagcgaggacgcccagagcaaggccgccctgaccgactggctgcgggctaaggccagcttcgtgatcgagggcctgaaggaggccgacaaggacgagttctgcagatgcgagctgaagctgcagaagtggtacggggacctgcggggaaagcccttcgccatcgaagccgagaacagcatcctggacatcagcggcttcagcaagcagtacaactgtgccttcatctggcagaaggacggcgtgaagaagctgaacctgtacctgatcatcaactacttcaagggcggcaagctgcggttcaagaagatcaaacctgaagccttcgaagccaacagattctacaccgtgatcaacaaaaagagcggcgagatcgtgcccatggaggtgaacttcaacttcgacgaccccaacctgatcatcctgcctctggcctttggcaagagacagggcagagaattcatctggaacgacctgctgtccctggaaaccggcagcctgaagctggccaacggaagagtgatcgagaagacactgtacaacagaagaacccggcaggatgagcctgccctgttcgtggccctgaccttcgagcggcgggaggtcctggactcctccaatatcaaaccaatgaacctgatcggcgtggcaagaggcgaaaacatccccgccgtgatcgccctgaccgaccccgagggctgcccactgagccggtttaaggatagcctgggaaacccaacccacatcctgagaatcggcgagagctataaggagaagcagcggaccatccaggccaagaaggaggtggagcagcggagagccggcggctacagccggaagtacgccagcaaagccaagaatctggcagacgatatggtgagaaacaccgctagagatctgctgtactacgccgtgacccaggatgccatgctgatcttcgccaacctgagccggggcttcggccggcagggcaagcggaccttcatggccgagagacagtacacacggatggaggactggctgaccgccaagctggcctacgagggcctgagcaagacctacctgtccaagacactggcccagtacacctccaagacatgcagcaactgtgggtttaccatcaccagcgccgactacgacagggtgctggagaagctgaagaagacagcaacaggctggatgaccacaattaacggcaaggagctgaaggtggagggccagattacctactacaacagatacaagagacagaacgtagtcaaggacctgtccgtcgagctggatagactgagcgaagaatctgtgaacaacgacatctcctcctggacaaagggcagaagcggagaagctctgagcctcctgaagaaaagattctcccatagacccgtgcaggagaagttcgtgtgcctgaactgcggcttcgagacacacgcagccgagcaagccgccctgaacatcgccagatcctggctgttcctgcggagccaggagtacaagaaataccagacaaacaagacaaccggcaacaccgataagagagccttcgtcgagacctggcagtccttttaccggaagaagcttaaggaggtgtggaaacctgccgtgcggtctggcggatctggcggaggctccatggacagcgtgaccatcgaggacgtggccgtggacttcaccctggaggagtgggccctgctgggccccagccagaggaagctgtacagggacgtgatgcaggagaccctgaggaacctggccgccgtgggcgccaagagggagtaccacgacatcgaggaccagtacaagaaccagggcaggaagctgaggaccttcatggtggagaggctgtgcaagagcaaggacatcagcctgtgcggcggcggcccaagcagcggcgcccctcctcccagcggcggcagcccagccggctccccaacctctaccgaggagggcacctctgagtccgccacccccgagagcggccctggcacctccaccgagcccagcgagggcagcgcacccggcagccctgccggcagccccacctccacagaggagggaaccagcaccgagcccagcgaaggcagcgccccaggcaccagcaccgagcctagtgagcaggagattaaacggatcaacaagatcagaagaagacttgtgaaagacagcaacaccaagaaggccggcaagacaggccccatgaaaaccctgctggttagagtgatgacacccgatctgagagagcggctggaaaacctgagaaagaagcctgaaaatatcccccagcccatcagcaatacatctagagccaacctgaataagctgctgaccgattacaccgaaatgaagaaggcgatcctgcatgtgtactgggaagagttccagaaggaccctgtgggcctgatgagccgggtggcccagcctgccagcaagaagatcgatcagaacaagctgaaacctgagatggacgagaagggcaacctgaccaccgccggctttgcctgctctcagtgtggccagcccctgttcgtgtacaagctggagcaggtgtctgagaagggcaaggcttacaccaactacttcggacggtgcaatgtggccgagcacgaaaagctgatcctgctggcccagctgaagcccgagaaggatagcgacgaagccgtgacatatagcctgggaaagtttgggcagagggccctggatttctacagcattcatgtgaccaaggagtccacccaccccgtgaagcccctggcccagatcgccggaaacagatacgcctccggacctgtgggaaaggccctgagcgacgcatgtatgggcacaatcgcctccttcctgtctaagtaccaggacatcatcatcgaacaccagaaggtggtgaagggcaaccagaagagactggagagcctgcgggagctggccggcaaggaaaacctggaataccctagcgtgaccctgccacctcagcctcacaccaaggagggcgttgatgcctacaacgaagtgatcgcccgggtgcgaatgtgggtgaacctgaacctgtggcagaagctgaagctaagcagagatgatgccaagcctctgctgagactgaagggattcccttcctttcctctggtcgagagacaggccaacgaagtggactggtgggacatggtgtgtaacgtgaagaagctgatcaacgagaaaaaggaggatggcaaggtgttttggcagaatctggctggctacaagagacaggaagccctgagaccatacctgagcagcgaggaagatcggaagaagggaaagaaattcgctcggtaccagctgggcgacctgctgctgcacctggaaaagaagcacggcgaggactggggaaaggtgtacgacgaggcctgggagcggattgacaagaaagtggaaggcctgagcaagcacatcaagctggaagaggaacggagaagcgaggacgcccagagcaaggccgccctgaccgactggctgcgggctaaggccagcttcgtgatcgagggcctgaaggaggccgacaaggacgagttctgcagatgcgagctgaagctgcagaagtggtacggggacctgcggggaaagcccttcgccatcgaagccgagaacagcatcctggacatcagcggcttcagcaagcagtacaactgtgccttcatctggcagaaggacggcgtgaagaagctgaacctgtacctgatcatcaactacttcaagggcggcaagctgcggttcaagaagatcaaacctgaagccttcgaagccaacagattctacaccgtgatcaacaaaaagagcggcgagatcgtgcccatggaggtgaacttcaacttcgacgaccccaacctgatcatcctgcctctggcctttggcaagagacagggcagagaattcatctggaacgacctgctgtccctggaaaccggcagcctgaagctggccaacggaagagtgatcgagaagacactgtacaacagaagaacccggcaggatgagcctgccctgttcgtggccctgaccttcgagcggcgggaggtcctggactcctccaatatcaaaccaatgaacctgatcggcgtggcaagaggcgaaaacatccccgccgtgatcgccctgaccgaccccgagggctgcccactgagccggtttaaggatagcctgggaaacccaacccacatcctgagaatcggcgagagctataaggagaagcagcggaccatccaggccaagaaggaggtggagcagcggagagccggcggctacagccggaagtacgccagcaaagccaagaatctggcagacgatatggtgagaaacaccgctagagatctgctgtactacgccgtgacccaggatgccatgctgatcttcgccaacctgagccggggcttcggccggcagggcaagcggaccttcatggccgagagacagtacacacggatggaggactggctgaccgccaagctggcctacgagggcctgagcaagacctacctgtccaagacactggcccagtacacctccaagacatgcagcaactgtgggtttaccatcaccagcgccgactacgacagggtgctggagaagctgaagaagacagcaacaggctggatgaccacaattaacggcaaggagctgaaggtggagggccagattacctactacaacagatacaagagacagaacgtagtcaaggacctgtccgtcgagctggatagactgagcgaagaatctgtgaacaacgacatctcctcctggacaaagggcagaagcggagaagctctgagcctcctgaagaaaagattctcccatagacccgtgcaggagaagttcgtgtgcctgaactgcggcttcgagacacacgcagccgagcaagccgccctgaacatcgccagatcctggctgttcctgcggagccaggagtacaagaaataccagacaaacaagacaaccggcaacaccgataagagagccttcgtcgagacctggcagtccttttaccggaagaagcttaaggaggtgtggaaacctgccgtgcggtctggcggatctggcggaggctcctatggacagcgtgaccatcgaggacgtggccgtggacttcaccctggaggagtgggccctgctgggccccagccagaggaagctgtacagggacgtgatgcaggagaccctgaggaacctggccgccgtgggcgccaagagggagtaccacgacatcgaggaccagtacaagaaccagggcaggaagctgaggaccttcatggtggagaggctgtgcaagagcaaggacatcagcctgtgcggcggatctggctccggcagcggccccaagaaaaagagaaaagtctaagctgccttctgcggggcttgccttctggccatgcccttcttctctcccttgcacctgtacctcttggtctttgaataaagcctgagtaggaaggctagcaaaaaaaaaaaaaaaaaaaaaaaaaaaaaaaaaaaaaaaaaaaaaaaaaaaaaaaaaaaaaaaaaaaaaaaaaaaaaaaa

SEQ ID NO: 15781 - RNA, 9485 nt, synthetic construct
  source 1..9485: mol_type = other RNA
aggaaataagagagaaaagaagagtaagaagaaatataagagccaccatggcccctaagaagaagcgtaaagtgagccggatggaacgcctcgtctacgaggtgcggcagaagtgcagaaacatcgaggacatctgcatctcctgcggatctctgaacgtgaccctggagcacccactgttcatcggcggcatgtgccagaactgtaaaaactgttttctggagtgtgcctatcaatacgacgatgacggctaccagagctactgcaccatctgttgcggcggaagagaggtgctgatgtgtggaaataacaactgctgccggtgcttctgcgtggaatgcgtggacctgctggtgggccccggcgccgcccaggccgctattaaggaagatccttggaactgctacatgtgcggccacaagggcacatacggcctgctgagacggagagaggactggcctagcagactgcagatgttcttcgccaataaccacgaccaggagttcgacccccctaaggtgtaccctcccgtccccgccgagaagagaaagcccatccgggtcctgagcctgttcgatggcatcgccaccggtctgctggtgctgaaggacctgggcatccaggtggataggtacattgcctccgaggtgtgcgaggactccatcaccgtgggaatggtgcgtcatcagggcaagatcatgtacgtgggcgacgtgcggagcgtgacacagaagcatatccaggagtggggccctttcgacctggtgatcggcggcagcccttgcaatgacctgagcatcgtgaacccagcccggaagggcctgtacgagggaaccggcagactgttcttcgagttttacagactgctgcacgacgcccggcctaaggaaggcgacgaccggcccttcttttggctgttcgagaatgtggtggccatgggagtcagcgacaagcgggatattagccggttcctggagagcaaccccgtgatgatcgatgccaaggaagtgagcgccgcccaccgggccagatacttctggggcaatctgcctggcatgaacagacccctggccagcaccgtgaacgacaagctggagctgcaggagtgcctggagcacggccggatcgccaagttcagcaaggtgagaaccatcaccacccgaagcaacagcatcaaacaaggcaaggaccagcactttcctgtgttcatgaacgagaaggaggacatcctgtggtgtaccgagatggagagagtgttcgggttcccagtccactacacagatgtcagcaacatgtctagactggccagacagagactgctgggaagaagctggtccgtccctgtgatcagacacctgttcgcccctctgaaggagtacttcgcctgcgtgagcagcggcaacagcaacgccaacagccggggccccagcttctctagcggcctggtgccactgtccctgagagggagccacatgggccccatggagatctacaaaaccgtgagcgcctggaagcggcagcctgtgcgcgtgctgagcctgtttcggaatatcgataaagtcctgaaaagcctgggattcctggagagcggctctggctccggcggtggcaccctgaagtacgtggaggatgtgacaaacgtggtcagacgggatgtggagaagtggggccccttcgatctggtgtacggcagcacccaacccctgggcagctcttgtgaccggtgccctggctggtacatgtttcagttccaccggatcctgcagtacgccctgccgagacaggagtcccagcggccattcttttggattttcatggacaacttgctgctgaccgaggatgaccaggaaactaccactcggttcctgcagaccgaagccgtgaccctgcaggacgtgagaggccgggactaccagaacgccatgcgggtgtggtccaacatccctggactgaaaagcaagcacgcacctctgacccctaaagaagaggagtacctgcaggcccaggtgcggagcagaagcaagctggacgcccctaaggtggatctgctggtgaagaattgcctcctgcccctgagagagtacttcaagtatttcagccagaatagtctgcccctgggaggcagcggcggcggcgccctggtgacatttgaggacgtcgccgtgcggttcacccaggaggaatgggctctgctggatccttctcagaaaatcctgtaccgggacgtgatgagagagacataccggaatctgacctccgtgggcatcaactgggaatgttgggaccttgaagcctgcttcagaagcctgggaagaaacctgagagtgcaggtggtgaagagaaagtgcgagctgaccaacagcggcccctgcgccgagggcggcccaagcagcggcgcccctcctcccagcggcggcagcccagccggctccccaacctctaccgaggagggcacctctgagtccgccacccccgagagcggccctggcacctccaccgagcccagcgagggcagcgcacccggcagccctgccggcagccccacctccacagaggagggaaccagcaccgagcccagcgaaggcagcgccccaggcaccagcaccgagcctagtgagcaggagattaaacggatcaacaagatcagaagaagacttgtgaaagacagcaacaccaagaaggccggcaagacaggccccatgaaaaccctgctggttagagtgatgacacccgatctgagagagcggctggaaaacctgagaaagaagcctgaaaatatcccccagcccatcagcaatacatctagagccaacctgaataagctgctgaccgattacaccgaaatgaagaaggcgatcctgcatgtgtactgggaagagttccagaaggaccctgtgggcctgatgagccgggtggcccagcctgccagcaagaagatcgatcagaacaagctgaaacctgagatggacgagaagggcaacctgaccaccgccggctttgcctgctctcagtgtggccagcccctgttcgtgtacaagctggagcaggtgtctgagaagggcaaggcttacaccaactacttcggacggtgcaatgtggccgagcacgaaaagctgatcctgctggcccagctgaagcccgagaaggatagcgacgaagccgtgacatatagcctgggaaagtttgggcagagggccctggatttctacagcattcatgtgaccaaggagtccacccaccccgtgaagcccctggcccagatcgccggaaacagatacgcctccggacctgtgggaaaggccctgagcgacgcatgtatgggcacaatcgcctccttcctgtctaagtaccaggacatcatcatcgaacaccagaaggtggtgaagggcaaccagaagagactggagagcctgcgggagctggccggcaaggaaaacctggaataccctagcgtgaccctgccacctcagcctcacaccaaggagggcgttgatgcctacaacgaagtgatcgcccgggtgcgaatgtgggtgaacctgaacctgtggcagaagctgaagctaagcagagatgatgccaagcctctgctgagactgaagggattcccttcctttcctctggtcgagagacaggccaacgaagtggactggtgggacatggtgtgtaacgtgaagaagctgatcaacgagaaaaaggaggatggcaaggtgttttggcagaatctggctggctacaagagacaggaagccctgagaccatacctgagcagcgaggaagatcggaagaagggaaagaaattcgctcggtaccagctgggcgacctgctgctgcacctggaaaagaagcacggcgaggactggggaaaggtgtacgacgaggcctgggagcggattgacaagaaagtggaaggcctgagcaagcacatcaagctggaagaggaacggagaagcgaggacgcccagagcaaggccgccctgaccgactggctgcgggctaaggccagcttcgtgatcgagggcctgaaggaggccgacaaggacgagttctgcagatgcgagctgaagctgcagaagtggtacggggacctgcggggaaagcccttcgccatcgaagccgagaacagcatcctggacatcagcggcttcagcaagcagtacaactgtgccttcatctggcagaaggacggcgtgaagaagctgaacctgtacctgatcatcaactacttcaagggcggcaagctgcggttcaagaagatcaaacctgaagccttcgaagccaacagattctacaccgtgatcaacaaaaagagcggcgagatcgtgcccatggaggtgaacttcaacttcgacgaccccaacctgatcatcctgcctctggcctttggcaagagacagggcagagaattcatctggaacgacctgctgtccctggaaaccggcagcctgaagctggccaacggaagagtgatcgagaagacactgtacaacagaagaacccggcaggatgagcctgccctgttcgtggccctgaccttcgagcggcgggaggtcctggactcctccaatatcaaaccaatgaacctgatcggcgtggcaagaggcgaaaacatccccgccgtgatcgccctgaccgaccccgagggctgcccactgagccggtttaaggatagcctgggaaacccaacccacatcctgagaatcggcgagagctataaggagaagcagcggaccatccaggccaagaaggaggtggagcagcggagagccggcggctacagccggaagtacgccagcaaagccaagaatctggcagacgatatggtgagaaacaccgctagagatctgctgtactacgccgtgacccaggatgccatgctgatcttcgccaacctgagccggggcttcggccggcagggcaagcggaccttcatggccgagagacagtacacacggatggaggactggctgaccgccaagctggcctacgagggcctgagcaagacctacctgtccaagacactggcccagtacacctccaagacatgcagcaactgtgggtttaccatcaccagcgccgactacgacagggtgctggagaagctgaagaagacagcaacaggctggatgaccacaattaacggcaaggagctgaaggtggagggccagattacctactacaacagatacaagagacagaacgtagtcaaggacctgtccgtcgagctggatagactgagcgaagaatctgtgaacaacgacatctcctcctggacaaagggcagaagcggagaagctctgagcctcctgaagaaaagattctcccatagacccgtgcaggagaagttcgtgtgcctgaactgcggcttcgagacacacgcagccgagcaagccgccctgaacatcgccagatcctggctgttcctgcggagccaggagtacaagaaataccagacaaacaagacaaccggcaacaccgataagagagccttcgtcgagacctggcagtccttttaccggaagaagcttaaggaggtgtggaaacctgccgtgcggtctggcggatctggcggaggctccctgcagggcagcgtgagcttcaaggacgtgaccgtggacttcacccaggaggagtggcagcagctggaccccgcccagaaggccctgtacagggacgtgatgctggagaactactgccacttcgtgagcgtgggcttccacatgaccaagcccgacatgatcaggaggctggagcagggcgaggagctgtggaccgagaggatcttccccggccagagctacctggaggaggacggcaaggccggcggcccaagcagcggcgcccctcctcccagcggcggcagcccagccggctccccaacctctaccgaggagggcacctctgagtccgccacccccgagagcggccctggcacctccaccgagcccagcgagggcagcgcacccggcagccctgccggcagccccacctccacagaggagggaaccagcaccgagcccagcgaaggcagcgccccaggcaccagcaccgagcctagtgagcaggagattaaacggatcaacaagatcagaagaagacttgtgaaagacagcaacaccaagaaggccggcaagacaggccccatgaaaaccctgctggttagagtgatgacacccgatctgagagagcggctggaaaacctgagaaagaagcctgaaaatatcccccagcccatcagcaatacatctagagccaacctgaataagctgctgaccgattacaccgaaatgaagaaggcgatcctgcatgtgtactgggaagagttccagaaggaccctgtgggcctgatgagccgggtggcccagcctgccagcaagaagatcgatcagaacaagctgaaacctgagatggacgagaagggcaacctgaccaccgccggctttgcctgctctcagtgtggccagcccctgttcgtgtacaagctggagcaggtgtctgagaagggcaaggcttacaccaactacttcggacggtgcaatgtggccgagcacgaaaagctgatcctgctggcccagctgaagcccgagaaggatagcgacgaagccgtgacatatagcctgggaaagtttgggcagagggccctggatttctacagcattcatgtgaccaaggagtccacccaccccgtgaagcccctggcccagatcgccggaaacagatacgcctccggacctgtgggaaaggccctgagcgacgcatgtatgggcacaatcgcctccttcctgtctaagtaccaggacatcatcatcgaacaccagaaggtggtgaagggcaaccagaagagactggagagcctgcgggagctggccggcaaggaaaacctggaataccctagcgtgaccctgccacctcagcctcacaccaaggagggcgttgatgcctacaacgaagtgatcgcccgggtgcgaatgtgggtgaacctgaacctgtggcagaagctgaagctaagcagagatgatgccaagcctctgctgagactgaagggattcccttcctttcctctggtcgagagacaggccaacgaagtggactggtgggacatggtgtgtaacgtgaagaagctgatcaacgagaaaaaggaggatggcaaggtgttttggcagaatctggctggctacaagagacaggaagccctgagaccatacctgagcagcgaggaagatcggaagaagggaaagaaattcgctcggtaccagctgggcgacctgctgctgcacctggaaaagaagcacggcgaggactggggaaaggtgtacgacgaggcctgggagcggattgacaagaaagtggaaggcctgagcaagcacatcaagctggaagaggaacggagaagcgaggacgcccagagcaaggccgccctgaccgactggctgcgggctaaggccagcttcgtgatcgagggcctgaaggaggccgacaaggacgagttctgcagatgcgagctgaagctgcagaagtggtacggggacctgcggggaaagcccttcgccatcgaagccgagaacagcatcctggacatcagcggcttcagcaagcagtacaactgtgccttcatctggcagaaggacggcgtgaagaagctgaacctgtacctgatcatcaactacttcaagggcggcaagctgcggttcaagaagatcaaacctgaagccttcgaagccaacagattctacaccgtgatcaacaaaaagagcggcgagatcgtgcccatggaggtgaacttcaacttcgacgaccccaacctgatcatcctgcctctggcctttggcaagagacagggcagagaattcatctggaacgacctgctgtccctggaaaccggcagcctgaagctggccaacggaagagtgatcgagaagacactgtacaacagaagaacccggcaggatgagcctgccctgttcgtggccctgaccttcgagcggcgggaggtcctggactcctccaatatcaaaccaatgaacctgatcggcgtggcaagaggcgaaaacatccccgccgtgatcgccctgaccgaccccgagggctgcccactgagccggtttaaggatagcctgggaaacccaacccacatcctgagaatcggcgagagctataaggagaagcagcggaccatccaggccaagaaggaggtggagcagcggagagccggcggctacagccggaagtacgccagcaaagccaagaatctggcagacgatatggtgagaaacaccgctagagatctgctgtactacgccgtgacccaggatgccatgctgatcttcgccaacctgagccggggcttcggccggcagggcaagcggaccttcatggccgagagacagtacacacggatggaggactggctgaccgccaagctggcctacgagggcctgagcaagacctacctgtccaagacactggcccagtacacctccaagacatgcagcaactgtgggtttaccatcaccagcgccgactacgacagggtgctggagaagctgaagaagacagcaacaggctggatgaccacaattaacggcaaggagctgaaggtggagggccagattacctactacaacagatacaagagacagaacgtagtcaaggacctgtccgtcgagctggatagactgagcgaagaatctgtgaacaacgacatctcctcctggacaaagggcagaagcggagaagctctgagcctcctgaagaaaagattctcccatagacccgtgcaggagaagttcgtgtgcctgaactgcggcttcgagacacacgcagccgagcaagccgccctgaacatcgccagatcctggctgttcctgcggagccaggagtacaagaaataccagacaaacaagacaaccggcaacaccgataagagagccttcgtcgagacctggcagtccttttaccggaagaagcttaaggaggtgtggaaacctgccgtgcggtctggcggatctggcggaggctcctctgcagggcagcgtgagcttcaaggacgtgaccgtggacttcacccaggaggagtggcagcagctggaccccgcccagaaggccctgtacagggacgtgatgctggagaactactgccacttcgtgagcgtgggcttccacatgaccaagcccgacatgatcaggaggctggagcagggcgaggagctgtggaccgagaggatcttccccggccagagctacctggaggaggacggcaaggccggatctggctccggcagcggccccaagaaaaagagaaaagtctaagctgccttctgcggggcttgccttctggccatgcccttcttctctcccttgcacctgtacctcttggtctttgaataaagcctgagtaggaaggctagcaaaaaaaaaaaaaaaaaaaaaaaaaaaaaaaaaaaaaaaaaaaaaaaaaaaaaaaaaaaaaaaaaaaaaaaaaaaaaaaa

SEQ ID NO: 15782 - RNA, 9485 nt, synthetic construct
  source 1..9485: mol_type = other RNA
aggaaataagagagaaaagaagagtaagaagaaatataagagccaccatggcccctaagaagaagcgtaaagtgagccggatggaacgcctcgtctacgaggtgcggcagaagtgcagaaacatcgaggacatctgcatctcctgcggatctctgaacgtgaccctggagcacccactgttcatcggcggcatgtgccagaactgtaaaaactgttttctggagtgtgcctatcaatacgacgatgacggctaccagagctactgcaccatctgttgcggcggaagagaggtgctgatgtgtggaaataacaactgctgccggtgcttctgcgtggaatgcgtggacctgctggtgggccccggcgccgcccaggccgctattaaggaagatccttggaactgctacatgtgcggccacaagggcacatacggcctgctgagacggagagaggactggcctagcagactgcagatgttcttcgccaataaccacgaccaggagttcgacccccctaaggtgtaccctcccgtccccgccgagaagagaaagcccatccgggtcctgagcctgttcgatggcatcgccaccggtctgctggtgctgaaggacctgggcatccaggtggataggtacattgcctccgaggtgtgcgaggactccatcaccgtgggaatggtgcgtcatcagggcaagatcatgtacgtgggcgacgtgcggagcgtgacacagaagcatatccaggagtggggccctttcgacctggtgatcggcggcagcccttgcaatgacctgagcatcgtgaacccagcccggaagggcctgtacgagggaaccggcagactgttcttcgagttttacagactgctgcacgacgcccggcctaaggaaggcgacgaccggcccttcttttggctgttcgagaatgtggtggccatgggagtcagcgacaagcgggatattagccggttcctggagagcaaccccgtgatgatcgatgccaaggaagtgagcgccgcccaccgggccagatacttctggggcaatctgcctggcatgaacagacccctggccagcaccgtgaacgacaagctggagctgcaggagtgcctggagcacggccggatcgccaagttcagcaaggtgagaaccatcaccacccgaagcaacagcatcaaacaaggcaaggaccagcactttcctgtgttcatgaacgagaaggaggacatcctgtggtgtaccgagatggagagagtgttcgggttcccagtccactacacagatgtcagcaacatgtctagactggccagacagagactgctgggaagaagctggtccgtccctgtgatcagacacctgttcgcccctctgaaggagtacttcgcctgcgtgagcagcggcaacagcaacgccaacagccggggccccagcttctctagcggcctggtgccactgtccctgagagggagccacatgggccccatggagatctacaaaaccgtgagcgcctggaagcggcagcctgtgcgcgtgctgagcctgtttcggaatatcgataaagtcctgaaaagcctgggattcctggagagcggctctggctccggcggtggcaccctgaagtacgtggaggatgtgacaaacgtggtcagacgggatgtggagaagtggggccccttcgatctggtgtacggcagcacccaacccctgggcagctcttgtgaccggtgccctggctggtacatgtttcagttccaccggatcctgcagtacgccctgccgagacaggagtcccagcggccattcttttggattttcatggacaacttgctgctgaccgaggatgaccaggaaactaccactcggttcctgcagaccgaagccgtgaccctgcaggacgtgagaggccgggactaccagaacgccatgcgggtgtggtccaacatccctggactgaaaagcaagcacgcacctctgacccctaaagaagaggagtacctgcaggcccaggtgcggagcagaagcaagctggacgcccctaaggtggatctgctggtgaagaattgcctcctgcccctgagagagtacttcaagtatttcagccagaatagtctgcccctgggaggcagcggcggcggcgccctggtgacatttgaggacgtcgccgtgcggttcacccaggaggaatgggctctgctggatccttctcagaaaatcctgtaccgggacgtgatgagagagacataccggaatctgacctccgtgggcatcaactgggaatgttgggaccttgaagcctgcttcagaagcctgggaagaaacctgagagtgcaggtggtgaagagaaagtgcgagctgaccaacagcggcccctgcgccgagggcggcccaagcagcggcgcccctcctcccagcggcggcagcccagccggctccccaacctctaccgaggagggcacctctgagtccgccacccccgagagcggccctggcacctccaccgagcccagcgagggcagcgcacccggcagccctgccggcagccccacctccacagaggagggaaccagcaccgagcccagcgaaggcagcgccccaggcaccagcaccgagcctagtgagcaggagattaaacggatcaacaagatcagaagaagacttgtgaaagacagcaacaccaagaaggccggcaagacaggccccatgaaaaccctgctggttagagtgatgacacccgatctgagagagcggctggaaaacctgagaaagaagcctgaaaatatcccccagcccatcagcaatacatctagagccaacctgaataagctgctgaccgattacaccgaaatgaagaaggcgatcctgcatgtgtactgggaagagttccagaaggaccctgtgggcctgatgagccgggtggcccagcctgccagcaagaagatcgatcagaacaagctgaaacctgagatggacgagaagggcaacctgaccaccgccggctttgcctgctctcagtgtggccagcccctgttcgtgtacaagctggagcaggtgtctgagaagggcaaggcttacaccaactacttcggacggtgcaatgtggccgagcacgaaaagctgatcctgctggcccagctgaagcccgagaaggatagcgacgaagccgtgacatatagcctgggaaagtttgggcagagggccctggatttctacagcattcatgtgaccaaggagtccacccaccccgtgaagcccctggcccagatcgccggaaacagatacgcctccggacctgtgggaaaggccctgagcgacgcatgtatgggcacaatcgcctccttcctgtctaagtaccaggacatcatcatcgaacaccagaaggtggtgaagggcaaccagaagagactggagagcctgcgggagctggccggcaaggaaaacctggaataccctagcgtgaccctgccacctcagcctcacaccaaggagggcgttgatgcctacaacgaagtgatcgcccgggtgcgaatgtgggtgaacctgaacctgtggcagaagctgaagctaagcagagatgatgccaagcctctgctgagactgaagggattcccttcctttcctctggtcgagagacaggccaacgaagtggactggtgggacatggtgtgtaacgtgaagaagctgatcaacgagaaaaaggaggatggcaaggtgttttggcagaatctggctggctacaagagacaggaagccctgagaccatacctgagcagcgaggaagatcggaagaagggaaagaaattcgctcggtaccagctgggcgacctgctgctgcacctggaaaagaagcacggcgaggactggggaaaggtgtacgacgaggcctgggagcggattgacaagaaagtggaaggcctgagcaagcacatcaagctggaagaggaacggagaagcgaggacgcccagagcaaggccgccctgaccgactggctgcgggctaaggccagcttcgtgatcgagggcctgaaggaggccgacaaggacgagttctgcagatgcgagctgaagctgcagaagtggtacggggacctgcggggaaagcccttcgccatcgaagccgagaacagcatcctggacatcagcggcttcagcaagcagtacaactgtgccttcatctggcagaaggacggcgtgaagaagctgaacctgtacctgatcatcaactacttcaagggcggcaagctgcggttcaagaagatcaaacctgaagccttcgaagccaacagattctacaccgtgatcaacaaaaagagcggcgagatcgtgcccatggaggtgaacttcaacttcgacgaccccaacctgatcatcctgcctctggcctttggcaagagacagggcagagaattcatctggaacgacctgctgtccctggaaaccggcagcctgaagctggccaacggaagagtgatcgagaagacactgtacaacagaagaacccggcaggatgagcctgccctgttcgtggccctgaccttcgagcggcgggaggtcctggactcctccaatatcaaaccaatgaacctgatcggcgtggcaagaggcgaaaacatccccgccgtgatcgccctgaccgaccccgagggctgcccactgagccggtttaaggatagcctgggaaacccaacccacatcctgagaatcggcgagagctataaggagaagcagcggaccatccaggccaagaaggaggtggagcagcggagagccggcggctacagccggaagtacgccagcaaagccaagaatctggcagacgatatggtgagaaacaccgctagagatctgctgtactacgccgtgacccaggatgccatgctgatcttcgccaacctgagccggggcttcggccggcagggcaagcggaccttcatggccgagagacagtacacacggatggaggactggctgaccgccaagctggcctacgagggcctgagcaagacctacctgtccaagacactggcccagtacacctccaagacatgcagcaactgtgggtttaccatcaccagcgccgactacgacagggtgctggagaagctgaagaagacagcaacaggctggatgaccacaattaacggcaaggagctgaaggtggagggccagattacctactacaacagatacaagagacagaacgtagtcaaggacctgtccgtcgagctggatagactgagcgaagaatctgtgaacaacgacatctcctcctggacaaagggcagaagcggagaagctctgagcctcctgaagaaaagattctcccatagacccgtgcaggagaagttcgtgtgcctgaactgcggcttcgagacacacgcagccgagcaagccgccctgaacatcgccagatcctggctgttcctgcggagccaggagtacaagaaataccagacaaacaagacaaccggcaacaccgataagagagccttcgtcgagacctggcagtccttttaccggaagaagcttaaggaggtgtggaaacctgccgtgcggtctggcggatctggcggaggctcctgcaaggagagcgtgatcttcaaggacgtgtgcgtgaacttcagcctggaggagtgggagtgcctggacctgacccagaggaacctgtacaggtgcgtgatgctggagaactacagcaacctggtgagcgtgggcctgagcatccccaagcccgacgtgatcagcctgctggagcagggcaaggagccctggggcgtgttcgacagcgagatgaccaggggcctgaaccaggactgcggcagcggcggcccaagcagcggcgcccctcctcccagcggcggcagcccagccggctccccaacctctaccgaggagggcacctctgagtccgccacccccgagagcggccctggcacctccaccgagcccagcgagggcagcgcacccggcagccctgccggcagccccacctccacagaggagggaaccagcaccgagcccagcgaaggcagcgccccaggcaccagcaccgagcctagtgagcaggagattaaacggatcaacaagatcagaagaagacttgtgaaagacagcaacaccaagaaggccggcaagacaggccccatgaaaaccctgctggttagagtgatgacacccgatctgagagagcggctggaaaacctgagaaagaagcctgaaaatatcccccagcccatcagcaatacatctagagccaacctgaataagctgctgaccgattacaccgaaatgaagaaggcgatcctgcatgtgtactgggaagagttccagaaggaccctgtgggcctgatgagccgggtggcccagcctgccagcaagaagatcgatcagaacaagctgaaacctgagatggacgagaagggcaacctgaccaccgccggctttgcctgctctcagtgtggccagcccctgttcgtgtacaagctggagcaggtgtctgagaagggcaaggcttacaccaactacttcggacggtgcaatgtggccgagcacgaaaagctgatcctgctggcccagctgaagcccgagaaggatagcgacgaagccgtgacatatagcctgggaaagtttgggcagagggccctggatttctacagcattcatgtgaccaaggagtccacccaccccgtgaagcccctggcccagatcgccggaaacagatacgcctccggacctgtgggaaaggccctgagcgacgcatgtatgggcacaatcgcctccttcctgtctaagtaccaggacatcatcatcgaacaccagaaggtggtgaagggcaaccagaagagactggagagcctgcgggagctggccggcaaggaaaacctggaataccctagcgtgaccctgccacctcagcctcacaccaaggagggcgttgatgcctacaacgaagtgatcgcccgggtgcgaatgtgggtgaacctgaacctgtggcagaagctgaagctaagcagagatgatgccaagcctctgctgagactgaagggattcccttcctttcctctggtcgagagacaggccaacgaagtggactggtgggacatggtgtgtaacgtgaagaagctgatcaacgagaaaaaggaggatggcaaggtgttttggcagaatctggctggctacaagagacaggaagccctgagaccatacctgagcagcgaggaagatcggaagaagggaaagaaattcgctcggtaccagctgggcgacctgctgctgcacctggaaaagaagcacggcgaggactggggaaaggtgtacgacgaggcctgggagcggattgacaagaaagtggaaggcctgagcaagcacatcaagctggaagaggaacggagaagcgaggacgcccagagcaaggccgccctgaccgactggctgcgggctaaggccagcttcgtgatcgagggcctgaaggaggccgacaaggacgagttctgcagatgcgagctgaagctgcagaagtggtacggggacctgcggggaaagcccttcgccatcgaagccgagaacagcatcctggacatcagcggcttcagcaagcagtacaactgtgccttcatctggcagaaggacggcgtgaagaagctgaacctgtacctgatcatcaactacttcaagggcggcaagctgcggttcaagaagatcaaacctgaagccttcgaagccaacagattctacaccgtgatcaacaaaaagagcggcgagatcgtgcccatggaggtgaacttcaacttcgacgaccccaacctgatcatcctgcctctggcctttggcaagagacagggcagagaattcatctggaacgacctgctgtccctggaaaccggcagcctgaagctggccaacggaagagtgatcgagaagacactgtacaacagaagaacccggcaggatgagcctgccctgttcgtggccctgaccttcgagcggcgggaggtcctggactcctccaatatcaaaccaatgaacctgatcggcgtggcaagaggcgaaaacatccccgccgtgatcgccctgaccgaccccgagggctgcccactgagccggtttaaggatagcctgggaaacccaacccacatcctgagaatcggcgagagctataaggagaagcagcggaccatccaggccaagaaggaggtggagcagcggagagccggcggctacagccggaagtacgccagcaaagccaagaatctggcagacgatatggtgagaaacaccgctagagatctgctgtactacgccgtgacccaggatgccatgctgatcttcgccaacctgagccggggcttcggccggcagggcaagcggaccttcatggccgagagacagtacacacggatggaggactggctgaccgccaagctggcctacgagggcctgagcaagacctacctgtccaagacactggcccagtacacctccaagacatgcagcaactgtgggtttaccatcaccagcgccgactacgacagggtgctggagaagctgaagaagacagcaacaggctggatgaccacaattaacggcaaggagctgaaggtggagggccagattacctactacaacagatacaagagacagaacgtagtcaaggacctgtccgtcgagctggatagactgagcgaagaatctgtgaacaacgacatctcctcctggacaaagggcagaagcggagaagctctgagcctcctgaagaaaagattctcccatagacccgtgcaggagaagttcgtgtgcctgaactgcggcttcgagacacacgcagccgagcaagccgccctgaacatcgccagatcctggctgttcctgcggagccaggagtacaagaaataccagacaaacaagacaaccggcaacaccgataagagagccttcgtcgagacctggcagtccttttaccggaagaagcttaaggaggtgtggaaacctgccgtgcggtctggcggatctggcggaggctccttgcaaggagagcgtgatcttcaaggacgtgtgcgtgaacttcagcctggaggagtgggagtgcctggacctgacccagaggaacctgtacaggtgcgtgatgctggagaactacagcaacctggtgagcgtgggcctgagcatccccaagcccgacgtgatcagcctgctggagcagggcaaggagccctggggcgtgttcgacagcgagatgaccaggggcctgaaccaggactgcggcagcggatctggctccggcagcggccccaagaaaaagagaaaagtctaagctgccttctgcggggcttgccttctggccatgcccttcttctctcccttgcacctgtacctcttggtctttgaataaagcctgagtaggaaggctagcaaaaaaaaaaaaaaaaaaaaaaaaaaaaaaaaaaaaaaaaaaaaaaaaaaaaaaaaaaaaaaaaaaaaaaaaaaaaaaaa

SEQ ID NO: 15783 - RNA, 9485 nt, synthetic construct
  source 1..9485: mol_type = other RNA
aggaaataagagagaaaagaagagtaagaagaaatataagagccaccatggcccctaagaagaagcgtaaagtgagccggatggaacgcctcgtctacgaggtgcggcagaagtgcagaaacatcgaggacatctgcatctcctgcggatctctgaacgtgaccctggagcacccactgttcatcggcggcatgtgccagaactgtaaaaactgttttctggagtgtgcctatcaatacgacgatgacggctaccagagctactgcaccatctgttgcggcggaagagaggtgctgatgtgtggaaataacaactgctgccggtgcttctgcgtggaatgcgtggacctgctggtgggccccggcgccgcccaggccgctattaaggaagatccttggaactgctacatgtgcggccacaagggcacatacggcctgctgagacggagagaggactggcctagcagactgcagatgttcttcgccaataaccacgaccaggagttcgacccccctaaggtgtaccctcccgtccccgccgagaagagaaagcccatccgggtcctgagcctgttcgatggcatcgccaccggtctgctggtgctgaaggacctgggcatccaggtggataggtacattgcctccgaggtgtgcgaggactccatcaccgtgggaatggtgcgtcatcagggcaagatcatgtacgtgggcgacgtgcggagcgtgacacagaagcatatccaggagtggggccctttcgacctggtgatcggcggcagcccttgcaatgacctgagcatcgtgaacccagcccggaagggcctgtacgagggaaccggcagactgttcttcgagttttacagactgctgcacgacgcccggcctaaggaaggcgacgaccggcccttcttttggctgttcgagaatgtggtggccatgggagtcagcgacaagcgggatattagccggttcctggagagcaaccccgtgatgatcgatgccaaggaagtgagcgccgcccaccgggccagatacttctggggcaatctgcctggcatgaacagacccctggccagcaccgtgaacgacaagctggagctgcaggagtgcctggagcacggccggatcgccaagttcagcaaggtgagaaccatcaccacccgaagcaacagcatcaaacaaggcaaggaccagcactttcctgtgttcatgaacgagaaggaggacatcctgtggtgtaccgagatggagagagtgttcgggttcccagtccactacacagatgtcagcaacatgtctagactggccagacagagactgctgggaagaagctggtccgtccctgtgatcagacacctgttcgcccctctgaaggagtacttcgcctgcgtgagcagcggcaacagcaacgccaacagccggggccccagcttctctagcggcctggtgccactgtccctgagagggagccacatgggccccatggagatctacaaaaccgtgagcgcctggaagcggcagcctgtgcgcgtgctgagcctgtttcggaatatcgataaagtcctgaaaagcctgggattcctggagagcggctctggctccggcggtggcaccctgaagtacgtggaggatgtgacaaacgtggtcagacgggatgtggagaagtggggccccttcgatctggtgtacggcagcacccaacccctgggcagctcttgtgaccggtgccctggctggtacatgtttcagttccaccggatcctgcagtacgccctgccgagacaggagtcccagcggccattcttttggattttcatggacaacttgctgctgaccgaggatgaccaggaaactaccactcggttcctgcagaccgaagccgtgaccctgcaggacgtgagaggccgggactaccagaacgccatgcgggtgtggtccaacatccctggactgaaaagcaagcacgcacctctgacccctaaagaagaggagtacctgcaggcccaggtgcggagcagaagcaagctggacgcccctaaggtggatctgctggtgaagaattgcctcctgcccctgagagagtacttcaagtatttcagccagaatagtctgcccctgggaggcagcggcggcggcgccctggtgacatttgaggacgtcgccgtgcggttcacccaggaggaatgggctctgctggatccttctcagaaaatcctgtaccgggacgtgatgagagagacataccggaatctgacctccgtgggcatcaactgggaatgttgggaccttgaagcctgcttcagaagcctgggaagaaacctgagagtgcaggtggtgaagagaaagtgcgagctgaccaacagcggcccctgcgccgagggcggcccaagcagcggcgcccctcctcccagcggcggcagcccagccggctccccaacctctaccgaggagggcacctctgagtccgccacccccgagagcggccctggcacctccaccgagcccagcgagggcagcgcacccggcagccctgccggcagccccacctccacagaggagggaaccagcaccgagcccagcgaaggcagcgccccaggcaccagcaccgagcctagtgagcaggagattaaacggatcaacaagatcagaagaagacttgtgaaagacagcaacaccaagaaggccggcaagacaggccccatgaaaaccctgctggttagagtgatgacacccgatctgagagagcggctggaaaacctgagaaagaagcctgaaaatatcccccagcccatcagcaatacatctagagccaacctgaataagctgctgaccgattacaccgaaatgaagaaggcgatcctgcatgtgtactgggaagagttccagaaggaccctgtgggcctgatgagccgggtggcccagcctgccagcaagaagatcgatcagaacaagctgaaacctgagatggacgagaagggcaacctgaccaccgccggctttgcctgctctcagtgtggccagcccctgttcgtgtacaagctggagcaggtgtctgagaagggcaaggcttacaccaactacttcggacggtgcaatgtggccgagcacgaaaagctgatcctgctggcccagctgaagcccgagaaggatagcgacgaagccgtgacatatagcctgggaaagtttgggcagagggccctggatttctacagcattcatgtgaccaaggagtccacccaccccgtgaagcccctggcccagatcgccggaaacagatacgcctccggacctgtgggaaaggccctgagcgacgcatgtatgggcacaatcgcctccttcctgtctaagtaccaggacatcatcatcgaacaccagaaggtggtgaagggcaaccagaagagactggagagcctgcgggagctggccggcaaggaaaacctggaataccctagcgtgaccctgccacctcagcctcacaccaaggagggcgttgatgcctacaacgaagtgatcgcccgggtgcgaatgtgggtgaacctgaacctgtggcagaagctgaagctaagcagagatgatgccaagcctctgctgagactgaagggattcccttcctttcctctggtcgagagacaggccaacgaagtggactggtgggacatggtgtgtaacgtgaagaagctgatcaacgagaaaaaggaggatggcaaggtgttttggcagaatctggctggctacaagagacaggaagccctgagaccatacctgagcagcgaggaagatcggaagaagggaaagaaattcgctcggtaccagctgggcgacctgctgctgcacctggaaaagaagcacggcgaggactggggaaaggtgtacgacgaggcctgggagcggattgacaagaaagtggaaggcctgagcaagcacatcaagctggaagaggaacggagaagcgaggacgcccagagcaaggccgccctgaccgactggctgcgggctaaggccagcttcgtgatcgagggcctgaaggaggccgacaaggacgagttctgcagatgcgagctgaagctgcagaagtggtacggggacctgcggggaaagcccttcgccatcgaagccgagaacagcatcctggacatcagcggcttcagcaagcagtacaactgtgccttcatctggcagaaggacggcgtgaagaagctgaacctgtacctgatcatcaactacttcaagggcggcaagctgcggttcaagaagatcaaacctgaagccttcgaagccaacagattctacaccgtgatcaacaaaaagagcggcgagatcgtgcccatggaggtgaacttcaacttcgacgaccccaacctgatcatcctgcctctggcctttggcaagagacagggcagagaattcatctggaacgacctgctgtccctggaaaccggcagcctgaagctggccaacggaagagtgatcgagaagacactgtacaacagaagaacccggcaggatgagcctgccctgttcgtggccctgaccttcgagcggcgggaggtcctggactcctccaatatcaaaccaatgaacctgatcggcgtggcaagaggcgaaaacatccccgccgtgatcgccctgaccgaccccgagggctgcccactgagccggtttaaggatagcctgggaaacccaacccacatcctgagaatcggcgagagctataaggagaagcagcggaccatccaggccaagaaggaggtggagcagcggagagccggcggctacagccggaagtacgccagcaaagccaagaatctggcagacgatatggtgagaaacaccgctagagatctgctgtactacgccgtgacccaggatgccatgctgatcttcgccaacctgagccggggcttcggccggcagggcaagcggaccttcatggccgagagacagtacacacggatggaggactggctgaccgccaagctggcctacgagggcctgagcaagacctacctgtccaagacactggcccagtacacctccaagacatgcagcaactgtgggtttaccatcaccagcgccgactacgacagggtgctggagaagctgaagaagacagcaacaggctggatgaccacaattaacggcaaggagctgaaggtggagggccagattacctactacaacagatacaagagacagaacgtagtcaaggacctgtccgtcgagctggatagactgagcgaagaatctgtgaacaacgacatctcctcctggacaaagggcagaagcggagaagctctgagcctcctgaagaaaagattctcccatagacccgtgcaggagaagttcgtgtgcctgaactgcggcttcgagacacacgcagccgagcaagccgccctgaacatcgccagatcctggctgttcctgcggagccaggagtacaagaaataccagacaaacaagacaaccggcaacaccgataagagagccttcgtcgagacctggcagtccttttaccggaagaagcttaaggaggtgtggaaacctgccgtgcggtctggcggatctggcggaggctccgtgggccaccccgtgaccttcagggacgtggccgtggacttcagcctggaggagtggaggtgcctgagccccgcccagagggccctgtacagggacgtgatgctggagaactacgagaacctggtgagcgtgggcctgcccgtgagcaagcccaccgtgatcagcctgctggagaagggcgaggccccctggatgccccaggccggcgcccccaggggcccctgccccgactacctgagctggggcggcccaagcagcggcgcccctcctcccagcggcggcagcccagccggctccccaacctctaccgaggagggcacctctgagtccgccacccccgagagcggccctggcacctccaccgagcccagcgagggcagcgcacccggcagccctgccggcagccccacctccacagaggagggaaccagcaccgagcccagcgaaggcagcgccccaggcaccagcaccgagcctagtgagcaggagattaaacggatcaacaagatcagaagaagacttgtgaaagacagcaacaccaagaaggccggcaagacaggccccatgaaaaccctgctggttagagtgatgacacccgatctgagagagcggctggaaaacctgagaaagaagcctgaaaatatcccccagcccatcagcaatacatctagagccaacctgaataagctgctgaccgattacaccgaaatgaagaaggcgatcctgcatgtgtactgggaagagttccagaaggaccctgtgggcctgatgagccgggtggcccagcctgccagcaagaagatcgatcagaacaagctgaaacctgagatggacgagaagggcaacctgaccaccgccggctttgcctgctctcagtgtggccagcccctgttcgtgtacaagctggagcaggtgtctgagaagggcaaggcttacaccaactacttcggacggtgcaatgtggccgagcacgaaaagctgatcctgctggcccagctgaagcccgagaaggatagcgacgaagccgtgacatatagcctgggaaagtttgggcagagggccctggatttctacagcattcatgtgaccaaggagtccacccaccccgtgaagcccctggcccagatcgccggaaacagatacgcctccggacctgtgggaaaggccctgagcgacgcatgtatgggcacaatcgcctccttcctgtctaagtaccaggacatcatcatcgaacaccagaaggtggtgaagggcaaccagaagagactggagagcctgcgggagctggccggcaaggaaaacctggaataccctagcgtgaccctgccacctcagcctcacaccaaggagggcgttgatgcctacaacgaagtgatcgcccgggtgcgaatgtgggtgaacctgaacctgtggcagaagctgaagctaagcagagatgatgccaagcctctgctgagactgaagggattcccttcctttcctctggtcgagagacaggccaacgaagtggactggtgggacatggtgtgtaacgtgaagaagctgatcaacgagaaaaaggaggatggcaaggtgttttggcagaatctggctggctacaagagacaggaagccctgagaccatacctgagcagcgaggaagatcggaagaagggaaagaaattcgctcggtaccagctgggcgacctgctgctgcacctggaaaagaagcacggcgaggactggggaaaggtgtacgacgaggcctgggagcggattgacaagaaagtggaaggcctgagcaagcacatcaagctggaagaggaacggagaagcgaggacgcccagagcaaggccgccctgaccgactggctgcgggctaaggccagcttcgtgatcgagggcctgaaggaggccgacaaggacgagttctgcagatgcgagctgaagctgcagaagtggtacggggacctgcggggaaagcccttcgccatcgaagccgagaacagcatcctggacatcagcggcttcagcaagcagtacaactgtgccttcatctggcagaaggacggcgtgaagaagctgaacctgtacctgatcatcaactacttcaagggcggcaagctgcggttcaagaagatcaaacctgaagccttcgaagccaacagattctacaccgtgatcaacaaaaagagcggcgagatcgtgcccatggaggtgaacttcaacttcgacgaccccaacctgatcatcctgcctctggcctttggcaagagacagggcagagaattcatctggaacgacctgctgtccctggaaaccggcagcctgaagctggccaacggaagagtgatcgagaagacactgtacaacagaagaacccggcaggatgagcctgccctgttcgtggccctgaccttcgagcggcgggaggtcctggactcctccaatatcaaaccaatgaacctgatcggcgtggcaagaggcgaaaacatccccgccgtgatcgccctgaccgaccccgagggctgcccactgagccggtttaaggatagcctgggaaacccaacccacatcctgagaatcggcgagagctataaggagaagcagcggaccatccaggccaagaaggaggtggagcagcggagagccggcggctacagccggaagtacgccagcaaagccaagaatctggcagacgatatggtgagaaacaccgctagagatctgctgtactacgccgtgacccaggatgccatgctgatcttcgccaacctgagccggggcttcggccggcagggcaagcggaccttcatggccgagagacagtacacacggatggaggactggctgaccgccaagctggcctacgagggcctgagcaagacctacctgtccaagacactggcccagtacacctccaagacatgcagcaactgtgggtttaccatcaccagcgccgactacgacagggtgctggagaagctgaagaagacagcaacaggctggatgaccacaattaacggcaaggagctgaaggtggagggccagattacctactacaacagatacaagagacagaacgtagtcaaggacctgtccgtcgagctggatagactgagcgaagaatctgtgaacaacgacatctcctcctggacaaagggcagaagcggagaagctctgagcctcctgaagaaaagattctcccatagacccgtgcaggagaagttcgtgtgcctgaactgcggcttcgagacacacgcagccgagcaagccgccctgaacatcgccagatcctggctgttcctgcggagccaggagtacaagaaataccagacaaacaagacaaccggcaacaccgataagagagccttcgtcgagacctggcagtccttttaccggaagaagcttaaggaggtgtggaaacctgccgtgcggtctggcggatctggcggaggctcctgtgggccaccccgtgaccttcagggacgtggccgtggacttcagcctggaggagtggaggtgcctgagccccgcccagagggccctgtacagggacgtgatgctggagaactacgagaacctggtgagcgtgggcctgcccgtgagcaagcccaccgtgatcagcctgctggagaagggcgaggccccctggatgccccaggccggcgcccccaggggcccctgccccgactacctgagctggggatctggctccggcagcggccccaagaaaaagagaaaagtctaagctgccttctgcggggcttgccttctggccatgcccttcttctctcccttgcacctgtacctcttggtctttgaataaagcctgagtaggaaggctagcaaaaaaaaaaaaaaaaaaaaaaaaaaaaaaaaaaaaaaaaaaaaaaaaaaaaaaaaaaaaaaaaaaaaaaaaaaaaaaaa

SEQ ID NO: 15784 - RNA, 9485 nt, synthetic construct
  source 1..9485: mol_type = other RNA
aggaaataagagagaaaagaagagtaagaagaaatataagagccaccatggcccctaagaagaagcgtaaagtgagccggatggaacgcctcgtctacgaggtgcggcagaagtgcagaaacatcgaggacatctgcatctcctgcggatctctgaacgtgaccctggagcacccactgttcatcggcggcatgtgccagaactgtaaaaactgttttctggagtgtgcctatcaatacgacgatgacggctaccagagctactgcaccatctgttgcggcggaagagaggtgctgatgtgtggaaataacaactgctgccggtgcttctgcgtggaatgcgtggacctgctggtgggccccggcgccgcccaggccgctattaaggaagatccttggaactgctacatgtgcggccacaagggcacatacggcctgctgagacggagagaggactggcctagcagactgcagatgttcttcgccaataaccacgaccaggagttcgacccccctaaggtgtaccctcccgtccccgccgagaagagaaagcccatccgggtcctgagcctgttcgatggcatcgccaccggtctgctggtgctgaaggacctgggcatccaggtggataggtacattgcctccgaggtgtgcgaggactccatcaccgtgggaatggtgcgtcatcagggcaagatcatgtacgtgggcgacgtgcggagcgtgacacagaagcatatccaggagtggggccctttcgacctggtgatcggcggcagcccttgcaatgacctgagcatcgtgaacccagcccggaagggcctgtacgagggaaccggcagactgttcttcgagttttacagactgctgcacgacgcccggcctaaggaaggcgacgaccggcccttcttttggctgttcgagaatgtggtggccatgggagtcagcgacaagcgggatattagccggttcctggagagcaaccccgtgatgatcgatgccaaggaagtgagcgccgcccaccgggccagatacttctggggcaatctgcctggcatgaacagacccctggccagcaccgtgaacgacaagctggagctgcaggagtgcctggagcacggccggatcgccaagttcagcaaggtgagaaccatcaccacccgaagcaacagcatcaaacaaggcaaggaccagcactttcctgtgttcatgaacgagaaggaggacatcctgtggtgtaccgagatggagagagtgttcgggttcccagtccactacacagatgtcagcaacatgtctagactggccagacagagactgctgggaagaagctggtccgtccctgtgatcagacacctgttcgcccctctgaaggagtacttcgcctgcgtgagcagcggcaacagcaacgccaacagccggggccccagcttctctagcggcctggtgccactgtccctgagagggagccacatgggccccatggagatctacaaaaccgtgagcgcctggaagcggcagcctgtgcgcgtgctgagcctgtttcggaatatcgataaagtcctgaaaagcctgggattcctggagagcggctctggctccggcggtggcaccctgaagtacgtggaggatgtgacaaacgtggtcagacgggatgtggagaagtggggccccttcgatctggtgtacggcagcacccaacccctgggcagctcttgtgaccggtgccctggctggtacatgtttcagttccaccggatcctgcagtacgccctgccgagacaggagtcccagcggccattcttttggattttcatggacaacttgctgctgaccgaggatgaccaggaaactaccactcggttcctgcagaccgaagccgtgaccctgcaggacgtgagaggccgggactaccagaacgccatgcgggtgtggtccaacatccctggactgaaaagcaagcacgcacctctgacccctaaagaagaggagtacctgcaggcccaggtgcggagcagaagcaagctggacgcccctaaggtggatctgctggtgaagaattgcctcctgcccctgagagagtacttcaagtatttcagccagaatagtctgcccctgggaggcagcggcggcggcgccctggtgacatttgaggacgtcgccgtgcggttcacccaggaggaatgggctctgctggatccttctcagaaaatcctgtaccgggacgtgatgagagagacataccggaatctgacctccgtgggcatcaactgggaatgttgggaccttgaagcctgcttcagaagcctgggaagaaacctgagagtgcaggtggtgaagagaaagtgcgagctgaccaacagcggcccctgcgccgagggcggcccaagcagcggcgcccctcctcccagcggcggcagcccagccggctccccaacctctaccgaggagggcacctctgagtccgccacccccgagagcggccctggcacctccaccgagcccagcgagggcagcgcacccggcagccctgccggcagccccacctccacagaggagggaaccagcaccgagcccagcgaaggcagcgccccaggcaccagcaccgagcctagtgagcaggagattaaacggatcaacaagatcagaagaagacttgtgaaagacagcaacaccaagaaggccggcaagacaggccccatgaaaaccctgctggttagagtgatgacacccgatctgagagagcggctggaaaacctgagaaagaagcctgaaaatatcccccagcccatcagcaatacatctagagccaacctgaataagctgctgaccgattacaccgaaatgaagaaggcgatcctgcatgtgtactgggaagagttccagaaggaccctgtgggcctgatgagccgggtggcccagcctgccagcaagaagatcgatcagaacaagctgaaacctgagatggacgagaagggcaacctgaccaccgccggctttgcctgctctcagtgtggccagcccctgttcgtgtacaagctggagcaggtgtctgagaagggcaaggcttacaccaactacttcggacggtgcaatgtggccgagcacgaaaagctgatcctgctggcccagctgaagcccgagaaggatagcgacgaagccgtgacatatagcctgggaaagtttgggcagagggccctggatttctacagcattcatgtgaccaaggagtccacccaccccgtgaagcccctggcccagatcgccggaaacagatacgcctccggacctgtgggaaaggccctgagcgacgcatgtatgggcacaatcgcctccttcctgtctaagtaccaggacatcatcatcgaacaccagaaggtggtgaagggcaaccagaagagactggagagcctgcgggagctggccggcaaggaaaacctggaataccctagcgtgaccctgccacctcagcctcacaccaaggagggcgttgatgcctacaacgaagtgatcgcccgggtgcgaatgtgggtgaacctgaacctgtggcagaagctgaagctaagcagagatgatgccaagcctctgctgagactgaagggattcccttcctttcctctggtcgagagacaggccaacgaagtggactggtgggacatggtgtgtaacgtgaagaagctgatcaacgagaaaaaggaggatggcaaggtgttttggcagaatctggctggctacaagagacaggaagccctgagaccatacctgagcagcgaggaagatcggaagaagggaaagaaattcgctcggtaccagctgggcgacctgctgctgcacctggaaaagaagcacggcgaggactggggaaaggtgtacgacgaggcctgggagcggattgacaagaaagtggaaggcctgagcaagcacatcaagctggaagaggaacggagaagcgaggacgcccagagcaaggccgccctgaccgactggctgcgggctaaggccagcttcgtgatcgagggcctgaaggaggccgacaaggacgagttctgcagatgcgagctgaagctgcagaagtggtacggggacctgcggggaaagcccttcgccatcgaagccgagaacagcatcctggacatcagcggcttcagcaagcagtacaactgtgccttcatctggcagaaggacggcgtgaagaagctgaacctgtacctgatcatcaactacttcaagggcggcaagctgcggttcaagaagatcaaacctgaagccttcgaagccaacagattctacaccgtgatcaacaaaaagagcggcgagatcgtgcccatggaggtgaacttcaacttcgacgaccccaacctgatcatcctgcctctggcctttggcaagagacagggcagagaattcatctggaacgacctgctgtccctggaaaccggcagcctgaagctggccaacggaagagtgatcgagaagacactgtacaacagaagaacccggcaggatgagcctgccctgttcgtggccctgaccttcgagcggcgggaggtcctggactcctccaatatcaaaccaatgaacctgatcggcgtggcaagaggcgaaaacatccccgccgtgatcgccctgaccgaccccgagggctgcccactgagccggtttaaggatagcctgggaaacccaacccacatcctgagaatcggcgagagctataaggagaagcagcggaccatccaggccaagaaggaggtggagcagcggagagccggcggctacagccggaagtacgccagcaaagccaagaatctggcagacgatatggtgagaaacaccgctagagatctgctgtactacgccgtgacccaggatgccatgctgatcttcgccaacctgagccggggcttcggccggcagggcaagcggaccttcatggccgagagacagtacacacggatggaggactggctgaccgccaagctggcctacgagggcctgagcaagacctacctgtccaagacactggcccagtacacctccaagacatgcagcaactgtgggtttaccatcaccagcgccgactacgacagggtgctggagaagctgaagaagacagcaacaggctggatgaccacaattaacggcaaggagctgaaggtggagggccagattacctactacaacagatacaagagacagaacgtagtcaaggacctgtccgtcgagctggatagactgagcgaagaatctgtgaacaacgacatctcctcctggacaaagggcagaagcggagaagctctgagcctcctgaagaaaagattctcccatagacccgtgcaggagaagttcgtgtgcctgaactgcggcttcgagacacacgcagccgagcaagccgccctgaacatcgccagatcctggctgttcctgcggagccaggagtacaagaaataccagacaaacaagacaaccggcaacaccgataagagagccttcgtcgagacctggcagtccttttaccggaagaagcttaaggaggtgtggaaacctgccgtgcggtctggcggatctggcggaggctccttccaggacttcgtgagcttcaacgacgtgagcgtgaacttcaccgaggaggagtggagggagctggaccccgtgcagagggtgctgtacagggacgtgatgctggagaactacaggaacctggtgagcctgggcttccccttcagcaagcccgacatcatcagccagctggagcaggccgtgaacccctggatgcaggagggcgaggtgctgaggggcagctgcacccacctggagaccaggggcggcccaagcagcggcgcccctcctcccagcggcggcagcccagccggctccccaacctctaccgaggagggcacctctgagtccgccacccccgagagcggccctggcacctccaccgagcccagcgagggcagcgcacccggcagccctgccggcagccccacctccacagaggagggaaccagcaccgagcccagcgaaggcagcgccccaggcaccagcaccgagcctagtgagcaggagattaaacggatcaacaagatcagaagaagacttgtgaaagacagcaacaccaagaaggccggcaagacaggccccatgaaaaccctgctggttagagtgatgacacccgatctgagagagcggctggaaaacctgagaaagaagcctgaaaatatcccccagcccatcagcaatacatctagagccaacctgaataagctgctgaccgattacaccgaaatgaagaaggcgatcctgcatgtgtactgggaagagttccagaaggaccctgtgggcctgatgagccgggtggcccagcctgccagcaagaagatcgatcagaacaagctgaaacctgagatggacgagaagggcaacctgaccaccgccggctttgcctgctctcagtgtggccagcccctgttcgtgtacaagctggagcaggtgtctgagaagggcaaggcttacaccaactacttcggacggtgcaatgtggccgagcacgaaaagctgatcctgctggcccagctgaagcccgagaaggatagcgacgaagccgtgacatatagcctgggaaagtttgggcagagggccctggatttctacagcattcatgtgaccaaggagtccacccaccccgtgaagcccctggcccagatcgccggaaacagatacgcctccggacctgtgggaaaggccctgagcgacgcatgtatgggcacaatcgcctccttcctgtctaagtaccaggacatcatcatcgaacaccagaaggtggtgaagggcaaccagaagagactggagagcctgcgggagctggccggcaaggaaaacctggaataccctagcgtgaccctgccacctcagcctcacaccaaggagggcgttgatgcctacaacgaagtgatcgcccgggtgcgaatgtgggtgaacctgaacctgtggcagaagctgaagctaagcagagatgatgccaagcctctgctgagactgaagggattcccttcctttcctctggtcgagagacaggccaacgaagtggactggtgggacatggtgtgtaacgtgaagaagctgatcaacgagaaaaaggaggatggcaaggtgttttggcagaatctggctggctacaagagacaggaagccctgagaccatacctgagcagcgaggaagatcggaagaagggaaagaaattcgctcggtaccagctgggcgacctgctgctgcacctggaaaagaagcacggcgaggactggggaaaggtgtacgacgaggcctgggagcggattgacaagaaagtggaaggcctgagcaagcacatcaagctggaagaggaacggagaagcgaggacgcccagagcaaggccgccctgaccgactggctgcgggctaaggccagcttcgtgatcgagggcctgaaggaggccgacaaggacgagttctgcagatgcgagctgaagctgcagaagtggtacggggacctgcggggaaagcccttcgccatcgaagccgagaacagcatcctggacatcagcggcttcagcaagcagtacaactgtgccttcatctggcagaaggacggcgtgaagaagctgaacctgtacctgatcatcaactacttcaagggcggcaagctgcggttcaagaagatcaaacctgaagccttcgaagccaacagattctacaccgtgatcaacaaaaagagcggcgagatcgtgcccatggaggtgaacttcaacttcgacgaccccaacctgatcatcctgcctctggcctttggcaagagacagggcagagaattcatctggaacgacctgctgtccctggaaaccggcagcctgaagctggccaacggaagagtgatcgagaagacactgtacaacagaagaacccggcaggatgagcctgccctgttcgtggccctgaccttcgagcggcgggaggtcctggactcctccaatatcaaaccaatgaacctgatcggcgtggcaagaggcgaaaacatccccgccgtgatcgccctgaccgaccccgagggctgcccactgagccggtttaaggatagcctgggaaacccaacccacatcctgagaatcggcgagagctataaggagaagcagcggaccatccaggccaagaaggaggtggagcagcggagagccggcggctacagccggaagtacgccagcaaagccaagaatctggcagacgatatggtgagaaacaccgctagagatctgctgtactacgccgtgacccaggatgccatgctgatcttcgccaacctgagccggggcttcggccggcagggcaagcggaccttcatggccgagagacagtacacacggatggaggactggctgaccgccaagctggcctacgagggcctgagcaagacctacctgtccaagacactggcccagtacacctccaagacatgcagcaactgtgggtttaccatcaccagcgccgactacgacagggtgctggagaagctgaagaagacagcaacaggctggatgaccacaattaacggcaaggagctgaaggtggagggccagattacctactacaacagatacaagagacagaacgtagtcaaggacctgtccgtcgagctggatagactgagcgaagaatctgtgaacaacgacatctcctcctggacaaagggcagaagcggagaagctctgagcctcctgaagaaaagattctcccatagacccgtgcaggagaagttcgtgtgcctgaactgcggcttcgagacacacgcagccgagcaagccgccctgaacatcgccagatcctggctgttcctgcggagccaggagtacaagaaataccagacaaacaagacaaccggcaacaccgataagagagccttcgtcgagacctggcagtccttttaccggaagaagcttaaggaggtgtggaaacctgccgtgcggtctggcggatctggcggaggctcctttccaggacttcgtgagcttcaacgacgtgagcgtgaacttcaccgaggaggagtggagggagctggaccccgtgcagagggtgctgtacagggacgtgatgctggagaactacaggaacctggtgagcctgggcttccccttcagcaagcccgacatcatcagccagctggagcaggccgtgaacccctggatgcaggagggcgaggtgctgaggggcagctgcacccacctggagaccaggggatctggctccggcagcggccccaagaaaaagagaaaagtctaagctgccttctgcggggcttgccttctggccatgcccttcttctctcccttgcacctgtacctcttggtctttgaataaagcctgagtaggaaggctagcaaaaaaaaaaaaaaaaaaaaaaaaaaaaaaaaaaaaaaaaaaaaaaaaaaaaaaaaaaaaaaaaaaaaaaaaaaaaaaaa

SEQ ID NO: 15785 - RNA, 9485 nt, synthetic construct
  source 1..9485: mol_type = other RNA
aggaaataagagagaaaagaagagtaagaagaaatataagagccaccatggcccctaagaagaagcgtaaagtgagccggatggaacgcctcgtctacgaggtgcggcagaagtgcagaaacatcgaggacatctgcatctcctgcggatctctgaacgtgaccctggagcacccactgttcatcggcggcatgtgccagaactgtaaaaactgttttctggagtgtgcctatcaatacgacgatgacggctaccagagctactgcaccatctgttgcggcggaagagaggtgctgatgtgtggaaataacaactgctgccggtgcttctgcgtggaatgcgtggacctgctggtgggccccggcgccgcccaggccgctattaaggaagatccttggaactgctacatgtgcggccacaagggcacatacggcctgctgagacggagagaggactggcctagcagactgcagatgttcttcgccaataaccacgaccaggagttcgacccccctaaggtgtaccctcccgtccccgccgagaagagaaagcccatccgggtcctgagcctgttcgatggcatcgccaccggtctgctggtgctgaaggacctgggcatccaggtggataggtacattgcctccgaggtgtgcgaggactccatcaccgtgggaatggtgcgtcatcagggcaagatcatgtacgtgggcgacgtgcggagcgtgacacagaagcatatccaggagtggggccctttcgacctggtgatcggcggcagcccttgcaatgacctgagcatcgtgaacccagcccggaagggcctgtacgagggaaccggcagactgttcttcgagttttacagactgctgcacgacgcccggcctaaggaaggcgacgaccggcccttcttttggctgttcgagaatgtggtggccatgggagtcagcgacaagcgggatattagccggttcctggagagcaaccccgtgatgatcgatgccaaggaagtgagcgccgcccaccgggccagatacttctggggcaatctgcctggcatgaacagacccctggccagcaccgtgaacgacaagctggagctgcaggagtgcctggagcacggccggatcgccaagttcagcaaggtgagaaccatcaccacccgaagcaacagcatcaaacaaggcaaggaccagcactttcctgtgttcatgaacgagaaggaggacatcctgtggtgtaccgagatggagagagtgttcgggttcccagtccactacacagatgtcagcaacatgtctagactggccagacagagactgctgggaagaagctggtccgtccctgtgatcagacacctgttcgcccctctgaaggagtacttcgcctgcgtgagcagcggcaacagcaacgccaacagccggggccccagcttctctagcggcctggtgccactgtccctgagagggagccacatgggccccatggagatctacaaaaccgtgagcgcctggaagcggcagcctgtgcgcgtgctgagcctgtttcggaatatcgataaagtcctgaaaagcctgggattcctggagagcggctctggctccggcggtggcaccctgaagtacgtggaggatgtgacaaacgtggtcagacgggatgtggagaagtggggccccttcgatctggtgtacggcagcacccaacccctgggcagctcttgtgaccggtgccctggctggtacatgtttcagttccaccggatcctgcagtacgccctgccgagacaggagtcccagcggccattcttttggattttcatggacaacttgctgctgaccgaggatgaccaggaaactaccactcggttcctgcagaccgaagccgtgaccctgcaggacgtgagaggccgggactaccagaacgccatgcgggtgtggtccaacatccctggactgaaaagcaagcacgcacctctgacccctaaagaagaggagtacctgcaggcccaggtgcggagcagaagcaagctggacgcccctaaggtggatctgctggtgaagaattgcctcctgcccctgagagagtacttcaagtatttcagccagaatagtctgcccctgggaggcagcggcggcggcgccctggtgacatttgaggacgtcgccgtgcggttcacccaggaggaatgggctctgctggatccttctcagaaaatcctgtaccgggacgtgatgagagagacataccggaatctgacctccgtgggcatcaactgggaatgttgggaccttgaagcctgcttcagaagcctgggaagaaacctgagagtgcaggtggtgaagagaaagtgcgagctgaccaacagcggcccctgcgccgagggcggcccaagcagcggcgcccctcctcccagcggcggcagcccagccggctccccaacctctaccgaggagggcacctctgagtccgccacccccgagagcggccctggcacctccaccgagcccagcgagggcagcgcacccggcagccctgccggcagccccacctccacagaggagggaaccagcaccgagcccagcgaaggcagcgccccaggcaccagcaccgagcctagtgagcaggagattaaacggatcaacaagatcagaagaagacttgtgaaagacagcaacaccaagaaggccggcaagacaggccccatgaaaaccctgctggttagagtgatgacacccgatctgagagagcggctggaaaacctgagaaagaagcctgaaaatatcccccagcccatcagcaatacatctagagccaacctgaataagctgctgaccgattacaccgaaatgaagaaggcgatcctgcatgtgtactgggaagagttccagaaggaccctgtgggcctgatgagccgggtggcccagcctgccagcaagaagatcgatcagaacaagctgaaacctgagatggacgagaagggcaacctgaccaccgccggctttgcctgctctcagtgtggccagcccctgttcgtgtacaagctggagcaggtgtctgagaagggcaaggcttacaccaactacttcggacggtgcaatgtggccgagcacgaaaagctgatcctgctggcccagctgaagcccgagaaggatagcgacgaagccgtgacatatagcctgggaaagtttgggcagagggccctggatttctacagcattcatgtgaccaaggagtccacccaccccgtgaagcccctggcccagatcgccggaaacagatacgcctccggacctgtgggaaaggccctgagcgacgcatgtatgggcacaatcgcctccttcctgtctaagtaccaggacatcatcatcgaacaccagaaggtggtgaagggcaaccagaagagactggagagcctgcgggagctggccggcaaggaaaacctggaataccctagcgtgaccctgccacctcagcctcacaccaaggagggcgttgatgcctacaacgaagtgatcgcccgggtgcgaatgtgggtgaacctgaacctgtggcagaagctgaagctaagcagagatgatgccaagcctctgctgagactgaagggattcccttcctttcctctggtcgagagacaggccaacgaagtggactggtgggacatggtgtgtaacgtgaagaagctgatcaacgagaaaaaggaggatggcaaggtgttttggcagaatctggctggctacaagagacaggaagccctgagaccatacctgagcagcgaggaagatcggaagaagggaaagaaattcgctcggtaccagctgggcgacctgctgctgcacctggaaaagaagcacggcgaggactggggaaaggtgtacgacgaggcctgggagcggattgacaagaaagtggaaggcctgagcaagcacatcaagctggaagaggaacggagaagcgaggacgcccagagcaaggccgccctgaccgactggctgcgggctaaggccagcttcgtgatcgagggcctgaaggaggccgacaaggacgagttctgcagatgcgagctgaagctgcagaagtggtacggggacctgcggggaaagcccttcgccatcgaagccgagaacagcatcctggacatcagcggcttcagcaagcagtacaactgtgccttcatctggcagaaggacggcgtgaagaagctgaacctgtacctgatcatcaactacttcaagggcggcaagctgcggttcaagaagatcaaacctgaagccttcgaagccaacagattctacaccgtgatcaacaaaaagagcggcgagatcgtgcccatggaggtgaacttcaacttcgacgaccccaacctgatcatcctgcctctggcctttggcaagagacagggcagagaattcatctggaacgacctgctgtccctggaaaccggcagcctgaagctggccaacggaagagtgatcgagaagacactgtacaacagaagaacccggcaggatgagcctgccctgttcgtggccctgaccttcgagcggcgggaggtcctggactcctccaatatcaaaccaatgaacctgatcggcgtggcaagaggcgaaaacatccccgccgtgatcgccctgaccgaccccgagggctgcccactgagccggtttaaggatagcctgggaaacccaacccacatcctgagaatcggcgagagctataaggagaagcagcggaccatccaggccaagaaggaggtggagcagcggagagccggcggctacagccggaagtacgccagcaaagccaagaatctggcagacgatatggtgagaaacaccgctagagatctgctgtactacgccgtgacccaggatgccatgctgatcttcgccaacctgagccggggcttcggccggcagggcaagcggaccttcatggccgagagacagtacacacggatggaggactggctgaccgccaagctggcctacgagggcctgagcaagacctacctgtccaagacactggcccagtacacctccaagacatgcagcaactgtgggtttaccatcaccagcgccgactacgacagggtgctggagaagctgaagaagacagcaacaggctggatgaccacaattaacggcaaggagctgaaggtggagggccagattacctactacaacagatacaagagacagaacgtagtcaaggacctgtccgtcgagctggatagactgagcgaagaatctgtgaacaacgacatctcctcctggacaaagggcagaagcggagaagctctgagcctcctgaagaaaagattctcccatagacccgtgcaggagaagttcgtgtgcctgaactgcggcttcgagacacacgcagccgagcaagccgccctgaacatcgccagatcctggctgttcctgcggagccaggagtacaagaaataccagacaaacaagacaaccggcaacaccgataagagagccttcgtcgagacctggcagtccttttaccggaagaagcttaaggaggtgtggaaacctgccgtgcggtctggcggatctggcggaggctccccccacaggctggtgctgttcagggacgtggccgtggacttcagccaggaggagtgggcctgcctggacagcgagcagaaggacctgtacagggacgtgatgctggagaactacagcaacctggtgagcctgggcttcagcagcagcaaggccgacatgctgagcctgctggagcagggcaaggagccctggaaggtggtgcaggacgtggccaggagccagagcagcgacctgggcagcaggggcggcccaagcagcggcgcccctcctcccagcggcggcagcccagccggctccccaacctctaccgaggagggcacctctgagtccgccacccccgagagcggccctggcacctccaccgagcccagcgagggcagcgcacccggcagccctgccggcagccccacctccacagaggagggaaccagcaccgagcccagcgaaggcagcgccccaggcaccagcaccgagcctagtgagcaggagattaaacggatcaacaagatcagaagaagacttgtgaaagacagcaacaccaagaaggccggcaagacaggccccatgaaaaccctgctggttagagtgatgacacccgatctgagagagcggctggaaaacctgagaaagaagcctgaaaatatcccccagcccatcagcaatacatctagagccaacctgaataagctgctgaccgattacaccgaaatgaagaaggcgatcctgcatgtgtactgggaagagttccagaaggaccctgtgggcctgatgagccgggtggcccagcctgccagcaagaagatcgatcagaacaagctgaaacctgagatggacgagaagggcaacctgaccaccgccggctttgcctgctctcagtgtggccagcccctgttcgtgtacaagctggagcaggtgtctgagaagggcaaggcttacaccaactacttcggacggtgcaatgtggccgagcacgaaaagctgatcctgctggcccagctgaagcccgagaaggatagcgacgaagccgtgacatatagcctgggaaagtttgggcagagggccctggatttctacagcattcatgtgaccaaggagtccacccaccccgtgaagcccctggcccagatcgccggaaacagatacgcctccggacctgtgggaaaggccctgagcgacgcatgtatgggcacaatcgcctccttcctgtctaagtaccaggacatcatcatcgaacaccagaaggtggtgaagggcaaccagaagagactggagagcctgcgggagctggccggcaaggaaaacctggaataccctagcgtgaccctgccacctcagcctcacaccaaggagggcgttgatgcctacaacgaagtgatcgcccgggtgcgaatgtgggtgaacctgaacctgtggcagaagctgaagctaagcagagatgatgccaagcctctgctgagactgaagggattcccttcctttcctctggtcgagagacaggccaacgaagtggactggtgggacatggtgtgtaacgtgaagaagctgatcaacgagaaaaaggaggatggcaaggtgttttggcagaatctggctggctacaagagacaggaagccctgagaccatacctgagcagcgaggaagatcggaagaagggaaagaaattcgctcggtaccagctgggcgacctgctgctgcacctggaaaagaagcacggcgaggactggggaaaggtgtacgacgaggcctgggagcggattgacaagaaagtggaaggcctgagcaagcacatcaagctggaagaggaacggagaagcgaggacgcccagagcaaggccgccctgaccgactggctgcgggctaaggccagcttcgtgatcgagggcctgaaggaggccgacaaggacgagttctgcagatgcgagctgaagctgcagaagtggtacggggacctgcggggaaagcccttcgccatcgaagccgagaacagcatcctggacatcagcggcttcagcaagcagtacaactgtgccttcatctggcagaaggacggcgtgaagaagctgaacctgtacctgatcatcaactacttcaagggcggcaagctgcggttcaagaagatcaaacctgaagccttcgaagccaacagattctacaccgtgatcaacaaaaagagcggcgagatcgtgcccatggaggtgaacttcaacttcgacgaccccaacctgatcatcctgcctctggcctttggcaagagacagggcagagaattcatctggaacgacctgctgtccctggaaaccggcagcctgaagctggccaacggaagagtgatcgagaagacactgtacaacagaagaacccggcaggatgagcctgccctgttcgtggccctgaccttcgagcggcgggaggtcctggactcctccaatatcaaaccaatgaacctgatcggcgtggcaagaggcgaaaacatccccgccgtgatcgccctgaccgaccccgagggctgcccactgagccggtttaaggatagcctgggaaacccaacccacatcctgagaatcggcgagagctataaggagaagcagcggaccatccaggccaagaaggaggtggagcagcggagagccggcggctacagccggaagtacgccagcaaagccaagaatctggcagacgatatggtgagaaacaccgctagagatctgctgtactacgccgtgacccaggatgccatgctgatcttcgccaacctgagccggggcttcggccggcagggcaagcggaccttcatggccgagagacagtacacacggatggaggactggctgaccgccaagctggcctacgagggcctgagcaagacctacctgtccaagacactggcccagtacacctccaagacatgcagcaactgtgggtttaccatcaccagcgccgactacgacagggtgctggagaagctgaagaagacagcaacaggctggatgaccacaattaacggcaaggagctgaaggtggagggccagattacctactacaacagatacaagagacagaacgtagtcaaggacctgtccgtcgagctggatagactgagcgaagaatctgtgaacaacgacatctcctcctggacaaagggcagaagcggagaagctctgagcctcctgaagaaaagattctcccatagacccgtgcaggagaagttcgtgtgcctgaactgcggcttcgagacacacgcagccgagcaagccgccctgaacatcgccagatcctggctgttcctgcggagccaggagtacaagaaataccagacaaacaagacaaccggcaacaccgataagagagccttcgtcgagacctggcagtccttttaccggaagaagcttaaggaggtgtggaaacctgccgtgcggtctggcggatctggcggaggctcctccccacaggctggtgctgttcagggacgtggccgtggacttcagccaggaggagtgggcctgcctggacagcgagcagaaggacctgtacagggacgtgatgctggagaactacagcaacctggtgagcctgggcttcagcagcagcaaggccgacatgctgagcctgctggagcagggcaaggagccctggaaggtggtgcaggacgtggccaggagccagagcagcgacctgggcagcaggggatctggctccggcagcggccccaagaaaaagagaaaagtctaagctgccttctgcggggcttgccttctggccatgcccttcttctctcccttgcacctgtacctcttggtctttgaataaagcctgagtaggaaggctagcaaaaaaaaaaaaaaaaaaaaaaaaaaaaaaaaaaaaaaaaaaaaaaaaaaaaaaaaaaaaaaaaaaaaaaaaaaaaaaaa

SEQ ID NO: 15786 - RNA, 9485 nt, synthetic construct
  source 1..9485: mol_type = other RNA
aggaaataagagagaaaagaagagtaagaagaaatataagagccaccatggcccctaagaagaagcgtaaagtgagccggatggaacgcctcgtctacgaggtgcggcagaagtgcagaaacatcgaggacatctgcatctcctgcggatctctgaacgtgaccctggagcacccactgttcatcggcggcatgtgccagaactgtaaaaactgttttctggagtgtgcctatcaatacgacgatgacggctaccagagctactgcaccatctgttgcggcggaagagaggtgctgatgtgtggaaataacaactgctgccggtgcttctgcgtggaatgcgtggacctgctggtgggccccggcgccgcccaggccgctattaaggaagatccttggaactgctacatgtgcggccacaagggcacatacggcctgctgagacggagagaggactggcctagcagactgcagatgttcttcgccaataaccacgaccaggagttcgacccccctaaggtgtaccctcccgtccccgccgagaagagaaagcccatccgggtcctgagcctgttcgatggcatcgccaccggtctgctggtgctgaaggacctgggcatccaggtggataggtacattgcctccgaggtgtgcgaggactccatcaccgtgggaatggtgcgtcatcagggcaagatcatgtacgtgggcgacgtgcggagcgtgacacagaagcatatccaggagtggggccctttcgacctggtgatcggcggcagcccttgcaatgacctgagcatcgtgaacccagcccggaagggcctgtacgagggaaccggcagactgttcttcgagttttacagactgctgcacgacgcccggcctaaggaaggcgacgaccggcccttcttttggctgttcgagaatgtggtggccatgggagtcagcgacaagcgggatattagccggttcctggagagcaaccccgtgatgatcgatgccaaggaagtgagcgccgcccaccgggccagatacttctggggcaatctgcctggcatgaacagacccctggccagcaccgtgaacgacaagctggagctgcaggagtgcctggagcacggccggatcgccaagttcagcaaggtgagaaccatcaccacccgaagcaacagcatcaaacaaggcaaggaccagcactttcctgtgttcatgaacgagaaggaggacatcctgtggtgtaccgagatggagagagtgttcgggttcccagtccactacacagatgtcagcaacatgtctagactggccagacagagactgctgggaagaagctggtccgtccctgtgatcagacacctgttcgcccctctgaaggagtacttcgcctgcgtgagcagcggcaacagcaacgccaacagccggggccccagcttctctagcggcctggtgccactgtccctgagagggagccacatgggccccatggagatctacaaaaccgtgagcgcctggaagcggcagcctgtgcgcgtgctgagcctgtttcggaatatcgataaagtcctgaaaagcctgggattcctggagagcggctctggctccggcggtggcaccctgaagtacgtggaggatgtgacaaacgtggtcagacgggatgtggagaagtggggccccttcgatctggtgtacggcagcacccaacccctgggcagctcttgtgaccggtgccctggctggtacatgtttcagttccaccggatcctgcagtacgccctgccgagacaggagtcccagcggccattcttttggattttcatggacaacttgctgctgaccgaggatgaccaggaaactaccactcggttcctgcagaccgaagccgtgaccctgcaggacgtgagaggccgggactaccagaacgccatgcgggtgtggtccaacatccctggactgaaaagcaagcacgcacctctgacccctaaagaagaggagtacctgcaggcccaggtgcggagcagaagcaagctggacgcccctaaggtggatctgctggtgaagaattgcctcctgcccctgagagagtacttcaagtatttcagccagaatagtctgcccctgggaggcagcggcggcggcgccctggtgacatttgaggacgtcgccgtgcggttcacccaggaggaatgggctctgctggatccttctcagaaaatcctgtaccgggacgtgatgagagagacataccggaatctgacctccgtgggcatcaactgggaatgttgggaccttgaagcctgcttcagaagcctgggaagaaacctgagagtgcaggtggtgaagagaaagtgcgagctgaccaacagcggcccctgcgccgagggcggcccaagcagcggcgcccctcctcccagcggcggcagcccagccggctccccaacctctaccgaggagggcacctctgagtccgccacccccgagagcggccctggcacctccaccgagcccagcgagggcagcgcacccggcagccctgccggcagccccacctccacagaggagggaaccagcaccgagcccagcgaaggcagcgccccaggcaccagcaccgagcctagtgagcaggagattaaacggatcaacaagatcagaagaagacttgtgaaagacagcaacaccaagaaggccggcaagacaggccccatgaaaaccctgctggttagagtgatgacacccgatctgagagagcggctggaaaacctgagaaagaagcctgaaaatatcccccagcccatcagcaatacatctagagccaacctgaataagctgctgaccgattacaccgaaatgaagaaggcgatcctgcatgtgtactgggaagagttccagaaggaccctgtgggcctgatgagccgggtggcccagcctgccagcaagaagatcgatcagaacaagctgaaacctgagatggacgagaagggcaacctgaccaccgccggctttgcctgctctcagtgtggccagcccctgttcgtgtacaagctggagcaggtgtctgagaagggcaaggcttacaccaactacttcggacggtgcaatgtggccgagcacgaaaagctgatcctgctggcccagctgaagcccgagaaggatagcgacgaagccgtgacatatagcctgggaaagtttgggcagagggccctggatttctacagcattcatgtgaccaaggagtccacccaccccgtgaagcccctggcccagatcgccggaaacagatacgcctccggacctgtgggaaaggccctgagcgacgcatgtatgggcacaatcgcctccttcctgtctaagtaccaggacatcatcatcgaacaccagaaggtggtgaagggcaaccagaagagactggagagcctgcgggagctggccggcaaggaaaacctggaataccctagcgtgaccctgccacctcagcctcacaccaaggagggcgttgatgcctacaacgaagtgatcgcccgggtgcgaatgtgggtgaacctgaacctgtggcagaagctgaagctaagcagagatgatgccaagcctctgctgagactgaagggattcccttcctttcctctggtcgagagacaggccaacgaagtggactggtgggacatggtgtgtaacgtgaagaagctgatcaacgagaaaaaggaggatggcaaggtgttttggcagaatctggctggctacaagagacaggaagccctgagaccatacctgagcagcgaggaagatcggaagaagggaaagaaattcgctcggtaccagctgggcgacctgctgctgcacctggaaaagaagcacggcgaggactggggaaaggtgtacgacgaggcctgggagcggattgacaagaaagtggaaggcctgagcaagcacatcaagctggaagaggaacggagaagcgaggacgcccagagcaaggccgccctgaccgactggctgcgggctaaggccagcttcgtgatcgagggcctgaaggaggccgacaaggacgagttctgcagatgcgagctgaagctgcagaagtggtacggggacctgcggggaaagcccttcgccatcgaagccgagaacagcatcctggacatcagcggcttcagcaagcagtacaactgtgccttcatctggcagaaggacggcgtgaagaagctgaacctgtacctgatcatcaactacttcaagggcggcaagctgcggttcaagaagatcaaacctgaagccttcgaagccaacagattctacaccgtgatcaacaaaaagagcggcgagatcgtgcccatggaggtgaacttcaacttcgacgaccccaacctgatcatcctgcctctggcctttggcaagagacagggcagagaattcatctggaacgacctgctgtccctggaaaccggcagcctgaagctggccaacggaagagtgatcgagaagacactgtacaacagaagaacccggcaggatgagcctgccctgttcgtggccctgaccttcgagcggcgggaggtcctggactcctccaatatcaaaccaatgaacctgatcggcgtggcaagaggcgaaaacatccccgccgtgatcgccctgaccgaccccgagggctgcccactgagccggtttaaggatagcctgggaaacccaacccacatcctgagaatcggcgagagctataaggagaagcagcggaccatccaggccaagaaggaggtggagcagcggagagccggcggctacagccggaagtacgccagcaaagccaagaatctggcagacgatatggtgagaaacaccgctagagatctgctgtactacgccgtgacccaggatgccatgctgatcttcgccaacctgagccggggcttcggccggcagggcaagcggaccttcatggccgagagacagtacacacggatggaggactggctgaccgccaagctggcctacgagggcctgagcaagacctacctgtccaagacactggcccagtacacctccaagacatgcagcaactgtgggtttaccatcaccagcgccgactacgacagggtgctggagaagctgaagaagacagcaacaggctggatgaccacaattaacggcaaggagctgaaggtggagggccagattacctactacaacagatacaagagacagaacgtagtcaaggacctgtccgtcgagctggatagactgagcgaagaatctgtgaacaacgacatctcctcctggacaaagggcagaagcggagaagctctgagcctcctgaagaaaagattctcccatagacccgtgcaggagaagttcgtgtgcctgaactgcggcttcgagacacacgcagccgagcaagccgccctgaacatcgccagatcctggctgttcctgcggagccaggagtacaagaaataccagacaaacaagacaaccggcaacaccgataagagagccttcgtcgagacctggcagtccttttaccggaagaagcttaaggaggtgtggaaacctgccgtgcggtctggcggatctggcggaggctcctaccaggagatggtgaccttcgaggacgtggccgtgcacttcaccaagaccgagtggaccggcctgagccccgcccagagggccctgtacaggagcgtgatgctggagaacttcggcaacctgaccgccctgggctaccccgtgcccaagcccgccctgatcagcctgctggagggcggcgacatggactggggcctggaggcccaggacgacccccccgccgagaggaccaagaacgtgtgcggcggcccaagcagcggcgcccctcctcccagcggcggcagcccagccggctccccaacctctaccgaggagggcacctctgagtccgccacccccgagagcggccctggcacctccaccgagcccagcgagggcagcgcacccggcagccctgccggcagccccacctccacagaggagggaaccagcaccgagcccagcgaaggcagcgccccaggcaccagcaccgagcctagtgagcaggagattaaacggatcaacaagatcagaagaagacttgtgaaagacagcaacaccaagaaggccggcaagacaggccccatgaaaaccctgctggttagagtgatgacacccgatctgagagagcggctggaaaacctgagaaagaagcctgaaaatatcccccagcccatcagcaatacatctagagccaacctgaataagctgctgaccgattacaccgaaatgaagaaggcgatcctgcatgtgtactgggaagagttccagaaggaccctgtgggcctgatgagccgggtggcccagcctgccagcaagaagatcgatcagaacaagctgaaacctgagatggacgagaagggcaacctgaccaccgccggctttgcctgctctcagtgtggccagcccctgttcgtgtacaagctggagcaggtgtctgagaagggcaaggcttacaccaactacttcggacggtgcaatgtggccgagcacgaaaagctgatcctgctggcccagctgaagcccgagaaggatagcgacgaagccgtgacatatagcctgggaaagtttgggcagagggccctggatttctacagcattcatgtgaccaaggagtccacccaccccgtgaagcccctggcccagatcgccggaaacagatacgcctccggacctgtgggaaaggccctgagcgacgcatgtatgggcacaatcgcctccttcctgtctaagtaccaggacatcatcatcgaacaccagaaggtggtgaagggcaaccagaagagactggagagcctgcgggagctggccggcaaggaaaacctggaataccctagcgtgaccctgccacctcagcctcacaccaaggagggcgttgatgcctacaacgaagtgatcgcccgggtgcgaatgtgggtgaacctgaacctgtggcagaagctgaagctaagcagagatgatgccaagcctctgctgagactgaagggattcccttcctttcctctggtcgagagacaggccaacgaagtggactggtgggacatggtgtgtaacgtgaagaagctgatcaacgagaaaaaggaggatggcaaggtgttttggcagaatctggctggctacaagagacaggaagccctgagaccatacctgagcagcgaggaagatcggaagaagggaaagaaattcgctcggtaccagctgggcgacctgctgctgcacctggaaaagaagcacggcgaggactggggaaaggtgtacgacgaggcctgggagcggattgacaagaaagtggaaggcctgagcaagcacatcaagctggaagaggaacggagaagcgaggacgcccagagcaaggccgccctgaccgactggctgcgggctaaggccagcttcgtgatcgagggcctgaaggaggccgacaaggacgagttctgcagatgcgagctgaagctgcagaagtggtacggggacctgcggggaaagcccttcgccatcgaagccgagaacagcatcctggacatcagcggcttcagcaagcagtacaactgtgccttcatctggcagaaggacggcgtgaagaagctgaacctgtacctgatcatcaactacttcaagggcggcaagctgcggttcaagaagatcaaacctgaagccttcgaagccaacagattctacaccgtgatcaacaaaaagagcggcgagatcgtgcccatggaggtgaacttcaacttcgacgaccccaacctgatcatcctgcctctggcctttggcaagagacagggcagagaattcatctggaacgacctgctgtccctggaaaccggcagcctgaagctggccaacggaagagtgatcgagaagacactgtacaacagaagaacccggcaggatgagcctgccctgttcgtggccctgaccttcgagcggcgggaggtcctggactcctccaatatcaaaccaatgaacctgatcggcgtggcaagaggcgaaaacatccccgccgtgatcgccctgaccgaccccgagggctgcccactgagccggtttaaggatagcctgggaaacccaacccacatcctgagaatcggcgagagctataaggagaagcagcggaccatccaggccaagaaggaggtggagcagcggagagccggcggctacagccggaagtacgccagcaaagccaagaatctggcagacgatatggtgagaaacaccgctagagatctgctgtactacgccgtgacccaggatgccatgctgatcttcgccaacctgagccggggcttcggccggcagggcaagcggaccttcatggccgagagacagtacacacggatggaggactggctgaccgccaagctggcctacgagggcctgagcaagacctacctgtccaagacactggcccagtacacctccaagacatgcagcaactgtgggtttaccatcaccagcgccgactacgacagggtgctggagaagctgaagaagacagcaacaggctggatgaccacaattaacggcaaggagctgaaggtggagggccagattacctactacaacagatacaagagacagaacgtagtcaaggacctgtccgtcgagctggatagactgagcgaagaatctgtgaacaacgacatctcctcctggacaaagggcagaagcggagaagctctgagcctcctgaagaaaagattctcccatagacccgtgcaggagaagttcgtgtgcctgaactgcggcttcgagacacacgcagccgagcaagccgccctgaacatcgccagatcctggctgttcctgcggagccaggagtacaagaaataccagacaaacaagacaaccggcaacaccgataagagagccttcgtcgagacctggcagtccttttaccggaagaagcttaaggaggtgtggaaacctgccgtgcggtctggcggatctggcggaggctccttaccaggagatggtgaccttcgaggacgtggccgtgcacttcaccaagaccgagtggaccggcctgagccccgcccagagggccctgtacaggagcgtgatgctggagaacttcggcaacctgaccgccctgggctaccccgtgcccaagcccgccctgatcagcctgctggagggcggcgacatggactggggcctggaggcccaggacgacccccccgccgagaggaccaagaacgtgtgcggatctggctccggcagcggccccaagaaaaagagaaaagtctaagctgccttctgcggggcttgccttctggccatgcccttcttctctcccttgcacctgtacctcttggtctttgaataaagcctgagtaggaaggctagcaaaaaaaaaaaaaaaaaaaaaaaaaaaaaaaaaaaaaaaaaaaaaaaaaaaaaaaaaaaaaaaaaaaaaaaaaaaaaaaa

SEQ ID NO: 15787 - RNA, 9485 nt, synthetic construct
  source 1..9485: mol_type = other RNA
aggaaataagagagaaaagaagagtaagaagaaatataagagccaccatggcccctaagaagaagcgtaaagtgagccggatggaacgcctcgtctacgaggtgcggcagaagtgcagaaacatcgaggacatctgcatctcctgcggatctctgaacgtgaccctggagcacccactgttcatcggcggcatgtgccagaactgtaaaaactgttttctggagtgtgcctatcaatacgacgatgacggctaccagagctactgcaccatctgttgcggcggaagagaggtgctgatgtgtggaaataacaactgctgccggtgcttctgcgtggaatgcgtggacctgctggtgggccccggcgccgcccaggccgctattaaggaagatccttggaactgctacatgtgcggccacaagggcacatacggcctgctgagacggagagaggactggcctagcagactgcagatgttcttcgccaataaccacgaccaggagttcgacccccctaaggtgtaccctcccgtccccgccgagaagagaaagcccatccgggtcctgagcctgttcgatggcatcgccaccggtctgctggtgctgaaggacctgggcatccaggtggataggtacattgcctccgaggtgtgcgaggactccatcaccgtgggaatggtgcgtcatcagggcaagatcatgtacgtgggcgacgtgcggagcgtgacacagaagcatatccaggagtggggccctttcgacctggtgatcggcggcagcccttgcaatgacctgagcatcgtgaacccagcccggaagggcctgtacgagggaaccggcagactgttcttcgagttttacagactgctgcacgacgcccggcctaaggaaggcgacgaccggcccttcttttggctgttcgagaatgtggtggccatgggagtcagcgacaagcgggatattagccggttcctggagagcaaccccgtgatgatcgatgccaaggaagtgagcgccgcccaccgggccagatacttctggggcaatctgcctggcatgaacagacccctggccagcaccgtgaacgacaagctggagctgcaggagtgcctggagcacggccggatcgccaagttcagcaaggtgagaaccatcaccacccgaagcaacagcatcaaacaaggcaaggaccagcactttcctgtgttcatgaacgagaaggaggacatcctgtggtgtaccgagatggagagagtgttcgggttcccagtccactacacagatgtcagcaacatgtctagactggccagacagagactgctgggaagaagctggtccgtccctgtgatcagacacctgttcgcccctctgaaggagtacttcgcctgcgtgagcagcggcaacagcaacgccaacagccggggccccagcttctctagcggcctggtgccactgtccctgagagggagccacatgggccccatggagatctacaaaaccgtgagcgcctggaagcggcagcctgtgcgcgtgctgagcctgtttcggaatatcgataaagtcctgaaaagcctgggattcctggagagcggctctggctccggcggtggcaccctgaagtacgtggaggatgtgacaaacgtggtcagacgggatgtggagaagtggggccccttcgatctggtgtacggcagcacccaacccctgggcagctcttgtgaccggtgccctggctggtacatgtttcagttccaccggatcctgcagtacgccctgccgagacaggagtcccagcggccattcttttggattttcatggacaacttgctgctgaccgaggatgaccaggaaactaccactcggttcctgcagaccgaagccgtgaccctgcaggacgtgagaggccgggactaccagaacgccatgcgggtgtggtccaacatccctggactgaaaagcaagcacgcacctctgacccctaaagaagaggagtacctgcaggcccaggtgcggagcagaagcaagctggacgcccctaaggtggatctgctggtgaagaattgcctcctgcccctgagagagtacttcaagtatttcagccagaatagtctgcccctgggaggcagcggcggcggcgccctggtgacatttgaggacgtcgccgtgcggttcacccaggaggaatgggctctgctggatccttctcagaaaatcctgtaccgggacgtgatgagagagacataccggaatctgacctccgtgggcatcaactgggaatgttgggaccttgaagcctgcttcagaagcctgggaagaaacctgagagtgcaggtggtgaagagaaagtgcgagctgaccaacagcggcccctgcgccgagggcggcccaagcagcggcgcccctcctcccagcggcggcagcccagccggctccccaacctctaccgaggagggcacctctgagtccgccacccccgagagcggccctggcacctccaccgagcccagcgagggcagcgcacccggcagccctgccggcagccccacctccacagaggagggaaccagcaccgagcccagcgaaggcagcgccccaggcaccagcaccgagcctagtgagcaggagattaaacggatcaacaagatcagaagaagacttgtgaaagacagcaacaccaagaaggccggcaagacaggccccatgaaaaccctgctggttagagtgatgacacccgatctgagagagcggctggaaaacctgagaaagaagcctgaaaatatcccccagcccatcagcaatacatctagagccaacctgaataagctgctgaccgattacaccgaaatgaagaaggcgatcctgcatgtgtactgggaagagttccagaaggaccctgtgggcctgatgagccgggtggcccagcctgccagcaagaagatcgatcagaacaagctgaaacctgagatggacgagaagggcaacctgaccaccgccggctttgcctgctctcagtgtggccagcccctgttcgtgtacaagctggagcaggtgtctgagaagggcaaggcttacaccaactacttcggacggtgcaatgtggccgagcacgaaaagctgatcctgctggcccagctgaagcccgagaaggatagcgacgaagccgtgacatatagcctgggaaagtttgggcagagggccctggatttctacagcattcatgtgaccaaggagtccacccaccccgtgaagcccctggcccagatcgccggaaacagatacgcctccggacctgtgggaaaggccctgagcgacgcatgtatgggcacaatcgcctccttcctgtctaagtaccaggacatcatcatcgaacaccagaaggtggtgaagggcaaccagaagagactggagagcctgcgggagctggccggcaaggaaaacctggaataccctagcgtgaccctgccacctcagcctcacaccaaggagggcgttgatgcctacaacgaagtgatcgcccgggtgcgaatgtgggtgaacctgaacctgtggcagaagctgaagctaagcagagatgatgccaagcctctgctgagactgaagggattcccttcctttcctctggtcgagagacaggccaacgaagtggactggtgggacatggtgtgtaacgtgaagaagctgatcaacgagaaaaaggaggatggcaaggtgttttggcagaatctggctggctacaagagacaggaagccctgagaccatacctgagcagcgaggaagatcggaagaagggaaagaaattcgctcggtaccagctgggcgacctgctgctgcacctggaaaagaagcacggcgaggactggggaaaggtgtacgacgaggcctgggagcggattgacaagaaagtggaaggcctgagcaagcacatcaagctggaagaggaacggagaagcgaggacgcccagagcaaggccgccctgaccgactggctgcgggctaaggccagcttcgtgatcgagggcctgaaggaggccgacaaggacgagttctgcagatgcgagctgaagctgcagaagtggtacggggacctgcggggaaagcccttcgccatcgaagccgagaacagcatcctggacatcagcggcttcagcaagcagtacaactgtgccttcatctggcagaaggacggcgtgaagaagctgaacctgtacctgatcatcaactacttcaagggcggcaagctgcggttcaagaagatcaaacctgaagccttcgaagccaacagattctacaccgtgatcaacaaaaagagcggcgagatcgtgcccatggaggtgaacttcaacttcgacgaccccaacctgatcatcctgcctctggcctttggcaagagacagggcagagaattcatctggaacgacctgctgtccctggaaaccggcagcctgaagctggccaacggaagagtgatcgagaagacactgtacaacagaagaacccggcaggatgagcctgccctgttcgtggccctgaccttcgagcggcgggaggtcctggactcctccaatatcaaaccaatgaacctgatcggcgtggcaagaggcgaaaacatccccgccgtgatcgccctgaccgaccccgagggctgcccactgagccggtttaaggatagcctgggaaacccaacccacatcctgagaatcggcgagagctataaggagaagcagcggaccatccaggccaagaaggaggtggagcagcggagagccggcggctacagccggaagtacgccagcaaagccaagaatctggcagacgatatggtgagaaacaccgctagagatctgctgtactacgccgtgacccaggatgccatgctgatcttcgccaacctgagccggggcttcggccggcagggcaagcggaccttcatggccgagagacagtacacacggatggaggactggctgaccgccaagctggcctacgagggcctgagcaagacctacctgtccaagacactggcccagtacacctccaagacatgcagcaactgtgggtttaccatcaccagcgccgactacgacagggtgctggagaagctgaagaagacagcaacaggctggatgaccacaattaacggcaaggagctgaaggtggagggccagattacctactacaacagatacaagagacagaacgtagtcaaggacctgtccgtcgagctggatagactgagcgaagaatctgtgaacaacgacatctcctcctggacaaagggcagaagcggagaagctctgagcctcctgaagaaaagattctcccatagacccgtgcaggagaagttcgtgtgcctgaactgcggcttcgagacacacgcagccgagcaagccgccctgaacatcgccagatcctggctgttcctgcggagccaggagtacaagaaataccagacaaacaagacaaccggcaacaccgataagagagccttcgtcgagacctggcagtccttttaccggaagaagcttaaggaggtgtggaaacctgccgtgcggtctggcggatctggcggaggctccgccgaggtgcccgtggccttcgaggacgtggccgtgtacttcacccaggaggagtggggcagcctggacaagaggcagaaggagctgtacagggacgtgatgtggatgaactacgagctgctggccagcctgggccccgccgccgccaagcccgacctgatcagcaagctggagaggagggccgccccctggatcaaggacaccaggggccccaagtggggcaagggcaagaggaagaccgtgggcggcccaagcagcggcgcccctcctcccagcggcggcagcccagccggctccccaacctctaccgaggagggcacctctgagtccgccacccccgagagcggccctggcacctccaccgagcccagcgagggcagcgcacccggcagccctgccggcagccccacctccacagaggagggaaccagcaccgagcccagcgaaggcagcgccccaggcaccagcaccgagcctagtgagcaggagattaaacggatcaacaagatcagaagaagacttgtgaaagacagcaacaccaagaaggccggcaagacaggccccatgaaaaccctgctggttagagtgatgacacccgatctgagagagcggctggaaaacctgagaaagaagcctgaaaatatcccccagcccatcagcaatacatctagagccaacctgaataagctgctgaccgattacaccgaaatgaagaaggcgatcctgcatgtgtactgggaagagttccagaaggaccctgtgggcctgatgagccgggtggcccagcctgccagcaagaagatcgatcagaacaagctgaaacctgagatggacgagaagggcaacctgaccaccgccggctttgcctgctctcagtgtggccagcccctgttcgtgtacaagctggagcaggtgtctgagaagggcaaggcttacaccaactacttcggacggtgcaatgtggccgagcacgaaaagctgatcctgctggcccagctgaagcccgagaaggatagcgacgaagccgtgacatatagcctgggaaagtttgggcagagggccctggatttctacagcattcatgtgaccaaggagtccacccaccccgtgaagcccctggcccagatcgccggaaacagatacgcctccggacctgtgggaaaggccctgagcgacgcatgtatgggcacaatcgcctccttcctgtctaagtaccaggacatcatcatcgaacaccagaaggtggtgaagggcaaccagaagagactggagagcctgcgggagctggccggcaaggaaaacctggaataccctagcgtgaccctgccacctcagcctcacaccaaggagggcgttgatgcctacaacgaagtgatcgcccgggtgcgaatgtgggtgaacctgaacctgtggcagaagctgaagctaagcagagatgatgccaagcctctgctgagactgaagggattcccttcctttcctctggtcgagagacaggccaacgaagtggactggtgggacatggtgtgtaacgtgaagaagctgatcaacgagaaaaaggaggatggcaaggtgttttggcagaatctggctggctacaagagacaggaagccctgagaccatacctgagcagcgaggaagatcggaagaagggaaagaaattcgctcggtaccagctgggcgacctgctgctgcacctggaaaagaagcacggcgaggactggggaaaggtgtacgacgaggcctgggagcggattgacaagaaagtggaaggcctgagcaagcacatcaagctggaagaggaacggagaagcgaggacgcccagagcaaggccgccctgaccgactggctgcgggctaaggccagcttcgtgatcgagggcctgaaggaggccgacaaggacgagttctgcagatgcgagctgaagctgcagaagtggtacggggacctgcggggaaagcccttcgccatcgaagccgagaacagcatcctggacatcagcggcttcagcaagcagtacaactgtgccttcatctggcagaaggacggcgtgaagaagctgaacctgtacctgatcatcaactacttcaagggcggcaagctgcggttcaagaagatcaaacctgaagccttcgaagccaacagattctacaccgtgatcaacaaaaagagcggcgagatcgtgcccatggaggtgaacttcaacttcgacgaccccaacctgatcatcctgcctctggcctttggcaagagacagggcagagaattcatctggaacgacctgctgtccctggaaaccggcagcctgaagctggccaacggaagagtgatcgagaagacactgtacaacagaagaacccggcaggatgagcctgccctgttcgtggccctgaccttcgagcggcgggaggtcctggactcctccaatatcaaaccaatgaacctgatcggcgtggcaagaggcgaaaacatccccgccgtgatcgccctgaccgaccccgagggctgcccactgagccggtttaaggatagcctgggaaacccaacccacatcctgagaatcggcgagagctataaggagaagcagcggaccatccaggccaagaaggaggtggagcagcggagagccggcggctacagccggaagtacgccagcaaagccaagaatctggcagacgatatggtgagaaacaccgctagagatctgctgtactacgccgtgacccaggatgccatgctgatcttcgccaacctgagccggggcttcggccggcagggcaagcggaccttcatggccgagagacagtacacacggatggaggactggctgaccgccaagctggcctacgagggcctgagcaagacctacctgtccaagacactggcccagtacacctccaagacatgcagcaactgtgggtttaccatcaccagcgccgactacgacagggtgctggagaagctgaagaagacagcaacaggctggatgaccacaattaacggcaaggagctgaaggtggagggccagattacctactacaacagatacaagagacagaacgtagtcaaggacctgtccgtcgagctggatagactgagcgaagaatctgtgaacaacgacatctcctcctggacaaagggcagaagcggagaagctctgagcctcctgaagaaaagattctcccatagacccgtgcaggagaagttcgtgtgcctgaactgcggcttcgagacacacgcagccgagcaagccgccctgaacatcgccagatcctggctgttcctgcggagccaggagtacaagaaataccagacaaacaagacaaccggcaacaccgataagagagccttcgtcgagacctggcagtccttttaccggaagaagcttaaggaggtgtggaaacctgccgtgcggtctggcggatctggcggaggctcctgccgaggtgcccgtggccttcgaggacgtggccgtgtacttcacccaggaggagtggggcagcctggacaagaggcagaaggagctgtacagggacgtgatgtggatgaactacgagctgctggccagcctgggccccgccgccgccaagcccgacctgatcagcaagctggagaggagggccgccccctggatcaaggacaccaggggccccaagtggggcaagggcaagaggaagaccgtgggatctggctccggcagcggccccaagaaaaagagaaaagtctaagctgccttctgcggggcttgccttctggccatgcccttcttctctcccttgcacctgtacctcttggtctttgaataaagcctgagtaggaaggctagcaaaaaaaaaaaaaaaaaaaaaaaaaaaaaaaaaaaaaaaaaaaaaaaaaaaaaaaaaaaaaaaaaaaaaaaaaaaaaaaa

SEQ ID NO: 15788 - RNA, 9485 nt, synthetic construct
  source 1..9485: mol_type = other RNA
aggaaataagagagaaaagaagagtaagaagaaatataagagccaccatggcccctaagaagaagcgtaaagtgagccggatggaacgcctcgtctacgaggtgcggcagaagtgcagaaacatcgaggacatctgcatctcctgcggatctctgaacgtgaccctggagcacccactgttcatcggcggcatgtgccagaactgtaaaaactgttttctggagtgtgcctatcaatacgacgatgacggctaccagagctactgcaccatctgttgcggcggaagagaggtgctgatgtgtggaaataacaactgctgccggtgcttctgcgtggaatgcgtggacctgctggtgggccccggcgccgcccaggccgctattaaggaagatccttggaactgctacatgtgcggccacaagggcacatacggcctgctgagacggagagaggactggcctagcagactgcagatgttcttcgccaataaccacgaccaggagttcgacccccctaaggtgtaccctcccgtccccgccgagaagagaaagcccatccgggtcctgagcctgttcgatggcatcgccaccggtctgctggtgctgaaggacctgggcatccaggtggataggtacattgcctccgaggtgtgcgaggactccatcaccgtgggaatggtgcgtcatcagggcaagatcatgtacgtgggcgacgtgcggagcgtgacacagaagcatatccaggagtggggccctttcgacctggtgatcggcggcagcccttgcaatgacctgagcatcgtgaacccagcccggaagggcctgtacgagggaaccggcagactgttcttcgagttttacagactgctgcacgacgcccggcctaaggaaggcgacgaccggcccttcttttggctgttcgagaatgtggtggccatgggagtcagcgacaagcgggatattagccggttcctggagagcaaccccgtgatgatcgatgccaaggaagtgagcgccgcccaccgggccagatacttctggggcaatctgcctggcatgaacagacccctggccagcaccgtgaacgacaagctggagctgcaggagtgcctggagcacggccggatcgccaagttcagcaaggtgagaaccatcaccacccgaagcaacagcatcaaacaaggcaaggaccagcactttcctgtgttcatgaacgagaaggaggacatcctgtggtgtaccgagatggagagagtgttcgggttcccagtccactacacagatgtcagcaacatgtctagactggccagacagagactgctgggaagaagctggtccgtccctgtgatcagacacctgttcgcccctctgaaggagtacttcgcctgcgtgagcagcggcaacagcaacgccaacagccggggccccagcttctctagcggcctggtgccactgtccctgagagggagccacatgggccccatggagatctacaaaaccgtgagcgcctggaagcggcagcctgtgcgcgtgctgagcctgtttcggaatatcgataaagtcctgaaaagcctgggattcctggagagcggctctggctccggcggtggcaccctgaagtacgtggaggatgtgacaaacgtggtcagacgggatgtggagaagtggggccccttcgatctggtgtacggcagcacccaacccctgggcagctcttgtgaccggtgccctggctggtacatgtttcagttccaccggatcctgcagtacgccctgccgagacaggagtcccagcggccattcttttggattttcatggacaacttgctgctgaccgaggatgaccaggaaactaccactcggttcctgcagaccgaagccgtgaccctgcaggacgtgagaggccgggactaccagaacgccatgcgggtgtggtccaacatccctggactgaaaagcaagcacgcacctctgacccctaaagaagaggagtacctgcaggcccaggtgcggagcagaagcaagctggacgcccctaaggtggatctgctggtgaagaattgcctcctgcccctgagagagtacttcaagtatttcagccagaatagtctgcccctgggaggcagcggcggcggcgccctggtgacatttgaggacgtcgccgtgcggttcacccaggaggaatgggctctgctggatccttctcagaaaatcctgtaccgggacgtgatgagagagacataccggaatctgacctccgtgggcatcaactgggaatgttgggaccttgaagcctgcttcagaagcctgggaagaaacctgagagtgcaggtggtgaagagaaagtgcgagctgaccaacagcggcccctgcgccgagggcggcccaagcagcggcgcccctcctcccagcggcggcagcccagccggctccccaacctctaccgaggagggcacctctgagtccgccacccccgagagcggccctggcacctccaccgagcccagcgagggcagcgcacccggcagccctgccggcagccccacctccacagaggagggaaccagcaccgagcccagcgaaggcagcgccccaggcaccagcaccgagcctagtgagcaggagattaaacggatcaacaagatcagaagaagacttgtgaaagacagcaacaccaagaaggccggcaagacaggccccatgaaaaccctgctggttagagtgatgacacccgatctgagagagcggctggaaaacctgagaaagaagcctgaaaatatcccccagcccatcagcaatacatctagagccaacctgaataagctgctgaccgattacaccgaaatgaagaaggcgatcctgcatgtgtactgggaagagttccagaaggaccctgtgggcctgatgagccgggtggcccagcctgccagcaagaagatcgatcagaacaagctgaaacctgagatggacgagaagggcaacctgaccaccgccggctttgcctgctctcagtgtggccagcccctgttcgtgtacaagctggagcaggtgtctgagaagggcaaggcttacaccaactacttcggacggtgcaatgtggccgagcacgaaaagctgatcctgctggcccagctgaagcccgagaaggatagcgacgaagccgtgacatatagcctgggaaagtttgggcagagggccctggatttctacagcattcatgtgaccaaggagtccacccaccccgtgaagcccctggcccagatcgccggaaacagatacgcctccggacctgtgggaaaggccctgagcgacgcatgtatgggcacaatcgcctccttcctgtctaagtaccaggacatcatcatcgaacaccagaaggtggtgaagggcaaccagaagagactggagagcctgcgggagctggccggcaaggaaaacctggaataccctagcgtgaccctgccacctcagcctcacaccaaggagggcgttgatgcctacaacgaagtgatcgcccgggtgcgaatgtgggtgaacctgaacctgtggcagaagctgaagctaagcagagatgatgccaagcctctgctgagactgaagggattcccttcctttcctctggtcgagagacaggccaacgaagtggactggtgggacatggtgtgtaacgtgaagaagctgatcaacgagaaaaaggaggatggcaaggtgttttggcagaatctggctggctacaagagacaggaagccctgagaccatacctgagcagcgaggaagatcggaagaagggaaagaaattcgctcggtaccagctgggcgacctgctgctgcacctggaaaagaagcacggcgaggactggggaaaggtgtacgacgaggcctgggagcggattgacaagaaagtggaaggcctgagcaagcacatcaagctggaagaggaacggagaagcgaggacgcccagagcaaggccgccctgaccgactggctgcgggctaaggccagcttcgtgatcgagggcctgaaggaggccgacaaggacgagttctgcagatgcgagctgaagctgcagaagtggtacggggacctgcggggaaagcccttcgccatcgaagccgagaacagcatcctggacatcagcggcttcagcaagcagtacaactgtgccttcatctggcagaaggacggcgtgaagaagctgaacctgtacctgatcatcaactacttcaagggcggcaagctgcggttcaagaagatcaaacctgaagccttcgaagccaacagattctacaccgtgatcaacaaaaagagcggcgagatcgtgcccatggaggtgaacttcaacttcgacgaccccaacctgatcatcctgcctctggcctttggcaagagacagggcagagaattcatctggaacgacctgctgtccctggaaaccggcagcctgaagctggccaacggaagagtgatcgagaagacactgtacaacagaagaacccggcaggatgagcctgccctgttcgtggccctgaccttcgagcggcgggaggtcctggactcctccaatatcaaaccaatgaacctgatcggcgtggcaagaggcgaaaacatccccgccgtgatcgccctgaccgaccccgagggctgcccactgagccggtttaaggatagcctgggaaacccaacccacatcctgagaatcggcgagagctataaggagaagcagcggaccatccaggccaagaaggaggtggagcagcggagagccggcggctacagccggaagtacgccagcaaagccaagaatctggcagacgatatggtgagaaacaccgctagagatctgctgtactacgccgtgacccaggatgccatgctgatcttcgccaacctgagccggggcttcggccggcagggcaagcggaccttcatggccgagagacagtacacacggatggaggactggctgaccgccaagctggcctacgagggcctgagcaagacctacctgtccaagacactggcccagtacacctccaagacatgcagcaactgtgggtttaccatcaccagcgccgactacgacagggtgctggagaagctgaagaagacagcaacaggctggatgaccacaattaacggcaaggagctgaaggtggagggccagattacctactacaacagatacaagagacagaacgtagtcaaggacctgtccgtcgagctggatagactgagcgaagaatctgtgaacaacgacatctcctcctggacaaagggcagaagcggagaagctctgagcctcctgaagaaaagattctcccatagacccgtgcaggagaagttcgtgtgcctgaactgcggcttcgagacacacgcagccgagcaagccgccctgaacatcgccagatcctggctgttcctgcggagccaggagtacaagaaataccagacaaacaagacaaccggcaacaccgataagagagccttcgtcgagacctggcagtccttttaccggaagaagcttaaggaggtgtggaaacctgccgtgcggtctggcggatctggcggaggctcccaccaggagatggtgaccttcgaggacgtggccgtgcacttcaccaagaccgagtggaccggcctgagccccgcccagagggccctgtacaggagcgtgatgctggagaacttcggcaacctgaccgccctgggctaccccgtgcccaagcccgccctgatcagcctgctggagggcggcgacatggcctggggcctggaggcccaggacgacgcccccgccgagaggaccaagaacatctgcggcggcccaagcagcggcgcccctcctcccagcggcggcagcccagccggctccccaacctctaccgaggagggcacctctgagtccgccacccccgagagcggccctggcacctccaccgagcccagcgagggcagcgcacccggcagccctgccggcagccccacctccacagaggagggaaccagcaccgagcccagcgaaggcagcgccccaggcaccagcaccgagcctagtgagcaggagattaaacggatcaacaagatcagaagaagacttgtgaaagacagcaacaccaagaaggccggcaagacaggccccatgaaaaccctgctggttagagtgatgacacccgatctgagagagcggctggaaaacctgagaaagaagcctgaaaatatcccccagcccatcagcaatacatctagagccaacctgaataagctgctgaccgattacaccgaaatgaagaaggcgatcctgcatgtgtactgggaagagttccagaaggaccctgtgggcctgatgagccgggtggcccagcctgccagcaagaagatcgatcagaacaagctgaaacctgagatggacgagaagggcaacctgaccaccgccggctttgcctgctctcagtgtggccagcccctgttcgtgtacaagctggagcaggtgtctgagaagggcaaggcttacaccaactacttcggacggtgcaatgtggccgagcacgaaaagctgatcctgctggcccagctgaagcccgagaaggatagcgacgaagccgtgacatatagcctgggaaagtttgggcagagggccctggatttctacagcattcatgtgaccaaggagtccacccaccccgtgaagcccctggcccagatcgccggaaacagatacgcctccggacctgtgggaaaggccctgagcgacgcatgtatgggcacaatcgcctccttcctgtctaagtaccaggacatcatcatcgaacaccagaaggtggtgaagggcaaccagaagagactggagagcctgcgggagctggccggcaaggaaaacctggaataccctagcgtgaccctgccacctcagcctcacaccaaggagggcgttgatgcctacaacgaagtgatcgcccgggtgcgaatgtgggtgaacctgaacctgtggcagaagctgaagctaagcagagatgatgccaagcctctgctgagactgaagggattcccttcctttcctctggtcgagagacaggccaacgaagtggactggtgggacatggtgtgtaacgtgaagaagctgatcaacgagaaaaaggaggatggcaaggtgttttggcagaatctggctggctacaagagacaggaagccctgagaccatacctgagcagcgaggaagatcggaagaagggaaagaaattcgctcggtaccagctgggcgacctgctgctgcacctggaaaagaagcacggcgaggactggggaaaggtgtacgacgaggcctgggagcggattgacaagaaagtggaaggcctgagcaagcacatcaagctggaagaggaacggagaagcgaggacgcccagagcaaggccgccctgaccgactggctgcgggctaaggccagcttcgtgatcgagggcctgaaggaggccgacaaggacgagttctgcagatgcgagctgaagctgcagaagtggtacggggacctgcggggaaagcccttcgccatcgaagccgagaacagcatcctggacatcagcggcttcagcaagcagtacaactgtgccttcatctggcagaaggacggcgtgaagaagctgaacctgtacctgatcatcaactacttcaagggcggcaagctgcggttcaagaagatcaaacctgaagccttcgaagccaacagattctacaccgtgatcaacaaaaagagcggcgagatcgtgcccatggaggtgaacttcaacttcgacgaccccaacctgatcatcctgcctctggcctttggcaagagacagggcagagaattcatctggaacgacctgctgtccctggaaaccggcagcctgaagctggccaacggaagagtgatcgagaagacactgtacaacagaagaacccggcaggatgagcctgccctgttcgtggccctgaccttcgagcggcgggaggtcctggactcctccaatatcaaaccaatgaacctgatcggcgtggcaagaggcgaaaacatccccgccgtgatcgccctgaccgaccccgagggctgcccactgagccggtttaaggatagcctgggaaacccaacccacatcctgagaatcggcgagagctataaggagaagcagcggaccatccaggccaagaaggaggtggagcagcggagagccggcggctacagccggaagtacgccagcaaagccaagaatctggcagacgatatggtgagaaacaccgctagagatctgctgtactacgccgtgacccaggatgccatgctgatcttcgccaacctgagccggggcttcggccggcagggcaagcggaccttcatggccgagagacagtacacacggatggaggactggctgaccgccaagctggcctacgagggcctgagcaagacctacctgtccaagacactggcccagtacacctccaagacatgcagcaactgtgggtttaccatcaccagcgccgactacgacagggtgctggagaagctgaagaagacagcaacaggctggatgaccacaattaacggcaaggagctgaaggtggagggccagattacctactacaacagatacaagagacagaacgtagtcaaggacctgtccgtcgagctggatagactgagcgaagaatctgtgaacaacgacatctcctcctggacaaagggcagaagcggagaagctctgagcctcctgaagaaaagattctcccatagacccgtgcaggagaagttcgtgtgcctgaactgcggcttcgagacacacgcagccgagcaagccgccctgaacatcgccagatcctggctgttcctgcggagccaggagtacaagaaataccagacaaacaagacaaccggcaacaccgataagagagccttcgtcgagacctggcagtccttttaccggaagaagcttaaggaggtgtggaaacctgccgtgcggtctggcggatctggcggaggctcctcaccaggagatggtgaccttcgaggacgtggccgtgcacttcaccaagaccgagtggaccggcctgagccccgcccagagggccctgtacaggagcgtgatgctggagaacttcggcaacctgaccgccctgggctaccccgtgcccaagcccgccctgatcagcctgctggagggcggcgacatggcctggggcctggaggcccaggacgacgcccccgccgagaggaccaagaacatctgcggatctggctccggcagcggccccaagaaaaagagaaaagtctaagctgccttctgcggggcttgccttctggccatgcccttcttctctcccttgcacctgtacctcttggtctttgaataaagcctgagtaggaaggctagcaaaaaaaaaaaaaaaaaaaaaaaaaaaaaaaaaaaaaaaaaaaaaaaaaaaaaaaaaaaaaaaaaaaaaaaaaaaaaaaa

SEQ ID NO: 15789 - RNA, 9485 nt, synthetic construct
  source 1..9485: mol_type = other RNA
aggaaataagagagaaaagaagagtaagaagaaatataagagccaccatggcccctaagaagaagcgtaaagtgagccggatggaacgcctcgtctacgaggtgcggcagaagtgcagaaacatcgaggacatctgcatctcctgcggatctctgaacgtgaccctggagcacccactgttcatcggcggcatgtgccagaactgtaaaaactgttttctggagtgtgcctatcaatacgacgatgacggctaccagagctactgcaccatctgttgcggcggaagagaggtgctgatgtgtggaaataacaactgctgccggtgcttctgcgtggaatgcgtggacctgctggtgggccccggcgccgcccaggccgctattaaggaagatccttggaactgctacatgtgcggccacaagggcacatacggcctgctgagacggagagaggactggcctagcagactgcagatgttcttcgccaataaccacgaccaggagttcgacccccctaaggtgtaccctcccgtccccgccgagaagagaaagcccatccgggtcctgagcctgttcgatggcatcgccaccggtctgctggtgctgaaggacctgggcatccaggtggataggtacattgcctccgaggtgtgcgaggactccatcaccgtgggaatggtgcgtcatcagggcaagatcatgtacgtgggcgacgtgcggagcgtgacacagaagcatatccaggagtggggccctttcgacctggtgatcggcggcagcccttgcaatgacctgagcatcgtgaacccagcccggaagggcctgtacgagggaaccggcagactgttcttcgagttttacagactgctgcacgacgcccggcctaaggaaggcgacgaccggcccttcttttggctgttcgagaatgtggtggccatgggagtcagcgacaagcgggatattagccggttcctggagagcaaccccgtgatgatcgatgccaaggaagtgagcgccgcccaccgggccagatacttctggggcaatctgcctggcatgaacagacccctggccagcaccgtgaacgacaagctggagctgcaggagtgcctggagcacggccggatcgccaagttcagcaaggtgagaaccatcaccacccgaagcaacagcatcaaacaaggcaaggaccagcactttcctgtgttcatgaacgagaaggaggacatcctgtggtgtaccgagatggagagagtgttcgggttcccagtccactacacagatgtcagcaacatgtctagactggccagacagagactgctgggaagaagctggtccgtccctgtgatcagacacctgttcgcccctctgaaggagtacttcgcctgcgtgagcagcggcaacagcaacgccaacagccggggccccagcttctctagcggcctggtgccactgtccctgagagggagccacatgggccccatggagatctacaaaaccgtgagcgcctggaagcggcagcctgtgcgcgtgctgagcctgtttcggaatatcgataaagtcctgaaaagcctgggattcctggagagcggctctggctccggcggtggcaccctgaagtacgtggaggatgtgacaaacgtggtcagacgggatgtggagaagtggggccccttcgatctggtgtacggcagcacccaacccctgggcagctcttgtgaccggtgccctggctggtacatgtttcagttccaccggatcctgcagtacgccctgccgagacaggagtcccagcggccattcttttggattttcatggacaacttgctgctgaccgaggatgaccaggaaactaccactcggttcctgcagaccgaagccgtgaccctgcaggacgtgagaggccgggactaccagaacgccatgcgggtgtggtccaacatccctggactgaaaagcaagcacgcacctctgacccctaaagaagaggagtacctgcaggcccaggtgcggagcagaagcaagctggacgcccctaaggtggatctgctggtgaagaattgcctcctgcccctgagagagtacttcaagtatttcagccagaatagtctgcccctgggaggcagcggcggcggcgccctggtgacatttgaggacgtcgccgtgcggttcacccaggaggaatgggctctgctggatccttctcagaaaatcctgtaccgggacgtgatgagagagacataccggaatctgacctccgtgggcatcaactgggaatgttgggaccttgaagcctgcttcagaagcctgggaagaaacctgagagtgcaggtggtgaagagaaagtgcgagctgaccaacagcggcccctgcgccgagggcggcccaagcagcggcgcccctcctcccagcggcggcagcccagccggctccccaacctctaccgaggagggcacctctgagtccgccacccccgagagcggccctggcacctccaccgagcccagcgagggcagcgcacccggcagccctgccggcagccccacctccacagaggagggaaccagcaccgagcccagcgaaggcagcgccccaggcaccagcaccgagcctagtgagcaggagattaaacggatcaacaagatcagaagaagacttgtgaaagacagcaacaccaagaaggccggcaagacaggccccatgaaaaccctgctggttagagtgatgacacccgatctgagagagcggctggaaaacctgagaaagaagcctgaaaatatcccccagcccatcagcaatacatctagagccaacctgaataagctgctgaccgattacaccgaaatgaagaaggcgatcctgcatgtgtactgggaagagttccagaaggaccctgtgggcctgatgagccgggtggcccagcctgccagcaagaagatcgatcagaacaagctgaaacctgagatggacgagaagggcaacctgaccaccgccggctttgcctgctctcagtgtggccagcccctgttcgtgtacaagctggagcaggtgtctgagaagggcaaggcttacaccaactacttcggacggtgcaatgtggccgagcacgaaaagctgatcctgctggcccagctgaagcccgagaaggatagcgacgaagccgtgacatatagcctgggaaagtttgggcagagggccctggatttctacagcattcatgtgaccaaggagtccacccaccccgtgaagcccctggcccagatcgccggaaacagatacgcctccggacctgtgggaaaggccctgagcgacgcatgtatgggcacaatcgcctccttcctgtctaagtaccaggacatcatcatcgaacaccagaaggtggtgaagggcaaccagaagagactggagagcctgcgggagctggccggcaaggaaaacctggaataccctagcgtgaccctgccacctcagcctcacaccaaggagggcgttgatgcctacaacgaagtgatcgcccgggtgcgaatgtgggtgaacctgaacctgtggcagaagctgaagctaagcagagatgatgccaagcctctgctgagactgaagggattcccttcctttcctctggtcgagagacaggccaacgaagtggactggtgggacatggtgtgtaacgtgaagaagctgatcaacgagaaaaaggaggatggcaaggtgttttggcagaatctggctggctacaagagacaggaagccctgagaccatacctgagcagcgaggaagatcggaagaagggaaagaaattcgctcggtaccagctgggcgacctgctgctgcacctggaaaagaagcacggcgaggactggggaaaggtgtacgacgaggcctgggagcggattgacaagaaagtggaaggcctgagcaagcacatcaagctggaagaggaacggagaagcgaggacgcccagagcaaggccgccctgaccgactggctgcgggctaaggccagcttcgtgatcgagggcctgaaggaggccgacaaggacgagttctgcagatgcgagctgaagctgcagaagtggtacggggacctgcggggaaagcccttcgccatcgaagccgagaacagcatcctggacatcagcggcttcagcaagcagtacaactgtgccttcatctggcagaaggacggcgtgaagaagctgaacctgtacctgatcatcaactacttcaagggcggcaagctgcggttcaagaagatcaaacctgaagccttcgaagccaacagattctacaccgtgatcaacaaaaagagcggcgagatcgtgcccatggaggtgaacttcaacttcgacgaccccaacctgatcatcctgcctctggcctttggcaagagacagggcagagaattcatctggaacgacctgctgtccctggaaaccggcagcctgaagctggccaacggaagagtgatcgagaagacactgtacaacagaagaacccggcaggatgagcctgccctgttcgtggccctgaccttcgagcggcgggaggtcctggactcctccaatatcaaaccaatgaacctgatcggcgtggcaagaggcgaaaacatccccgccgtgatcgccctgaccgaccccgagggctgcccactgagccggtttaaggatagcctgggaaacccaacccacatcctgagaatcggcgagagctataaggagaagcagcggaccatccaggccaagaaggaggtggagcagcggagagccggcggctacagccggaagtacgccagcaaagccaagaatctggcagacgatatggtgagaaacaccgctagagatctgctgtactacgccgtgacccaggatgccatgctgatcttcgccaacctgagccggggcttcggccggcagggcaagcggaccttcatggccgagagacagtacacacggatggaggactggctgaccgccaagctggcctacgagggcctgagcaagacctacctgtccaagacactggcccagtacacctccaagacatgcagcaactgtgggtttaccatcaccagcgccgactacgacagggtgctggagaagctgaagaagacagcaacaggctggatgaccacaattaacggcaaggagctgaaggtggagggccagattacctactacaacagatacaagagacagaacgtagtcaaggacctgtccgtcgagctggatagactgagcgaagaatctgtgaacaacgacatctcctcctggacaaagggcagaagcggagaagctctgagcctcctgaagaaaagattctcccatagacccgtgcaggagaagttcgtgtgcctgaactgcggcttcgagacacacgcagccgagcaagccgccctgaacatcgccagatcctggctgttcctgcggagccaggagtacaagaaataccagacaaacaagacaaccggcaacaccgataagagagccttcgtcgagacctggcagtccttttaccggaagaagcttaaggaggtgtggaaacctgccgtgcggtctggcggatctggcggaggctccaagctgaagcccgtgaagttccaggacgtggccgtgtacttcagcgaggaggagtggcagctgctggagaaccagcagaaggagctgtacaggagcgtgatgaaggagaactacgagaacctgaccagcctgggcttcaccaccaccaagcccaacatcctgaagaggatggagcagggcaggcccctgtgggtgagcaccaggaggaaggtgatcaagcacagcttcagggagggcgagcccggcggcccaagcagcggcgcccctcctcccagcggcggcagcccagccggctccccaacctctaccgaggagggcacctctgagtccgccacccccgagagcggccctggcacctccaccgagcccagcgagggcagcgcacccggcagccctgccggcagccccacctccacagaggagggaaccagcaccgagcccagcgaaggcagcgccccaggcaccagcaccgagcctagtgagcaggagattaaacggatcaacaagatcagaagaagacttgtgaaagacagcaacaccaagaaggccggcaagacaggccccatgaaaaccctgctggttagagtgatgacacccgatctgagagagcggctggaaaacctgagaaagaagcctgaaaatatcccccagcccatcagcaatacatctagagccaacctgaataagctgctgaccgattacaccgaaatgaagaaggcgatcctgcatgtgtactgggaagagttccagaaggaccctgtgggcctgatgagccgggtggcccagcctgccagcaagaagatcgatcagaacaagctgaaacctgagatggacgagaagggcaacctgaccaccgccggctttgcctgctctcagtgtggccagcccctgttcgtgtacaagctggagcaggtgtctgagaagggcaaggcttacaccaactacttcggacggtgcaatgtggccgagcacgaaaagctgatcctgctggcccagctgaagcccgagaaggatagcgacgaagccgtgacatatagcctgggaaagtttgggcagagggccctggatttctacagcattcatgtgaccaaggagtccacccaccccgtgaagcccctggcccagatcgccggaaacagatacgcctccggacctgtgggaaaggccctgagcgacgcatgtatgggcacaatcgcctccttcctgtctaagtaccaggacatcatcatcgaacaccagaaggtggtgaagggcaaccagaagagactggagagcctgcgggagctggccggcaaggaaaacctggaataccctagcgtgaccctgccacctcagcctcacaccaaggagggcgttgatgcctacaacgaagtgatcgcccgggtgcgaatgtgggtgaacctgaacctgtggcagaagctgaagctaagcagagatgatgccaagcctctgctgagactgaagggattcccttcctttcctctggtcgagagacaggccaacgaagtggactggtgggacatggtgtgtaacgtgaagaagctgatcaacgagaaaaaggaggatggcaaggtgttttggcagaatctggctggctacaagagacaggaagccctgagaccatacctgagcagcgaggaagatcggaagaagggaaagaaattcgctcggtaccagctgggcgacctgctgctgcacctggaaaagaagcacggcgaggactggggaaaggtgtacgacgaggcctgggagcggattgacaagaaagtggaaggcctgagcaagcacatcaagctggaagaggaacggagaagcgaggacgcccagagcaaggccgccctgaccgactggctgcgggctaaggccagcttcgtgatcgagggcctgaaggaggccgacaaggacgagttctgcagatgcgagctgaagctgcagaagtggtacggggacctgcggggaaagcccttcgccatcgaagccgagaacagcatcctggacatcagcggcttcagcaagcagtacaactgtgccttcatctggcagaaggacggcgtgaagaagctgaacctgtacctgatcatcaactacttcaagggcggcaagctgcggttcaagaagatcaaacctgaagccttcgaagccaacagattctacaccgtgatcaacaaaaagagcggcgagatcgtgcccatggaggtgaacttcaacttcgacgaccccaacctgatcatcctgcctctggcctttggcaagagacagggcagagaattcatctggaacgacctgctgtccctggaaaccggcagcctgaagctggccaacggaagagtgatcgagaagacactgtacaacagaagaacccggcaggatgagcctgccctgttcgtggccctgaccttcgagcggcgggaggtcctggactcctccaatatcaaaccaatgaacctgatcggcgtggcaagaggcgaaaacatccccgccgtgatcgccctgaccgaccccgagggctgcccactgagccggtttaaggatagcctgggaaacccaacccacatcctgagaatcggcgagagctataaggagaagcagcggaccatccaggccaagaaggaggtggagcagcggagagccggcggctacagccggaagtacgccagcaaagccaagaatctggcagacgatatggtgagaaacaccgctagagatctgctgtactacgccgtgacccaggatgccatgctgatcttcgccaacctgagccggggcttcggccggcagggcaagcggaccttcatggccgagagacagtacacacggatggaggactggctgaccgccaagctggcctacgagggcctgagcaagacctacctgtccaagacactggcccagtacacctccaagacatgcagcaactgtgggtttaccatcaccagcgccgactacgacagggtgctggagaagctgaagaagacagcaacaggctggatgaccacaattaacggcaaggagctgaaggtggagggccagattacctactacaacagatacaagagacagaacgtagtcaaggacctgtccgtcgagctggatagactgagcgaagaatctgtgaacaacgacatctcctcctggacaaagggcagaagcggagaagctctgagcctcctgaagaaaagattctcccatagacccgtgcaggagaagttcgtgtgcctgaactgcggcttcgagacacacgcagccgagcaagccgccctgaacatcgccagatcctggctgttcctgcggagccaggagtacaagaaataccagacaaacaagacaaccggcaacaccgataagagagccttcgtcgagacctggcagtccttttaccggaagaagcttaaggaggtgtggaaacctgccgtgcggtctggcggatctggcggaggctcctaagctgaagcccgtgaagttccaggacgtggccgtgtacttcagcgaggaggagtggcagctgctggagaaccagcagaaggagctgtacaggagcgtgatgaaggagaactacgagaacctgaccagcctgggcttcaccaccaccaagcccaacatcctgaagaggatggagcagggcaggcccctgtgggtgagcaccaggaggaaggtgatcaagcacagcttcagggagggcgagcccggatctggctccggcagcggccccaagaaaaagagaaaagtctaagctgccttctgcggggcttgccttctggccatgcccttcttctctcccttgcacctgtacctcttggtctttgaataaagcctgagtaggaaggctagcaaaaaaaaaaaaaaaaaaaaaaaaaaaaaaaaaaaaaaaaaaaaaaaaaaaaaaaaaaaaaaaaaaaaaaaaaaaaaaaa

SEQ ID NO: 15790 - RNA, 9485 nt, synthetic construct
  source 1..9485: mol_type = other RNA
aggaaataagagagaaaagaagagtaagaagaaatataagagccaccatggcccctaagaagaagcgtaaagtgagccggatggaacgcctcgtctacgaggtgcggcagaagtgcagaaacatcgaggacatctgcatctcctgcggatctctgaacgtgaccctggagcacccactgttcatcggcggcatgtgccagaactgtaaaaactgttttctggagtgtgcctatcaatacgacgatgacggctaccagagctactgcaccatctgttgcggcggaagagaggtgctgatgtgtggaaataacaactgctgccggtgcttctgcgtggaatgcgtggacctgctggtgggccccggcgccgcccaggccgctattaaggaagatccttggaactgctacatgtgcggccacaagggcacatacggcctgctgagacggagagaggactggcctagcagactgcagatgttcttcgccaataaccacgaccaggagttcgacccccctaaggtgtaccctcccgtccccgccgagaagagaaagcccatccgggtcctgagcctgttcgatggcatcgccaccggtctgctggtgctgaaggacctgggcatccaggtggataggtacattgcctccgaggtgtgcgaggactccatcaccgtgggaatggtgcgtcatcagggcaagatcatgtacgtgggcgacgtgcggagcgtgacacagaagcatatccaggagtggggccctttcgacctggtgatcggcggcagcccttgcaatgacctgagcatcgtgaacccagcccggaagggcctgtacgagggaaccggcagactgttcttcgagttttacagactgctgcacgacgcccggcctaaggaaggcgacgaccggcccttcttttggctgttcgagaatgtggtggccatgggagtcagcgacaagcgggatattagccggttcctggagagcaaccccgtgatgatcgatgccaaggaagtgagcgccgcccaccgggccagatacttctggggcaatctgcctggcatgaacagacccctggccagcaccgtgaacgacaagctggagctgcaggagtgcctggagcacggccggatcgccaagttcagcaaggtgagaaccatcaccacccgaagcaacagcatcaaacaaggcaaggaccagcactttcctgtgttcatgaacgagaaggaggacatcctgtggtgtaccgagatggagagagtgttcgggttcccagtccactacacagatgtcagcaacatgtctagactggccagacagagactgctgggaagaagctggtccgtccctgtgatcagacacctgttcgcccctctgaaggagtacttcgcctgcgtgagcagcggcaacagcaacgccaacagccggggccccagcttctctagcggcctggtgccactgtccctgagagggagccacatgggccccatggagatctacaaaaccgtgagcgcctggaagcggcagcctgtgcgcgtgctgagcctgtttcggaatatcgataaagtcctgaaaagcctgggattcctggagagcggctctggctccggcggtggcaccctgaagtacgtggaggatgtgacaaacgtggtcagacgggatgtggagaagtggggccccttcgatctggtgtacggcagcacccaacccctgggcagctcttgtgaccggtgccctggctggtacatgtttcagttccaccggatcctgcagtacgccctgccgagacaggagtcccagcggccattcttttggattttcatggacaacttgctgctgaccgaggatgaccaggaaactaccactcggttcctgcagaccgaagccgtgaccctgcaggacgtgagaggccgggactaccagaacgccatgcgggtgtggtccaacatccctggactgaaaagcaagcacgcacctctgacccctaaagaagaggagtacctgcaggcccaggtgcggagcagaagcaagctggacgcccctaaggtggatctgctggtgaagaattgcctcctgcccctgagagagtacttcaagtatttcagccagaatagtctgcccctgggaggcagcggcggcggcgccctggtgacatttgaggacgtcgccgtgcggttcacccaggaggaatgggctctgctggatccttctcagaaaatcctgtaccgggacgtgatgagagagacataccggaatctgacctccgtgggcatcaactgggaatgttgggaccttgaagcctgcttcagaagcctgggaagaaacctgagagtgcaggtggtgaagagaaagtgcgagctgaccaacagcggcccctgcgccgagggcggcccaagcagcggcgcccctcctcccagcggcggcagcccagccggctccccaacctctaccgaggagggcacctctgagtccgccacccccgagagcggccctggcacctccaccgagcccagcgagggcagcgcacccggcagccctgccggcagccccacctccacagaggagggaaccagcaccgagcccagcgaaggcagcgccccaggcaccagcaccgagcctagtgagcaggagattaaacggatcaacaagatcagaagaagacttgtgaaagacagcaacaccaagaaggccggcaagacaggccccatgaaaaccctgctggttagagtgatgacacccgatctgagagagcggctggaaaacctgagaaagaagcctgaaaatatcccccagcccatcagcaatacatctagagccaacctgaataagctgctgaccgattacaccgaaatgaagaaggcgatcctgcatgtgtactgggaagagttccagaaggaccctgtgggcctgatgagccgggtggcccagcctgccagcaagaagatcgatcagaacaagctgaaacctgagatggacgagaagggcaacctgaccaccgccggctttgcctgctctcagtgtggccagcccctgttcgtgtacaagctggagcaggtgtctgagaagggcaaggcttacaccaactacttcggacggtgcaatgtggccgagcacgaaaagctgatcctgctggcccagctgaagcccgagaaggatagcgacgaagccgtgacatatagcctgggaaagtttgggcagagggccctggatttctacagcattcatgtgaccaaggagtccacccaccccgtgaagcccctggcccagatcgccggaaacagatacgcctccggacctgtgggaaaggccctgagcgacgcatgtatgggcacaatcgcctccttcctgtctaagtaccaggacatcatcatcgaacaccagaaggtggtgaagggcaaccagaagagactggagagcctgcgggagctggccggcaaggaaaacctggaataccctagcgtgaccctgccacctcagcctcacaccaaggagggcgttgatgcctacaacgaagtgatcgcccgggtgcgaatgtgggtgaacctgaacctgtggcagaagctgaagctaagcagagatgatgccaagcctctgctgagactgaagggattcccttcctttcctctggtcgagagacaggccaacgaagtggactggtgggacatggtgtgtaacgtgaagaagctgatcaacgagaaaaaggaggatggcaaggtgttttggcagaatctggctggctacaagagacaggaagccctgagaccatacctgagcagcgaggaagatcggaagaagggaaagaaattcgctcggtaccagctgggcgacctgctgctgcacctggaaaagaagcacggcgaggactggggaaaggtgtacgacgaggcctgggagcggattgacaagaaagtggaaggcctgagcaagcacatcaagctggaagaggaacggagaagcgaggacgcccagagcaaggccgccctgaccgactggctgcgggctaaggccagcttcgtgatcgagggcctgaaggaggccgacaaggacgagttctgcagatgcgagctgaagctgcagaagtggtacggggacctgcggggaaagcccttcgccatcgaagccgagaacagcatcctggacatcagcggcttcagcaagcagtacaactgtgccttcatctggcagaaggacggcgtgaagaagctgaacctgtacctgatcatcaactacttcaagggcggcaagctgcggttcaagaagatcaaacctgaagccttcgaagccaacagattctacaccgtgatcaacaaaaagagcggcgagatcgtgcccatggaggtgaacttcaacttcgacgaccccaacctgatcatcctgcctctggcctttggcaagagacagggcagagaattcatctggaacgacctgctgtccctggaaaccggcagcctgaagctggccaacggaagagtgatcgagaagacactgtacaacagaagaacccggcaggatgagcctgccctgttcgtggccctgaccttcgagcggcgggaggtcctggactcctccaatatcaaaccaatgaacctgatcggcgtggcaagaggcgaaaacatccccgccgtgatcgccctgaccgaccccgagggctgcccactgagccggtttaaggatagcctgggaaacccaacccacatcctgagaatcggcgagagctataaggagaagcagcggaccatccaggccaagaaggaggtggagcagcggagagccggcggctacagccggaagtacgccagcaaagccaagaatctggcagacgatatggtgagaaacaccgctagagatctgctgtactacgccgtgacccaggatgccatgctgatcttcgccaacctgagccggggcttcggccggcagggcaagcggaccttcatggccgagagacagtacacacggatggaggactggctgaccgccaagctggcctacgagggcctgagcaagacctacctgtccaagacactggcccagtacacctccaagacatgcagcaactgtgggtttaccatcaccagcgccgactacgacagggtgctggagaagctgaagaagacagcaacaggctggatgaccacaattaacggcaaggagctgaaggtggagggccagattacctactacaacagatacaagagacagaacgtagtcaaggacctgtccgtcgagctggatagactgagcgaagaatctgtgaacaacgacatctcctcctggacaaagggcagaagcggagaagctctgagcctcctgaagaaaagattctcccatagacccgtgcaggagaagttcgtgtgcctgaactgcggcttcgagacacacgcagccgagcaagccgccctgaacatcgccagatcctggctgttcctgcggagccaggagtacaagaaataccagacaaacaagacaaccggcaacaccgataagagagccttcgtcgagacctggcagtccttttaccggaagaagcttaaggaggtgtggaaacctgccgtgcggtctggcggatctggcggaggctccgaggaggtgcccgtggtgttcgaggacgtggccgtgtacttcaccagggaggagtgggccgccctggacaagaggcagaaggagctgtacagggacgtgatgaggaccaactacgagctgctggccagcctgggccccgccgccgccaagcccgacctgatcagcaagctggagaggagggccgccccctggatcagggaccccgacggccccgagtggggcaagggcaggccccccggcaagggcggcccaagcagcggcgcccctcctcccagcggcggcagcccagccggctccccaacctctaccgaggagggcacctctgagtccgccacccccgagagcggccctggcacctccaccgagcccagcgagggcagcgcacccggcagccctgccggcagccccacctccacagaggagggaaccagcaccgagcccagcgaaggcagcgccccaggcaccagcaccgagcctagtgagcaggagattaaacggatcaacaagatcagaagaagacttgtgaaagacagcaacaccaagaaggccggcaagacaggccccatgaaaaccctgctggttagagtgatgacacccgatctgagagagcggctggaaaacctgagaaagaagcctgaaaatatcccccagcccatcagcaatacatctagagccaacctgaataagctgctgaccgattacaccgaaatgaagaaggcgatcctgcatgtgtactgggaagagttccagaaggaccctgtgggcctgatgagccgggtggcccagcctgccagcaagaagatcgatcagaacaagctgaaacctgagatggacgagaagggcaacctgaccaccgccggctttgcctgctctcagtgtggccagcccctgttcgtgtacaagctggagcaggtgtctgagaagggcaaggcttacaccaactacttcggacggtgcaatgtggccgagcacgaaaagctgatcctgctggcccagctgaagcccgagaaggatagcgacgaagccgtgacatatagcctgggaaagtttgggcagagggccctggatttctacagcattcatgtgaccaaggagtccacccaccccgtgaagcccctggcccagatcgccggaaacagatacgcctccggacctgtgggaaaggccctgagcgacgcatgtatgggcacaatcgcctccttcctgtctaagtaccaggacatcatcatcgaacaccagaaggtggtgaagggcaaccagaagagactggagagcctgcgggagctggccggcaaggaaaacctggaataccctagcgtgaccctgccacctcagcctcacaccaaggagggcgttgatgcctacaacgaagtgatcgcccgggtgcgaatgtgggtgaacctgaacctgtggcagaagctgaagctaagcagagatgatgccaagcctctgctgagactgaagggattcccttcctttcctctggtcgagagacaggccaacgaagtggactggtgggacatggtgtgtaacgtgaagaagctgatcaacgagaaaaaggaggatggcaaggtgttttggcagaatctggctggctacaagagacaggaagccctgagaccatacctgagcagcgaggaagatcggaagaagggaaagaaattcgctcggtaccagctgggcgacctgctgctgcacctggaaaagaagcacggcgaggactggggaaaggtgtacgacgaggcctgggagcggattgacaagaaagtggaaggcctgagcaagcacatcaagctggaagaggaacggagaagcgaggacgcccagagcaaggccgccctgaccgactggctgcgggctaaggccagcttcgtgatcgagggcctgaaggaggccgacaaggacgagttctgcagatgcgagctgaagctgcagaagtggtacggggacctgcggggaaagcccttcgccatcgaagccgagaacagcatcctggacatcagcggcttcagcaagcagtacaactgtgccttcatctggcagaaggacggcgtgaagaagctgaacctgtacctgatcatcaactacttcaagggcggcaagctgcggttcaagaagatcaaacctgaagccttcgaagccaacagattctacaccgtgatcaacaaaaagagcggcgagatcgtgcccatggaggtgaacttcaacttcgacgaccccaacctgatcatcctgcctctggcctttggcaagagacagggcagagaattcatctggaacgacctgctgtccctggaaaccggcagcctgaagctggccaacggaagagtgatcgagaagacactgtacaacagaagaacccggcaggatgagcctgccctgttcgtggccctgaccttcgagcggcgggaggtcctggactcctccaatatcaaaccaatgaacctgatcggcgtggcaagaggcgaaaacatccccgccgtgatcgccctgaccgaccccgagggctgcccactgagccggtttaaggatagcctgggaaacccaacccacatcctgagaatcggcgagagctataaggagaagcagcggaccatccaggccaagaaggaggtggagcagcggagagccggcggctacagccggaagtacgccagcaaagccaagaatctggcagacgatatggtgagaaacaccgctagagatctgctgtactacgccgtgacccaggatgccatgctgatcttcgccaacctgagccggggcttcggccggcagggcaagcggaccttcatggccgagagacagtacacacggatggaggactggctgaccgccaagctggcctacgagggcctgagcaagacctacctgtccaagacactggcccagtacacctccaagacatgcagcaactgtgggtttaccatcaccagcgccgactacgacagggtgctggagaagctgaagaagacagcaacaggctggatgaccacaattaacggcaaggagctgaaggtggagggccagattacctactacaacagatacaagagacagaacgtagtcaaggacctgtccgtcgagctggatagactgagcgaagaatctgtgaacaacgacatctcctcctggacaaagggcagaagcggagaagctctgagcctcctgaagaaaagattctcccatagacccgtgcaggagaagttcgtgtgcctgaactgcggcttcgagacacacgcagccgagcaagccgccctgaacatcgccagatcctggctgttcctgcggagccaggagtacaagaaataccagacaaacaagacaaccggcaacaccgataagagagccttcgtcgagacctggcagtccttttaccggaagaagcttaaggaggtgtggaaacctgccgtgcggtctggcggatctggcggaggctcctgaggaggtgcccgtggtgttcgaggacgtggccgtgtacttcaccagggaggagtgggccgccctggacaagaggcagaaggagctgtacagggacgtgatgaggaccaactacgagctgctggccagcctgggccccgccgccgccaagcccgacctgatcagcaagctggagaggagggccgccccctggatcagggaccccgacggccccgagtggggcaagggcaggccccccggcaagggatctggctccggcagcggccccaagaaaaagagaaaagtctaagctgccttctgcggggcttgccttctggccatgcccttcttctctcccttgcacctgtacctcttggtctttgaataaagcctgagtaggaaggctagcaaaaaaaaaaaaaaaaaaaaaaaaaaaaaaaaaaaaaaaaaaaaaaaaaaaaaaaaaaaaaaaaaaaaaaaaaaaaaaaa

SEQ ID NO: 15791 - RNA, 9485 nt, synthetic construct
  source 1..9485: mol_type = other RNA
aggaaataagagagaaaagaagagtaagaagaaatataagagccaccatggcccctaagaagaagcgtaaagtgagccggatggaacgcctcgtctacgaggtgcggcagaagtgcagaaacatcgaggacatctgcatctcctgcggatctctgaacgtgaccctggagcacccactgttcatcggcggcatgtgccagaactgtaaaaactgttttctggagtgtgcctatcaatacgacgatgacggctaccagagctactgcaccatctgttgcggcggaagagaggtgctgatgtgtggaaataacaactgctgccggtgcttctgcgtggaatgcgtggacctgctggtgggccccggcgccgcccaggccgctattaaggaagatccttggaactgctacatgtgcggccacaagggcacatacggcctgctgagacggagagaggactggcctagcagactgcagatgttcttcgccaataaccacgaccaggagttcgacccccctaaggtgtaccctcccgtccccgccgagaagagaaagcccatccgggtcctgagcctgttcgatggcatcgccaccggtctgctggtgctgaaggacctgggcatccaggtggataggtacattgcctccgaggtgtgcgaggactccatcaccgtgggaatggtgcgtcatcagggcaagatcatgtacgtgggcgacgtgcggagcgtgacacagaagcatatccaggagtggggccctttcgacctggtgatcggcggcagcccttgcaatgacctgagcatcgtgaacccagcccggaagggcctgtacgagggaaccggcagactgttcttcgagttttacagactgctgcacgacgcccggcctaaggaaggcgacgaccggcccttcttttggctgttcgagaatgtggtggccatgggagtcagcgacaagcgggatattagccggttcctggagagcaaccccgtgatgatcgatgccaaggaagtgagcgccgcccaccgggccagatacttctggggcaatctgcctggcatgaacagacccctggccagcaccgtgaacgacaagctggagctgcaggagtgcctggagcacggccggatcgccaagttcagcaaggtgagaaccatcaccacccgaagcaacagcatcaaacaaggcaaggaccagcactttcctgtgttcatgaacgagaaggaggacatcctgtggtgtaccgagatggagagagtgttcgggttcccagtccactacacagatgtcagcaacatgtctagactggccagacagagactgctgggaagaagctggtccgtccctgtgatcagacacctgttcgcccctctgaaggagtacttcgcctgcgtgagcagcggcaacagcaacgccaacagccggggccccagcttctctagcggcctggtgccactgtccctgagagggagccacatgggccccatggagatctacaaaaccgtgagcgcctggaagcggcagcctgtgcgcgtgctgagcctgtttcggaatatcgataaagtcctgaaaagcctgggattcctggagagcggctctggctccggcggtggcaccctgaagtacgtggaggatgtgacaaacgtggtcagacgggatgtggagaagtggggccccttcgatctggtgtacggcagcacccaacccctgggcagctcttgtgaccggtgccctggctggtacatgtttcagttccaccggatcctgcagtacgccctgccgagacaggagtcccagcggccattcttttggattttcatggacaacttgctgctgaccgaggatgaccaggaaactaccactcggttcctgcagaccgaagccgtgaccctgcaggacgtgagaggccgggactaccagaacgccatgcgggtgtggtccaacatccctggactgaaaagcaagcacgcacctctgacccctaaagaagaggagtacctgcaggcccaggtgcggagcagaagcaagctggacgcccctaaggtggatctgctggtgaagaattgcctcctgcccctgagagagtacttcaagtatttcagccagaatagtctgcccctgggaggcagcggcggcggcgccctggtgacatttgaggacgtcgccgtgcggttcacccaggaggaatgggctctgctggatccttctcagaaaatcctgtaccgggacgtgatgagagagacataccggaatctgacctccgtgggcatcaactgggaatgttgggaccttgaagcctgcttcagaagcctgggaagaaacctgagagtgcaggtggtgaagagaaagtgcgagctgaccaacagcggcccctgcgccgagggcggcccaagcagcggcgcccctcctcccagcggcggcagcccagccggctccccaacctctaccgaggagggcacctctgagtccgccacccccgagagcggccctggcacctccaccgagcccagcgagggcagcgcacccggcagccctgccggcagccccacctccacagaggagggaaccagcaccgagcccagcgaaggcagcgccccaggcaccagcaccgagcctagtgagcaggagattaaacggatcaacaagatcagaagaagacttgtgaaagacagcaacaccaagaaggccggcaagacaggccccatgaaaaccctgctggttagagtgatgacacccgatctgagagagcggctggaaaacctgagaaagaagcctgaaaatatcccccagcccatcagcaatacatctagagccaacctgaataagctgctgaccgattacaccgaaatgaagaaggcgatcctgcatgtgtactgggaagagttccagaaggaccctgtgggcctgatgagccgggtggcccagcctgccagcaagaagatcgatcagaacaagctgaaacctgagatggacgagaagggcaacctgaccaccgccggctttgcctgctctcagtgtggccagcccctgttcgtgtacaagctggagcaggtgtctgagaagggcaaggcttacaccaactacttcggacggtgcaatgtggccgagcacgaaaagctgatcctgctggcccagctgaagcccgagaaggatagcgacgaagccgtgacatatagcctgggaaagtttgggcagagggccctggatttctacagcattcatgtgaccaaggagtccacccaccccgtgaagcccctggcccagatcgccggaaacagatacgcctccggacctgtgggaaaggccctgagcgacgcatgtatgggcacaatcgcctccttcctgtctaagtaccaggacatcatcatcgaacaccagaaggtggtgaagggcaaccagaagagactggagagcctgcgggagctggccggcaaggaaaacctggaataccctagcgtgaccctgccacctcagcctcacaccaaggagggcgttgatgcctacaacgaagtgatcgcccgggtgcgaatgtgggtgaacctgaacctgtggcagaagctgaagctaagcagagatgatgccaagcctctgctgagactgaagggattcccttcctttcctctggtcgagagacaggccaacgaagtggactggtgggacatggtgtgtaacgtgaagaagctgatcaacgagaaaaaggaggatggcaaggtgttttggcagaatctggctggctacaagagacaggaagccctgagaccatacctgagcagcgaggaagatcggaagaagggaaagaaattcgctcggtaccagctgggcgacctgctgctgcacctggaaaagaagcacggcgaggactggggaaaggtgtacgacgaggcctgggagcggattgacaagaaagtggaaggcctgagcaagcacatcaagctggaagaggaacggagaagcgaggacgcccagagcaaggccgccctgaccgactggctgcgggctaaggccagcttcgtgatcgagggcctgaaggaggccgacaaggacgagttctgcagatgcgagctgaagctgcagaagtggtacggggacctgcggggaaagcccttcgccatcgaagccgagaacagcatcctggacatcagcggcttcagcaagcagtacaactgtgccttcatctggcagaaggacggcgtgaagaagctgaacctgtacctgatcatcaactacttcaagggcggcaagctgcggttcaagaagatcaaacctgaagccttcgaagccaacagattctacaccgtgatcaacaaaaagagcggcgagatcgtgcccatggaggtgaacttcaacttcgacgaccccaacctgatcatcctgcctctggcctttggcaagagacagggcagagaattcatctggaacgacctgctgtccctggaaaccggcagcctgaagctggccaacggaagagtgatcgagaagacactgtacaacagaagaacccggcaggatgagcctgccctgttcgtggccctgaccttcgagcggcgggaggtcctggactcctccaatatcaaaccaatgaacctgatcggcgtggcaagaggcgaaaacatccccgccgtgatcgccctgaccgaccccgagggctgcccactgagccggtttaaggatagcctgggaaacccaacccacatcctgagaatcggcgagagctataaggagaagcagcggaccatccaggccaagaaggaggtggagcagcggagagccggcggctacagccggaagtacgccagcaaagccaagaatctggcagacgatatggtgagaaacaccgctagagatctgctgtactacgccgtgacccaggatgccatgctgatcttcgccaacctgagccggggcttcggccggcagggcaagcggaccttcatggccgagagacagtacacacggatggaggactggctgaccgccaagctggcctacgagggcctgagcaagacctacctgtccaagacactggcccagtacacctccaagacatgcagcaactgtgggtttaccatcaccagcgccgactacgacagggtgctggagaagctgaagaagacagcaacaggctggatgaccacaattaacggcaaggagctgaaggtggagggccagattacctactacaacagatacaagagacagaacgtagtcaaggacctgtccgtcgagctggatagactgagcgaagaatctgtgaacaacgacatctcctcctggacaaagggcagaagcggagaagctctgagcctcctgaagaaaagattctcccatagacccgtgcaggagaagttcgtgtgcctgaactgcggcttcgagacacacgcagccgagcaagccgccctgaacatcgccagatcctggctgttcctgcggagccaggagtacaagaaataccagacaaacaagacaaccggcaacaccgataagagagccttcgtcgagacctggcagtccttttaccggaagaagcttaaggaggtgtggaaacctgccgtgcggtctggcggatctggcggaggctccagccagagcctggtgaccttcggcgacgtggccgtggacttcagccaggaggagtgggagtggctgaacagcgcccagaggaacctgtacaggagcgtgatgctggagaactacaggaacctggtgagcctgggcctgtgcgtgagcaagcccgacgtgatcagcagcctggagcagaggaaggagccctggatggtgaagaggaagctgaccaggggcaggtgccccgacctgaagaccgtgggcggcccaagcagcggcgcccctcctcccagcggcggcagcccagccggctccccaacctctaccgaggagggcacctctgagtccgccacccccgagagcggccctggcacctccaccgagcccagcgagggcagcgcacccggcagccctgccggcagccccacctccacagaggagggaaccagcaccgagcccagcgaaggcagcgccccaggcaccagcaccgagcctagtgagcaggagattaaacggatcaacaagatcagaagaagacttgtgaaagacagcaacaccaagaaggccggcaagacaggccccatgaaaaccctgctggttagagtgatgacacccgatctgagagagcggctggaaaacctgagaaagaagcctgaaaatatcccccagcccatcagcaatacatctagagccaacctgaataagctgctgaccgattacaccgaaatgaagaaggcgatcctgcatgtgtactgggaagagttccagaaggaccctgtgggcctgatgagccgggtggcccagcctgccagcaagaagatcgatcagaacaagctgaaacctgagatggacgagaagggcaacctgaccaccgccggctttgcctgctctcagtgtggccagcccctgttcgtgtacaagctggagcaggtgtctgagaagggcaaggcttacaccaactacttcggacggtgcaatgtggccgagcacgaaaagctgatcctgctggcccagctgaagcccgagaaggatagcgacgaagccgtgacatatagcctgggaaagtttgggcagagggccctggatttctacagcattcatgtgaccaaggagtccacccaccccgtgaagcccctggcccagatcgccggaaacagatacgcctccggacctgtgggaaaggccctgagcgacgcatgtatgggcacaatcgcctccttcctgtctaagtaccaggacatcatcatcgaacaccagaaggtggtgaagggcaaccagaagagactggagagcctgcgggagctggccggcaaggaaaacctggaataccctagcgtgaccctgccacctcagcctcacaccaaggagggcgttgatgcctacaacgaagtgatcgcccgggtgcgaatgtgggtgaacctgaacctgtggcagaagctgaagctaagcagagatgatgccaagcctctgctgagactgaagggattcccttcctttcctctggtcgagagacaggccaacgaagtggactggtgggacatggtgtgtaacgtgaagaagctgatcaacgagaaaaaggaggatggcaaggtgttttggcagaatctggctggctacaagagacaggaagccctgagaccatacctgagcagcgaggaagatcggaagaagggaaagaaattcgctcggtaccagctgggcgacctgctgctgcacctggaaaagaagcacggcgaggactggggaaaggtgtacgacgaggcctgggagcggattgacaagaaagtggaaggcctgagcaagcacatcaagctggaagaggaacggagaagcgaggacgcccagagcaaggccgccctgaccgactggctgcgggctaaggccagcttcgtgatcgagggcctgaaggaggccgacaaggacgagttctgcagatgcgagctgaagctgcagaagtggtacggggacctgcggggaaagcccttcgccatcgaagccgagaacagcatcctggacatcagcggcttcagcaagcagtacaactgtgccttcatctggcagaaggacggcgtgaagaagctgaacctgtacctgatcatcaactacttcaagggcggcaagctgcggttcaagaagatcaaacctgaagccttcgaagccaacagattctacaccgtgatcaacaaaaagagcggcgagatcgtgcccatggaggtgaacttcaacttcgacgaccccaacctgatcatcctgcctctggcctttggcaagagacagggcagagaattcatctggaacgacctgctgtccctggaaaccggcagcctgaagctggccaacggaagagtgatcgagaagacactgtacaacagaagaacccggcaggatgagcctgccctgttcgtggccctgaccttcgagcggcgggaggtcctggactcctccaatatcaaaccaatgaacctgatcggcgtggcaagaggcgaaaacatccccgccgtgatcgccctgaccgaccccgagggctgcccactgagccggtttaaggatagcctgggaaacccaacccacatcctgagaatcggcgagagctataaggagaagcagcggaccatccaggccaagaaggaggtggagcagcggagagccggcggctacagccggaagtacgccagcaaagccaagaatctggcagacgatatggtgagaaacaccgctagagatctgctgtactacgccgtgacccaggatgccatgctgatcttcgccaacctgagccggggcttcggccggcagggcaagcggaccttcatggccgagagacagtacacacggatggaggactggctgaccgccaagctggcctacgagggcctgagcaagacctacctgtccaagacactggcccagtacacctccaagacatgcagcaactgtgggtttaccatcaccagcgccgactacgacagggtgctggagaagctgaagaagacagcaacaggctggatgaccacaattaacggcaaggagctgaaggtggagggccagattacctactacaacagatacaagagacagaacgtagtcaaggacctgtccgtcgagctggatagactgagcgaagaatctgtgaacaacgacatctcctcctggacaaagggcagaagcggagaagctctgagcctcctgaagaaaagattctcccatagacccgtgcaggagaagttcgtgtgcctgaactgcggcttcgagacacacgcagccgagcaagccgccctgaacatcgccagatcctggctgttcctgcggagccaggagtacaagaaataccagacaaacaagacaaccggcaacaccgataagagagccttcgtcgagacctggcagtccttttaccggaagaagcttaaggaggtgtggaaacctgccgtgcggtctggcggatctggcggaggctcctagccagagcctggtgaccttcggcgacgtggccgtggacttcagccaggaggagtgggagtggctgaacagcgcccagaggaacctgtacaggagcgtgatgctggagaactacaggaacctggtgagcctgggcctgtgcgtgagcaagcccgacgtgatcagcagcctggagcagaggaaggagccctggatggtgaagaggaagctgaccaggggcaggtgccccgacctgaagaccgtgggatctggctccggcagcggccccaagaaaaagagaaaagtctaagctgccttctgcggggcttgccttctggccatgcccttcttctctcccttgcacctgtacctcttggtctttgaataaagcctgagtaggaaggctagcaaaaaaaaaaaaaaaaaaaaaaaaaaaaaaaaaaaaaaaaaaaaaaaaaaaaaaaaaaaaaaaaaaaaaaaaaaaaaaaa

SEQ ID NO: 15792 - RNA, 9485 nt, synthetic construct
  source 1..9485: mol_type = other RNA
aggaaataagagagaaaagaagagtaagaagaaatataagagccaccatggcccctaagaagaagcgtaaagtgagccggatggaacgcctcgtctacgaggtgcggcagaagtgcagaaacatcgaggacatctgcatctcctgcggatctctgaacgtgaccctggagcacccactgttcatcggcggcatgtgccagaactgtaaaaactgttttctggagtgtgcctatcaatacgacgatgacggctaccagagctactgcaccatctgttgcggcggaagagaggtgctgatgtgtggaaataacaactgctgccggtgcttctgcgtggaatgcgtggacctgctggtgggccccggcgccgcccaggccgctattaaggaagatccttggaactgctacatgtgcggccacaagggcacatacggcctgctgagacggagagaggactggcctagcagactgcagatgttcttcgccaataaccacgaccaggagttcgacccccctaaggtgtaccctcccgtccccgccgagaagagaaagcccatccgggtcctgagcctgttcgatggcatcgccaccggtctgctggtgctgaaggacctgggcatccaggtggataggtacattgcctccgaggtgtgcgaggactccatcaccgtgggaatggtgcgtcatcagggcaagatcatgtacgtgggcgacgtgcggagcgtgacacagaagcatatccaggagtggggccctttcgacctggtgatcggcggcagcccttgcaatgacctgagcatcgtgaacccagcccggaagggcctgtacgagggaaccggcagactgttcttcgagttttacagactgctgcacgacgcccggcctaaggaaggcgacgaccggcccttcttttggctgttcgagaatgtggtggccatgggagtcagcgacaagcgggatattagccggttcctggagagcaaccccgtgatgatcgatgccaaggaagtgagcgccgcccaccgggccagatacttctggggcaatctgcctggcatgaacagacccctggccagcaccgtgaacgacaagctggagctgcaggagtgcctggagcacggccggatcgccaagttcagcaaggtgagaaccatcaccacccgaagcaacagcatcaaacaaggcaaggaccagcactttcctgtgttcatgaacgagaaggaggacatcctgtggtgtaccgagatggagagagtgttcgggttcccagtccactacacagatgtcagcaacatgtctagactggccagacagagactgctgggaagaagctggtccgtccctgtgatcagacacctgttcgcccctctgaaggagtacttcgcctgcgtgagcagcggcaacagcaacgccaacagccggggccccagcttctctagcggcctggtgccactgtccctgagagggagccacatgggccccatggagatctacaaaaccgtgagcgcctggaagcggcagcctgtgcgcgtgctgagcctgtttcggaatatcgataaagtcctgaaaagcctgggattcctggagagcggctctggctccggcggtggcaccctgaagtacgtggaggatgtgacaaacgtggtcagacgggatgtggagaagtggggccccttcgatctggtgtacggcagcacccaacccctgggcagctcttgtgaccggtgccctggctggtacatgtttcagttccaccggatcctgcagtacgccctgccgagacaggagtcccagcggccattcttttggattttcatggacaacttgctgctgaccgaggatgaccaggaaactaccactcggttcctgcagaccgaagccgtgaccctgcaggacgtgagaggccgggactaccagaacgccatgcgggtgtggtccaacatccctggactgaaaagcaagcacgcacctctgacccctaaagaagaggagtacctgcaggcccaggtgcggagcagaagcaagctggacgcccctaaggtggatctgctggtgaagaattgcctcctgcccctgagagagtacttcaagtatttcagccagaatagtctgcccctgggaggcagcggcggcggcgccctggtgacatttgaggacgtcgccgtgcggttcacccaggaggaatgggctctgctggatccttctcagaaaatcctgtaccgggacgtgatgagagagacataccggaatctgacctccgtgggcatcaactgggaatgttgggaccttgaagcctgcttcagaagcctgggaagaaacctgagagtgcaggtggtgaagagaaagtgcgagctgaccaacagcggcccctgcgccgagggcggcccaagcagcggcgcccctcctcccagcggcggcagcccagccggctccccaacctctaccgaggagggcacctctgagtccgccacccccgagagcggccctggcacctccaccgagcccagcgagggcagcgcacccggcagccctgccggcagccccacctccacagaggagggaaccagcaccgagcccagcgaaggcagcgccccaggcaccagcaccgagcctagtgagcaggagattaaacggatcaacaagatcagaagaagacttgtgaaagacagcaacaccaagaaggccggcaagacaggccccatgaaaaccctgctggttagagtgatgacacccgatctgagagagcggctggaaaacctgagaaagaagcctgaaaatatcccccagcccatcagcaatacatctagagccaacctgaataagctgctgaccgattacaccgaaatgaagaaggcgatcctgcatgtgtactgggaagagttccagaaggaccctgtgggcctgatgagccgggtggcccagcctgccagcaagaagatcgatcagaacaagctgaaacctgagatggacgagaagggcaacctgaccaccgccggctttgcctgctctcagtgtggccagcccctgttcgtgtacaagctggagcaggtgtctgagaagggcaaggcttacaccaactacttcggacggtgcaatgtggccgagcacgaaaagctgatcctgctggcccagctgaagcccgagaaggatagcgacgaagccgtgacatatagcctgggaaagtttgggcagagggccctggatttctacagcattcatgtgaccaaggagtccacccaccccgtgaagcccctggcccagatcgccggaaacagatacgcctccggacctgtgggaaaggccctgagcgacgcatgtatgggcacaatcgcctccttcctgtctaagtaccaggacatcatcatcgaacaccagaaggtggtgaagggcaaccagaagagactggagagcctgcgggagctggccggcaaggaaaacctggaataccctagcgtgaccctgccacctcagcctcacaccaaggagggcgttgatgcctacaacgaagtgatcgcccgggtgcgaatgtgggtgaacctgaacctgtggcagaagctgaagctaagcagagatgatgccaagcctctgctgagactgaagggattcccttcctttcctctggtcgagagacaggccaacgaagtggactggtgggacatggtgtgtaacgtgaagaagctgatcaacgagaaaaaggaggatggcaaggtgttttggcagaatctggctggctacaagagacaggaagccctgagaccatacctgagcagcgaggaagatcggaagaagggaaagaaattcgctcggtaccagctgggcgacctgctgctgcacctggaaaagaagcacggcgaggactggggaaaggtgtacgacgaggcctgggagcggattgacaagaaagtggaaggcctgagcaagcacatcaagctggaagaggaacggagaagcgaggacgcccagagcaaggccgccctgaccgactggctgcgggctaaggccagcttcgtgatcgagggcctgaaggaggccgacaaggacgagttctgcagatgcgagctgaagctgcagaagtggtacggggacctgcggggaaagcccttcgccatcgaagccgagaacagcatcctggacatcagcggcttcagcaagcagtacaactgtgccttcatctggcagaaggacggcgtgaagaagctgaacctgtacctgatcatcaactacttcaagggcggcaagctgcggttcaagaagatcaaacctgaagccttcgaagccaacagattctacaccgtgatcaacaaaaagagcggcgagatcgtgcccatggaggtgaacttcaacttcgacgaccccaacctgatcatcctgcctctggcctttggcaagagacagggcagagaattcatctggaacgacctgctgtccctggaaaccggcagcctgaagctggccaacggaagagtgatcgagaagacactgtacaacagaagaacccggcaggatgagcctgccctgttcgtggccctgaccttcgagcggcgggaggtcctggactcctccaatatcaaaccaatgaacctgatcggcgtggcaagaggcgaaaacatccccgccgtgatcgccctgaccgaccccgagggctgcccactgagccggtttaaggatagcctgggaaacccaacccacatcctgagaatcggcgagagctataaggagaagcagcggaccatccaggccaagaaggaggtggagcagcggagagccggcggctacagccggaagtacgccagcaaagccaagaatctggcagacgatatggtgagaaacaccgctagagatctgctgtactacgccgtgacccaggatgccatgctgatcttcgccaacctgagccggggcttcggccggcagggcaagcggaccttcatggccgagagacagtacacacggatggaggactggctgaccgccaagctggcctacgagggcctgagcaagacctacctgtccaagacactggcccagtacacctccaagacatgcagcaactgtgggtttaccatcaccagcgccgactacgacagggtgctggagaagctgaagaagacagcaacaggctggatgaccacaattaacggcaaggagctgaaggtggagggccagattacctactacaacagatacaagagacagaacgtagtcaaggacctgtccgtcgagctggatagactgagcgaagaatctgtgaacaacgacatctcctcctggacaaagggcagaagcggagaagctctgagcctcctgaagaaaagattctcccatagacccgtgcaggagaagttcgtgtgcctgaactgcggcttcgagacacacgcagccgagcaagccgccctgaacatcgccagatcctggctgttcctgcggagccaggagtacaagaaataccagacaaacaagacaaccggcaacaccgataagagagccttcgtcgagacctggcagtccttttaccggaagaagcttaaggaggtgtggaaacctgccgtgcggtctggcggatctggcggaggctccgcccaggagagcgtgatgttcagcgacgtgagcatcgacttcagccaggaggagtgggagtgcctgaacgacgaccagagggccctgtacagggacgtgatgctggagaactacagcaacctggtgagcatggccggccacagcatcagcaagcccgacgtgatcagcttcctggagcagggcaaggagccctggctggtggacagggagctgaccaggggccagtggcccgtgctggagagcggcggcccaagcagcggcgcccctcctcccagcggcggcagcccagccggctccccaacctctaccgaggagggcacctctgagtccgccacccccgagagcggccctggcacctccaccgagcccagcgagggcagcgcacccggcagccctgccggcagccccacctccacagaggagggaaccagcaccgagcccagcgaaggcagcgccccaggcaccagcaccgagcctagtgagcaggagattaaacggatcaacaagatcagaagaagacttgtgaaagacagcaacaccaagaaggccggcaagacaggccccatgaaaaccctgctggttagagtgatgacacccgatctgagagagcggctggaaaacctgagaaagaagcctgaaaatatcccccagcccatcagcaatacatctagagccaacctgaataagctgctgaccgattacaccgaaatgaagaaggcgatcctgcatgtgtactgggaagagttccagaaggaccctgtgggcctgatgagccgggtggcccagcctgccagcaagaagatcgatcagaacaagctgaaacctgagatggacgagaagggcaacctgaccaccgccggctttgcctgctctcagtgtggccagcccctgttcgtgtacaagctggagcaggtgtctgagaagggcaaggcttacaccaactacttcggacggtgcaatgtggccgagcacgaaaagctgatcctgctggcccagctgaagcccgagaaggatagcgacgaagccgtgacatatagcctgggaaagtttgggcagagggccctggatttctacagcattcatgtgaccaaggagtccacccaccccgtgaagcccctggcccagatcgccggaaacagatacgcctccggacctgtgggaaaggccctgagcgacgcatgtatgggcacaatcgcctccttcctgtctaagtaccaggacatcatcatcgaacaccagaaggtggtgaagggcaaccagaagagactggagagcctgcgggagctggccggcaaggaaaacctggaataccctagcgtgaccctgccacctcagcctcacaccaaggagggcgttgatgcctacaacgaagtgatcgcccgggtgcgaatgtgggtgaacctgaacctgtggcagaagctgaagctaagcagagatgatgccaagcctctgctgagactgaagggattcccttcctttcctctggtcgagagacaggccaacgaagtggactggtgggacatggtgtgtaacgtgaagaagctgatcaacgagaaaaaggaggatggcaaggtgttttggcagaatctggctggctacaagagacaggaagccctgagaccatacctgagcagcgaggaagatcggaagaagggaaagaaattcgctcggtaccagctgggcgacctgctgctgcacctggaaaagaagcacggcgaggactggggaaaggtgtacgacgaggcctgggagcggattgacaagaaagtggaaggcctgagcaagcacatcaagctggaagaggaacggagaagcgaggacgcccagagcaaggccgccctgaccgactggctgcgggctaaggccagcttcgtgatcgagggcctgaaggaggccgacaaggacgagttctgcagatgcgagctgaagctgcagaagtggtacggggacctgcggggaaagcccttcgccatcgaagccgagaacagcatcctggacatcagcggcttcagcaagcagtacaactgtgccttcatctggcagaaggacggcgtgaagaagctgaacctgtacctgatcatcaactacttcaagggcggcaagctgcggttcaagaagatcaaacctgaagccttcgaagccaacagattctacaccgtgatcaacaaaaagagcggcgagatcgtgcccatggaggtgaacttcaacttcgacgaccccaacctgatcatcctgcctctggcctttggcaagagacagggcagagaattcatctggaacgacctgctgtccctggaaaccggcagcctgaagctggccaacggaagagtgatcgagaagacactgtacaacagaagaacccggcaggatgagcctgccctgttcgtggccctgaccttcgagcggcgggaggtcctggactcctccaatatcaaaccaatgaacctgatcggcgtggcaagaggcgaaaacatccccgccgtgatcgccctgaccgaccccgagggctgcccactgagccggtttaaggatagcctgggaaacccaacccacatcctgagaatcggcgagagctataaggagaagcagcggaccatccaggccaagaaggaggtggagcagcggagagccggcggctacagccggaagtacgccagcaaagccaagaatctggcagacgatatggtgagaaacaccgctagagatctgctgtactacgccgtgacccaggatgccatgctgatcttcgccaacctgagccggggcttcggccggcagggcaagcggaccttcatggccgagagacagtacacacggatggaggactggctgaccgccaagctggcctacgagggcctgagcaagacctacctgtccaagacactggcccagtacacctccaagacatgcagcaactgtgggtttaccatcaccagcgccgactacgacagggtgctggagaagctgaagaagacagcaacaggctggatgaccacaattaacggcaaggagctgaaggtggagggccagattacctactacaacagatacaagagacagaacgtagtcaaggacctgtccgtcgagctggatagactgagcgaagaatctgtgaacaacgacatctcctcctggacaaagggcagaagcggagaagctctgagcctcctgaagaaaagattctcccatagacccgtgcaggagaagttcgtgtgcctgaactgcggcttcgagacacacgcagccgagcaagccgccctgaacatcgccagatcctggctgttcctgcggagccaggagtacaagaaataccagacaaacaagacaaccggcaacaccgataagagagccttcgtcgagacctggcagtccttttaccggaagaagcttaaggaggtgtggaaacctgccgtgcggtctggcggatctggcggaggctcctgcccaggagagcgtgatgttcagcgacgtgagcatcgacttcagccaggaggagtgggagtgcctgaacgacgaccagagggccctgtacagggacgtgatgctggagaactacagcaacctggtgagcatggccggccacagcatcagcaagcccgacgtgatcagcttcctggagcagggcaaggagccctggctggtggacagggagctgaccaggggccagtggcccgtgctggagagcggatctggctccggcagcggccccaagaaaaagagaaaagtctaagctgccttctgcggggcttgccttctggccatgcccttcttctctcccttgcacctgtacctcttggtctttgaataaagcctgagtaggaaggctagcaaaaaaaaaaaaaaaaaaaaaaaaaaaaaaaaaaaaaaaaaaaaaaaaaaaaaaaaaaaaaaaaaaaaaaaaaaaaaaaa

SEQ ID NO: 15793 - RNA, 9485 nt, synthetic construct
  source 1..9485: mol_type = other RNA
aggaaataagagagaaaagaagagtaagaagaaatataagagccaccatggcccctaagaagaagcgtaaagtgagccggatggaacgcctcgtctacgaggtgcggcagaagtgcagaaacatcgaggacatctgcatctcctgcggatctctgaacgtgaccctggagcacccactgttcatcggcggcatgtgccagaactgtaaaaactgttttctggagtgtgcctatcaatacgacgatgacggctaccagagctactgcaccatctgttgcggcggaagagaggtgctgatgtgtggaaataacaactgctgccggtgcttctgcgtggaatgcgtggacctgctggtgggccccggcgccgcccaggccgctattaaggaagatccttggaactgctacatgtgcggccacaagggcacatacggcctgctgagacggagagaggactggcctagcagactgcagatgttcttcgccaataaccacgaccaggagttcgacccccctaaggtgtaccctcccgtccccgccgagaagagaaagcccatccgggtcctgagcctgttcgatggcatcgccaccggtctgctggtgctgaaggacctgggcatccaggtggataggtacattgcctccgaggtgtgcgaggactccatcaccgtgggaatggtgcgtcatcagggcaagatcatgtacgtgggcgacgtgcggagcgtgacacagaagcatatccaggagtggggccctttcgacctggtgatcggcggcagcccttgcaatgacctgagcatcgtgaacccagcccggaagggcctgtacgagggaaccggcagactgttcttcgagttttacagactgctgcacgacgcccggcctaaggaaggcgacgaccggcccttcttttggctgttcgagaatgtggtggccatgggagtcagcgacaagcgggatattagccggttcctggagagcaaccccgtgatgatcgatgccaaggaagtgagcgccgcccaccgggccagatacttctggggcaatctgcctggcatgaacagacccctggccagcaccgtgaacgacaagctggagctgcaggagtgcctggagcacggccggatcgccaagttcagcaaggtgagaaccatcaccacccgaagcaacagcatcaaacaaggcaaggaccagcactttcctgtgttcatgaacgagaaggaggacatcctgtggtgtaccgagatggagagagtgttcgggttcccagtccactacacagatgtcagcaacatgtctagactggccagacagagactgctgggaagaagctggtccgtccctgtgatcagacacctgttcgcccctctgaaggagtacttcgcctgcgtgagcagcggcaacagcaacgccaacagccggggccccagcttctctagcggcctggtgccactgtccctgagagggagccacatgggccccatggagatctacaaaaccgtgagcgcctggaagcggcagcctgtgcgcgtgctgagcctgtttcggaatatcgataaagtcctgaaaagcctgggattcctggagagcggctctggctccggcggtggcaccctgaagtacgtggaggatgtgacaaacgtggtcagacgggatgtggagaagtggggccccttcgatctggtgtacggcagcacccaacccctgggcagctcttgtgaccggtgccctggctggtacatgtttcagttccaccggatcctgcagtacgccctgccgagacaggagtcccagcggccattcttttggattttcatggacaacttgctgctgaccgaggatgaccaggaaactaccactcggttcctgcagaccgaagccgtgaccctgcaggacgtgagaggccgggactaccagaacgccatgcgggtgtggtccaacatccctggactgaaaagcaagcacgcacctctgacccctaaagaagaggagtacctgcaggcccaggtgcggagcagaagcaagctggacgcccctaaggtggatctgctggtgaagaattgcctcctgcccctgagagagtacttcaagtatttcagccagaatagtctgcccctgggaggcagcggcggcggcgccctggtgacatttgaggacgtcgccgtgcggttcacccaggaggaatgggctctgctggatccttctcagaaaatcctgtaccgggacgtgatgagagagacataccggaatctgacctccgtgggcatcaactgggaatgttgggaccttgaagcctgcttcagaagcctgggaagaaacctgagagtgcaggtggtgaagagaaagtgcgagctgaccaacagcggcccctgcgccgagggcggcccaagcagcggcgcccctcctcccagcggcggcagcccagccggctccccaacctctaccgaggagggcacctctgagtccgccacccccgagagcggccctggcacctccaccgagcccagcgagggcagcgcacccggcagccctgccggcagccccacctccacagaggagggaaccagcaccgagcccagcgaaggcagcgccccaggcaccagcaccgagcctagtgagcaggagattaaacggatcaacaagatcagaagaagacttgtgaaagacagcaacaccaagaaggccggcaagacaggccccatgaaaaccctgctggttagagtgatgacacccgatctgagagagcggctggaaaacctgagaaagaagcctgaaaatatcccccagcccatcagcaatacatctagagccaacctgaataagctgctgaccgattacaccgaaatgaagaaggcgatcctgcatgtgtactgggaagagttccagaaggaccctgtgggcctgatgagccgggtggcccagcctgccagcaagaagatcgatcagaacaagctgaaacctgagatggacgagaagggcaacctgaccaccgccggctttgcctgctctcagtgtggccagcccctgttcgtgtacaagctggagcaggtgtctgagaagggcaaggcttacaccaactacttcggacggtgcaatgtggccgagcacgaaaagctgatcctgctggcccagctgaagcccgagaaggatagcgacgaagccgtgacatatagcctgggaaagtttgggcagagggccctggatttctacagcattcatgtgaccaaggagtccacccaccccgtgaagcccctggcccagatcgccggaaacagatacgcctccggacctgtgggaaaggccctgagcgacgcatgtatgggcacaatcgcctccttcctgtctaagtaccaggacatcatcatcgaacaccagaaggtggtgaagggcaaccagaagagactggagagcctgcgggagctggccggcaaggaaaacctggaataccctagcgtgaccctgccacctcagcctcacaccaaggagggcgttgatgcctacaacgaagtgatcgcccgggtgcgaatgtgggtgaacctgaacctgtggcagaagctgaagctaagcagagatgatgccaagcctctgctgagactgaagggattcccttcctttcctctggtcgagagacaggccaacgaagtggactggtgggacatggtgtgtaacgtgaagaagctgatcaacgagaaaaaggaggatggcaaggtgttttggcagaatctggctggctacaagagacaggaagccctgagaccatacctgagcagcgaggaagatcggaagaagggaaagaaattcgctcggtaccagctgggcgacctgctgctgcacctggaaaagaagcacggcgaggactggggaaaggtgtacgacgaggcctgggagcggattgacaagaaagtggaaggcctgagcaagcacatcaagctggaagaggaacggagaagcgaggacgcccagagcaaggccgccctgaccgactggctgcgggctaaggccagcttcgtgatcgagggcctgaaggaggccgacaaggacgagttctgcagatgcgagctgaagctgcagaagtggtacggggacctgcggggaaagcccttcgccatcgaagccgagaacagcatcctggacatcagcggcttcagcaagcagtacaactgtgccttcatctggcagaaggacggcgtgaagaagctgaacctgtacctgatcatcaactacttcaagggcggcaagctgcggttcaagaagatcaaacctgaagccttcgaagccaacagattctacaccgtgatcaacaaaaagagcggcgagatcgtgcccatggaggtgaacttcaacttcgacgaccccaacctgatcatcctgcctctggcctttggcaagagacagggcagagaattcatctggaacgacctgctgtccctggaaaccggcagcctgaagctggccaacggaagagtgatcgagaagacactgtacaacagaagaacccggcaggatgagcctgccctgttcgtggccctgaccttcgagcggcgggaggtcctggactcctccaatatcaaaccaatgaacctgatcggcgtggcaagaggcgaaaacatccccgccgtgatcgccctgaccgaccccgagggctgcccactgagccggtttaaggatagcctgggaaacccaacccacatcctgagaatcggcgagagctataaggagaagcagcggaccatccaggccaagaaggaggtggagcagcggagagccggcggctacagccggaagtacgccagcaaagccaagaatctggcagacgatatggtgagaaacaccgctagagatctgctgtactacgccgtgacccaggatgccatgctgatcttcgccaacctgagccggggcttcggccggcagggcaagcggaccttcatggccgagagacagtacacacggatggaggactggctgaccgccaagctggcctacgagggcctgagcaagacctacctgtccaagacactggcccagtacacctccaagacatgcagcaactgtgggtttaccatcaccagcgccgactacgacagggtgctggagaagctgaagaagacagcaacaggctggatgaccacaattaacggcaaggagctgaaggtggagggccagattacctactacaacagatacaagagacagaacgtagtcaaggacctgtccgtcgagctggatagactgagcgaagaatctgtgaacaacgacatctcctcctggacaaagggcagaagcggagaagctctgagcctcctgaagaaaagattctcccatagacccgtgcaggagaagttcgtgtgcctgaactgcggcttcgagacacacgcagccgagcaagccgccctgaacatcgccagatcctggctgttcctgcggagccaggagtacaagaaataccagacaaacaagacaaccggcaacaccgataagagagccttcgtcgagacctggcagtccttttaccggaagaagcttaaggaggtgtggaaacctgccgtgcggtctggcggatctggcggaggctccgcccaccacctggtgatgttcagggacgtggccgtggacttcagccaggacgagtgggagtgcctgaacagctaccagaggaacctgtacagggacgtgatcctggagaactacagcaacctggtgagcgtggccggctgcagcatcagcaagcccgacgtgatcaccctgctggagcagggcagggagccctggatggtggtgagggacgagaggaggaggaggaccctggacctggagagcggcggcccaagcagcggcgcccctcctcccagcggcggcagcccagccggctccccaacctctaccgaggagggcacctctgagtccgccacccccgagagcggccctggcacctccaccgagcccagcgagggcagcgcacccggcagccctgccggcagccccacctccacagaggagggaaccagcaccgagcccagcgaaggcagcgccccaggcaccagcaccgagcctagtgagcaggagattaaacggatcaacaagatcagaagaagacttgtgaaagacagcaacaccaagaaggccggcaagacaggccccatgaaaaccctgctggttagagtgatgacacccgatctgagagagcggctggaaaacctgagaaagaagcctgaaaatatcccccagcccatcagcaatacatctagagccaacctgaataagctgctgaccgattacaccgaaatgaagaaggcgatcctgcatgtgtactgggaagagttccagaaggaccctgtgggcctgatgagccgggtggcccagcctgccagcaagaagatcgatcagaacaagctgaaacctgagatggacgagaagggcaacctgaccaccgccggctttgcctgctctcagtgtggccagcccctgttcgtgtacaagctggagcaggtgtctgagaagggcaaggcttacaccaactacttcggacggtgcaatgtggccgagcacgaaaagctgatcctgctggcccagctgaagcccgagaaggatagcgacgaagccgtgacatatagcctgggaaagtttgggcagagggccctggatttctacagcattcatgtgaccaaggagtccacccaccccgtgaagcccctggcccagatcgccggaaacagatacgcctccggacctgtgggaaaggccctgagcgacgcatgtatgggcacaatcgcctccttcctgtctaagtaccaggacatcatcatcgaacaccagaaggtggtgaagggcaaccagaagagactggagagcctgcgggagctggccggcaaggaaaacctggaataccctagcgtgaccctgccacctcagcctcacaccaaggagggcgttgatgcctacaacgaagtgatcgcccgggtgcgaatgtgggtgaacctgaacctgtggcagaagctgaagctaagcagagatgatgccaagcctctgctgagactgaagggattcccttcctttcctctggtcgagagacaggccaacgaagtggactggtgggacatggtgtgtaacgtgaagaagctgatcaacgagaaaaaggaggatggcaaggtgttttggcagaatctggctggctacaagagacaggaagccctgagaccatacctgagcagcgaggaagatcggaagaagggaaagaaattcgctcggtaccagctgggcgacctgctgctgcacctggaaaagaagcacggcgaggactggggaaaggtgtacgacgaggcctgggagcggattgacaagaaagtggaaggcctgagcaagcacatcaagctggaagaggaacggagaagcgaggacgcccagagcaaggccgccctgaccgactggctgcgggctaaggccagcttcgtgatcgagggcctgaaggaggccgacaaggacgagttctgcagatgcgagctgaagctgcagaagtggtacggggacctgcggggaaagcccttcgccatcgaagccgagaacagcatcctggacatcagcggcttcagcaagcagtacaactgtgccttcatctggcagaaggacggcgtgaagaagctgaacctgtacctgatcatcaactacttcaagggcggcaagctgcggttcaagaagatcaaacctgaagccttcgaagccaacagattctacaccgtgatcaacaaaaagagcggcgagatcgtgcccatggaggtgaacttcaacttcgacgaccccaacctgatcatcctgcctctggcctttggcaagagacagggcagagaattcatctggaacgacctgctgtccctggaaaccggcagcctgaagctggccaacggaagagtgatcgagaagacactgtacaacagaagaacccggcaggatgagcctgccctgttcgtggccctgaccttcgagcggcgggaggtcctggactcctccaatatcaaaccaatgaacctgatcggcgtggcaagaggcgaaaacatccccgccgtgatcgccctgaccgaccccgagggctgcccactgagccggtttaaggatagcctgggaaacccaacccacatcctgagaatcggcgagagctataaggagaagcagcggaccatccaggccaagaaggaggtggagcagcggagagccggcggctacagccggaagtacgccagcaaagccaagaatctggcagacgatatggtgagaaacaccgctagagatctgctgtactacgccgtgacccaggatgccatgctgatcttcgccaacctgagccggggcttcggccggcagggcaagcggaccttcatggccgagagacagtacacacggatggaggactggctgaccgccaagctggcctacgagggcctgagcaagacctacctgtccaagacactggcccagtacacctccaagacatgcagcaactgtgggtttaccatcaccagcgccgactacgacagggtgctggagaagctgaagaagacagcaacaggctggatgaccacaattaacggcaaggagctgaaggtggagggccagattacctactacaacagatacaagagacagaacgtagtcaaggacctgtccgtcgagctggatagactgagcgaagaatctgtgaacaacgacatctcctcctggacaaagggcagaagcggagaagctctgagcctcctgaagaaaagattctcccatagacccgtgcaggagaagttcgtgtgcctgaactgcggcttcgagacacacgcagccgagcaagccgccctgaacatcgccagatcctggctgttcctgcggagccaggagtacaagaaataccagacaaacaagacaaccggcaacaccgataagagagccttcgtcgagacctggcagtccttttaccggaagaagcttaaggaggtgtggaaacctgccgtgcggtctggcggatctggcggaggctcctgcccaccacctggtgatgttcagggacgtggccgtggacttcagccaggacgagtgggagtgcctgaacagctaccagaggaacctgtacagggacgtgatcctggagaactacagcaacctggtgagcgtggccggctgcagcatcagcaagcccgacgtgatcaccctgctggagcagggcagggagccctggatggtggtgagggacgagaggaggaggaggaccctggacctggagagcggatctggctccggcagcggccccaagaaaaagagaaaagtctaagctgccttctgcggggcttgccttctggccatgcccttcttctctcccttgcacctgtacctcttggtctttgaataaagcctgagtaggaaggctagcaaaaaaaaaaaaaaaaaaaaaaaaaaaaaaaaaaaaaaaaaaaaaaaaaaaaaaaaaaaaaaaaaaaaaaaaaaaaaaaa

SEQ ID NO: 15794 - RNA, 9485 nt, synthetic construct
  source 1..9485: mol_type = other RNA
aggaaataagagagaaaagaagagtaagaagaaatataagagccaccatggcccctaagaagaagcgtaaagtgagccggatggaacgcctcgtctacgaggtgcggcagaagtgcagaaacatcgaggacatctgcatctcctgcggatctctgaacgtgaccctggagcacccactgttcatcggcggcatgtgccagaactgtaaaaactgttttctggagtgtgcctatcaatacgacgatgacggctaccagagctactgcaccatctgttgcggcggaagagaggtgctgatgtgtggaaataacaactgctgccggtgcttctgcgtggaatgcgtggacctgctggtgggccccggcgccgcccaggccgctattaaggaagatccttggaactgctacatgtgcggccacaagggcacatacggcctgctgagacggagagaggactggcctagcagactgcagatgttcttcgccaataaccacgaccaggagttcgacccccctaaggtgtaccctcccgtccccgccgagaagagaaagcccatccgggtcctgagcctgttcgatggcatcgccaccggtctgctggtgctgaaggacctgggcatccaggtggataggtacattgcctccgaggtgtgcgaggactccatcaccgtgggaatggtgcgtcatcagggcaagatcatgtacgtgggcgacgtgcggagcgtgacacagaagcatatccaggagtggggccctttcgacctggtgatcggcggcagcccttgcaatgacctgagcatcgtgaacccagcccggaagggcctgtacgagggaaccggcagactgttcttcgagttttacagactgctgcacgacgcccggcctaaggaaggcgacgaccggcccttcttttggctgttcgagaatgtggtggccatgggagtcagcgacaagcgggatattagccggttcctggagagcaaccccgtgatgatcgatgccaaggaagtgagcgccgcccaccgggccagatacttctggggcaatctgcctggcatgaacagacccctggccagcaccgtgaacgacaagctggagctgcaggagtgcctggagcacggccggatcgccaagttcagcaaggtgagaaccatcaccacccgaagcaacagcatcaaacaaggcaaggaccagcactttcctgtgttcatgaacgagaaggaggacatcctgtggtgtaccgagatggagagagtgttcgggttcccagtccactacacagatgtcagcaacatgtctagactggccagacagagactgctgggaagaagctggtccgtccctgtgatcagacacctgttcgcccctctgaaggagtacttcgcctgcgtgagcagcggcaacagcaacgccaacagccggggccccagcttctctagcggcctggtgccactgtccctgagagggagccacatgggccccatggagatctacaaaaccgtgagcgcctggaagcggcagcctgtgcgcgtgctgagcctgtttcggaatatcgataaagtcctgaaaagcctgggattcctggagagcggctctggctccggcggtggcaccctgaagtacgtggaggatgtgacaaacgtggtcagacgggatgtggagaagtggggccccttcgatctggtgtacggcagcacccaacccctgggcagctcttgtgaccggtgccctggctggtacatgtttcagttccaccggatcctgcagtacgccctgccgagacaggagtcccagcggccattcttttggattttcatggacaacttgctgctgaccgaggatgaccaggaaactaccactcggttcctgcagaccgaagccgtgaccctgcaggacgtgagaggccgggactaccagaacgccatgcgggtgtggtccaacatccctggactgaaaagcaagcacgcacctctgacccctaaagaagaggagtacctgcaggcccaggtgcggagcagaagcaagctggacgcccctaaggtggatctgctggtgaagaattgcctcctgcccctgagagagtacttcaagtatttcagccagaatagtctgcccctgggaggcagcggcggcggcgccctggtgacatttgaggacgtcgccgtgcggttcacccaggaggaatgggctctgctggatccttctcagaaaatcctgtaccgggacgtgatgagagagacataccggaatctgacctccgtgggcatcaactgggaatgttgggaccttgaagcctgcttcagaagcctgggaagaaacctgagagtgcaggtggtgaagagaaagtgcgagctgaccaacagcggcccctgcgccgagggcggcccaagcagcggcgcccctcctcccagcggcggcagcccagccggctccccaacctctaccgaggagggcacctctgagtccgccacccccgagagcggccctggcacctccaccgagcccagcgagggcagcgcacccggcagccctgccggcagccccacctccacagaggagggaaccagcaccgagcccagcgaaggcagcgccccaggcaccagcaccgagcctagtgagcaggagattaaacggatcaacaagatcagaagaagacttgtgaaagacagcaacaccaagaaggccggcaagacaggccccatgaaaaccctgctggttagagtgatgacacccgatctgagagagcggctggaaaacctgagaaagaagcctgaaaatatcccccagcccatcagcaatacatctagagccaacctgaataagctgctgaccgattacaccgaaatgaagaaggcgatcctgcatgtgtactgggaagagttccagaaggaccctgtgggcctgatgagccgggtggcccagcctgccagcaagaagatcgatcagaacaagctgaaacctgagatggacgagaagggcaacctgaccaccgccggctttgcctgctctcagtgtggccagcccctgttcgtgtacaagctggagcaggtgtctgagaagggcaaggcttacaccaactacttcggacggtgcaatgtggccgagcacgaaaagctgatcctgctggcccagctgaagcccgagaaggatagcgacgaagccgtgacatatagcctgggaaagtttgggcagagggccctggatttctacagcattcatgtgaccaaggagtccacccaccccgtgaagcccctggcccagatcgccggaaacagatacgcctccggacctgtgggaaaggccctgagcgacgcatgtatgggcacaatcgcctccttcctgtctaagtaccaggacatcatcatcgaacaccagaaggtggtgaagggcaaccagaagagactggagagcctgcgggagctggccggcaaggaaaacctggaataccctagcgtgaccctgccacctcagcctcacaccaaggagggcgttgatgcctacaacgaagtgatcgcccgggtgcgaatgtgggtgaacctgaacctgtggcagaagctgaagctaagcagagatgatgccaagcctctgctgagactgaagggattcccttcctttcctctggtcgagagacaggccaacgaagtggactggtgggacatggtgtgtaacgtgaagaagctgatcaacgagaaaaaggaggatggcaaggtgttttggcagaatctggctggctacaagagacaggaagccctgagaccatacctgagcagcgaggaagatcggaagaagggaaagaaattcgctcggtaccagctgggcgacctgctgctgcacctggaaaagaagcacggcgaggactggggaaaggtgtacgacgaggcctgggagcggattgacaagaaagtggaaggcctgagcaagcacatcaagctggaagaggaacggagaagcgaggacgcccagagcaaggccgccctgaccgactggctgcgggctaaggccagcttcgtgatcgagggcctgaaggaggccgacaaggacgagttctgcagatgcgagctgaagctgcagaagtggtacggggacctgcggggaaagcccttcgccatcgaagccgagaacagcatcctggacatcagcggcttcagcaagcagtacaactgtgccttcatctggcagaaggacggcgtgaagaagctgaacctgtacctgatcatcaactacttcaagggcggcaagctgcggttcaagaagatcaaacctgaagccttcgaagccaacagattctacaccgtgatcaacaaaaagagcggcgagatcgtgcccatggaggtgaacttcaacttcgacgaccccaacctgatcatcctgcctctggcctttggcaagagacagggcagagaattcatctggaacgacctgctgtccctggaaaccggcagcctgaagctggccaacggaagagtgatcgagaagacactgtacaacagaagaacccggcaggatgagcctgccctgttcgtggccctgaccttcgagcggcgggaggtcctggactcctccaatatcaaaccaatgaacctgatcggcgtggcaagaggcgaaaacatccccgccgtgatcgccctgaccgaccccgagggctgcccactgagccggtttaaggatagcctgggaaacccaacccacatcctgagaatcggcgagagctataaggagaagcagcggaccatccaggccaagaaggaggtggagcagcggagagccggcggctacagccggaagtacgccagcaaagccaagaatctggcagacgatatggtgagaaacaccgctagagatctgctgtactacgccgtgacccaggatgccatgctgatcttcgccaacctgagccggggcttcggccggcagggcaagcggaccttcatggccgagagacagtacacacggatggaggactggctgaccgccaagctggcctacgagggcctgagcaagacctacctgtccaagacactggcccagtacacctccaagacatgcagcaactgtgggtttaccatcaccagcgccgactacgacagggtgctggagaagctgaagaagacagcaacaggctggatgaccacaattaacggcaaggagctgaaggtggagggccagattacctactacaacagatacaagagacagaacgtagtcaaggacctgtccgtcgagctggatagactgagcgaagaatctgtgaacaacgacatctcctcctggacaaagggcagaagcggagaagctctgagcctcctgaagaaaagattctcccatagacccgtgcaggagaagttcgtgtgcctgaactgcggcttcgagacacacgcagccgagcaagccgccctgaacatcgccagatcctggctgttcctgcggagccaggagtacaagaaataccagacaaacaagacaaccggcaacaccgataagagagccttcgtcgagacctggcagtccttttaccggaagaagcttaaggaggtgtggaaacctgccgtgcggtctggcggatctggcggaggctccgagcccgtgagcttcgaggaggtggccgtgtacttcagcagggaggagtgggccctgctggaccccgcccagagggccctgtacagggacgtgatgctggagacctacgagtgcgtggccagcctggcccccctgcccggccccaagcccatggtgatcagcctgctggaggagggcgaggagccctggatccccgacgtgggcagccccgaggccgtggccggcgacgtgagccccggcgagggcggcccaagcagcggcgcccctcctcccagcggcggcagcccagccggctccccaacctctaccgaggagggcacctctgagtccgccacccccgagagcggccctggcacctccaccgagcccagcgagggcagcgcacccggcagccctgccggcagccccacctccacagaggagggaaccagcaccgagcccagcgaaggcagcgccccaggcaccagcaccgagcctagtgagcaggagattaaacggatcaacaagatcagaagaagacttgtgaaagacagcaacaccaagaaggccggcaagacaggccccatgaaaaccctgctggttagagtgatgacacccgatctgagagagcggctggaaaacctgagaaagaagcctgaaaatatcccccagcccatcagcaatacatctagagccaacctgaataagctgctgaccgattacaccgaaatgaagaaggcgatcctgcatgtgtactgggaagagttccagaaggaccctgtgggcctgatgagccgggtggcccagcctgccagcaagaagatcgatcagaacaagctgaaacctgagatggacgagaagggcaacctgaccaccgccggctttgcctgctctcagtgtggccagcccctgttcgtgtacaagctggagcaggtgtctgagaagggcaaggcttacaccaactacttcggacggtgcaatgtggccgagcacgaaaagctgatcctgctggcccagctgaagcccgagaaggatagcgacgaagccgtgacatatagcctgggaaagtttgggcagagggccctggatttctacagcattcatgtgaccaaggagtccacccaccccgtgaagcccctggcccagatcgccggaaacagatacgcctccggacctgtgggaaaggccctgagcgacgcatgtatgggcacaatcgcctccttcctgtctaagtaccaggacatcatcatcgaacaccagaaggtggtgaagggcaaccagaagagactggagagcctgcgggagctggccggcaaggaaaacctggaataccctagcgtgaccctgccacctcagcctcacaccaaggagggcgttgatgcctacaacgaagtgatcgcccgggtgcgaatgtgggtgaacctgaacctgtggcagaagctgaagctaagcagagatgatgccaagcctctgctgagactgaagggattcccttcctttcctctggtcgagagacaggccaacgaagtggactggtgggacatggtgtgtaacgtgaagaagctgatcaacgagaaaaaggaggatggcaaggtgttttggcagaatctggctggctacaagagacaggaagccctgagaccatacctgagcagcgaggaagatcggaagaagggaaagaaattcgctcggtaccagctgggcgacctgctgctgcacctggaaaagaagcacggcgaggactggggaaaggtgtacgacgaggcctgggagcggattgacaagaaagtggaaggcctgagcaagcacatcaagctggaagaggaacggagaagcgaggacgcccagagcaaggccgccctgaccgactggctgcgggctaaggccagcttcgtgatcgagggcctgaaggaggccgacaaggacgagttctgcagatgcgagctgaagctgcagaagtggtacggggacctgcggggaaagcccttcgccatcgaagccgagaacagcatcctggacatcagcggcttcagcaagcagtacaactgtgccttcatctggcagaaggacggcgtgaagaagctgaacctgtacctgatcatcaactacttcaagggcggcaagctgcggttcaagaagatcaaacctgaagccttcgaagccaacagattctacaccgtgatcaacaaaaagagcggcgagatcgtgcccatggaggtgaacttcaacttcgacgaccccaacctgatcatcctgcctctggcctttggcaagagacagggcagagaattcatctggaacgacctgctgtccctggaaaccggcagcctgaagctggccaacggaagagtgatcgagaagacactgtacaacagaagaacccggcaggatgagcctgccctgttcgtggccctgaccttcgagcggcgggaggtcctggactcctccaatatcaaaccaatgaacctgatcggcgtggcaagaggcgaaaacatccccgccgtgatcgccctgaccgaccccgagggctgcccactgagccggtttaaggatagcctgggaaacccaacccacatcctgagaatcggcgagagctataaggagaagcagcggaccatccaggccaagaaggaggtggagcagcggagagccggcggctacagccggaagtacgccagcaaagccaagaatctggcagacgatatggtgagaaacaccgctagagatctgctgtactacgccgtgacccaggatgccatgctgatcttcgccaacctgagccggggcttcggccggcagggcaagcggaccttcatggccgagagacagtacacacggatggaggactggctgaccgccaagctggcctacgagggcctgagcaagacctacctgtccaagacactggcccagtacacctccaagacatgcagcaactgtgggtttaccatcaccagcgccgactacgacagggtgctggagaagctgaagaagacagcaacaggctggatgaccacaattaacggcaaggagctgaaggtggagggccagattacctactacaacagatacaagagacagaacgtagtcaaggacctgtccgtcgagctggatagactgagcgaagaatctgtgaacaacgacatctcctcctggacaaagggcagaagcggagaagctctgagcctcctgaagaaaagattctcccatagacccgtgcaggagaagttcgtgtgcctgaactgcggcttcgagacacacgcagccgagcaagccgccctgaacatcgccagatcctggctgttcctgcggagccaggagtacaagaaataccagacaaacaagacaaccggcaacaccgataagagagccttcgtcgagacctggcagtccttttaccggaagaagcttaaggaggtgtggaaacctgccgtgcggtctggcggatctggcggaggctcctgagcccgtgagcttcgaggaggtggccgtgtacttcagcagggaggagtgggccctgctggaccccgcccagagggccctgtacagggacgtgatgctggagacctacgagtgcgtggccagcctggcccccctgcccggccccaagcccatggtgatcagcctgctggaggagggcgaggagccctggatccccgacgtgggcagccccgaggccgtggccggcgacgtgagccccggcgagggatctggctccggcagcggccccaagaaaaagagaaaagtctaagctgccttctgcggggcttgccttctggccatgcccttcttctctcccttgcacctgtacctcttggtctttgaataaagcctgagtaggaaggctagcaaaaaaaaaaaaaaaaaaaaaaaaaaaaaaaaaaaaaaaaaaaaaaaaaaaaaaaaaaaaaaaaaaaaaaaaaaaaaaaa

SEQ ID NO: 15795 - RNA, 9485 nt, synthetic construct
  source 1..9485: mol_type = other RNA
aggaaataagagagaaaagaagagtaagaagaaatataagagccaccatggcccctaagaagaagcgtaaagtgagccggatggaacgcctcgtctacgaggtgcggcagaagtgcagaaacatcgaggacatctgcatctcctgcggatctctgaacgtgaccctggagcacccactgttcatcggcggcatgtgccagaactgtaaaaactgttttctggagtgtgcctatcaatacgacgatgacggctaccagagctactgcaccatctgttgcggcggaagagaggtgctgatgtgtggaaataacaactgctgccggtgcttctgcgtggaatgcgtggacctgctggtgggccccggcgccgcccaggccgctattaaggaagatccttggaactgctacatgtgcggccacaagggcacatacggcctgctgagacggagagaggactggcctagcagactgcagatgttcttcgccaataaccacgaccaggagttcgacccccctaaggtgtaccctcccgtccccgccgagaagagaaagcccatccgggtcctgagcctgttcgatggcatcgccaccggtctgctggtgctgaaggacctgggcatccaggtggataggtacattgcctccgaggtgtgcgaggactccatcaccgtgggaatggtgcgtcatcagggcaagatcatgtacgtgggcgacgtgcggagcgtgacacagaagcatatccaggagtggggccctttcgacctggtgatcggcggcagcccttgcaatgacctgagcatcgtgaacccagcccggaagggcctgtacgagggaaccggcagactgttcttcgagttttacagactgctgcacgacgcccggcctaaggaaggcgacgaccggcccttcttttggctgttcgagaatgtggtggccatgggagtcagcgacaagcgggatattagccggttcctggagagcaaccccgtgatgatcgatgccaaggaagtgagcgccgcccaccgggccagatacttctggggcaatctgcctggcatgaacagacccctggccagcaccgtgaacgacaagctggagctgcaggagtgcctggagcacggccggatcgccaagttcagcaaggtgagaaccatcaccacccgaagcaacagcatcaaacaaggcaaggaccagcactttcctgtgttcatgaacgagaaggaggacatcctgtggtgtaccgagatggagagagtgttcgggttcccagtccactacacagatgtcagcaacatgtctagactggccagacagagactgctgggaagaagctggtccgtccctgtgatcagacacctgttcgcccctctgaaggagtacttcgcctgcgtgagcagcggcaacagcaacgccaacagccggggccccagcttctctagcggcctggtgccactgtccctgagagggagccacatgggccccatggagatctacaaaaccgtgagcgcctggaagcggcagcctgtgcgcgtgctgagcctgtttcggaatatcgataaagtcctgaaaagcctgggattcctggagagcggctctggctccggcggtggcaccctgaagtacgtggaggatgtgacaaacgtggtcagacgggatgtggagaagtggggccccttcgatctggtgtacggcagcacccaacccctgggcagctcttgtgaccggtgccctggctggtacatgtttcagttccaccggatcctgcagtacgccctgccgagacaggagtcccagcggccattcttttggattttcatggacaacttgctgctgaccgaggatgaccaggaaactaccactcggttcctgcagaccgaagccgtgaccctgcaggacgtgagaggccgggactaccagaacgccatgcgggtgtggtccaacatccctggactgaaaagcaagcacgcacctctgacccctaaagaagaggagtacctgcaggcccaggtgcggagcagaagcaagctggacgcccctaaggtggatctgctggtgaagaattgcctcctgcccctgagagagtacttcaagtatttcagccagaatagtctgcccctgggaggcagcggcggcggcgccctggtgacatttgaggacgtcgccgtgcggttcacccaggaggaatgggctctgctggatccttctcagaaaatcctgtaccgggacgtgatgagagagacataccggaatctgacctccgtgggcatcaactgggaatgttgggaccttgaagcctgcttcagaagcctgggaagaaacctgagagtgcaggtggtgaagagaaagtgcgagctgaccaacagcggcccctgcgccgagggcggcccaagcagcggcgcccctcctcccagcggcggcagcccagccggctccccaacctctaccgaggagggcacctctgagtccgccacccccgagagcggccctggcacctccaccgagcccagcgagggcagcgcacccggcagccctgccggcagccccacctccacagaggagggaaccagcaccgagcccagcgaaggcagcgccccaggcaccagcaccgagcctagtgagcaggagattaaacggatcaacaagatcagaagaagacttgtgaaagacagcaacaccaagaaggccggcaagacaggccccatgaaaaccctgctggttagagtgatgacacccgatctgagagagcggctggaaaacctgagaaagaagcctgaaaatatcccccagcccatcagcaatacatctagagccaacctgaataagctgctgaccgattacaccgaaatgaagaaggcgatcctgcatgtgtactgggaagagttccagaaggaccctgtgggcctgatgagccgggtggcccagcctgccagcaagaagatcgatcagaacaagctgaaacctgagatggacgagaagggcaacctgaccaccgccggctttgcctgctctcagtgtggccagcccctgttcgtgtacaagctggagcaggtgtctgagaagggcaaggcttacaccaactacttcggacggtgcaatgtggccgagcacgaaaagctgatcctgctggcccagctgaagcccgagaaggatagcgacgaagccgtgacatatagcctgggaaagtttgggcagagggccctggatttctacagcattcatgtgaccaaggagtccacccaccccgtgaagcccctggcccagatcgccggaaacagatacgcctccggacctgtgggaaaggccctgagcgacgcatgtatgggcacaatcgcctccttcctgtctaagtaccaggacatcatcatcgaacaccagaaggtggtgaagggcaaccagaagagactggagagcctgcgggagctggccggcaaggaaaacctggaataccctagcgtgaccctgccacctcagcctcacaccaaggagggcgttgatgcctacaacgaagtgatcgcccgggtgcgaatgtgggtgaacctgaacctgtggcagaagctgaagctaagcagagatgatgccaagcctctgctgagactgaagggattcccttcctttcctctggtcgagagacaggccaacgaagtggactggtgggacatggtgtgtaacgtgaagaagctgatcaacgagaaaaaggaggatggcaaggtgttttggcagaatctggctggctacaagagacaggaagccctgagaccatacctgagcagcgaggaagatcggaagaagggaaagaaattcgctcggtaccagctgggcgacctgctgctgcacctggaaaagaagcacggcgaggactggggaaaggtgtacgacgaggcctgggagcggattgacaagaaagtggaaggcctgagcaagcacatcaagctggaagaggaacggagaagcgaggacgcccagagcaaggccgccctgaccgactggctgcgggctaaggccagcttcgtgatcgagggcctgaaggaggccgacaaggacgagttctgcagatgcgagctgaagctgcagaagtggtacggggacctgcggggaaagcccttcgccatcgaagccgagaacagcatcctggacatcagcggcttcagcaagcagtacaactgtgccttcatctggcagaaggacggcgtgaagaagctgaacctgtacctgatcatcaactacttcaagggcggcaagctgcggttcaagaagatcaaacctgaagccttcgaagccaacagattctacaccgtgatcaacaaaaagagcggcgagatcgtgcccatggaggtgaacttcaacttcgacgaccccaacctgatcatcctgcctctggcctttggcaagagacagggcagagaattcatctggaacgacctgctgtccctggaaaccggcagcctgaagctggccaacggaagagtgatcgagaagacactgtacaacagaagaacccggcaggatgagcctgccctgttcgtggccctgaccttcgagcggcgggaggtcctggactcctccaatatcaaaccaatgaacctgatcggcgtggcaagaggcgaaaacatccccgccgtgatcgccctgaccgaccccgagggctgcccactgagccggtttaaggatagcctgggaaacccaacccacatcctgagaatcggcgagagctataaggagaagcagcggaccatccaggccaagaaggaggtggagcagcggagagccggcggctacagccggaagtacgccagcaaagccaagaatctggcagacgatatggtgagaaacaccgctagagatctgctgtactacgccgtgacccaggatgccatgctgatcttcgccaacctgagccggggcttcggccggcagggcaagcggaccttcatggccgagagacagtacacacggatggaggactggctgaccgccaagctggcctacgagggcctgagcaagacctacctgtccaagacactggcccagtacacctccaagacatgcagcaactgtgggtttaccatcaccagcgccgactacgacagggtgctggagaagctgaagaagacagcaacaggctggatgaccacaattaacggcaaggagctgaaggtggagggccagattacctactacaacagatacaagagacagaacgtagtcaaggacctgtccgtcgagctggatagactgagcgaagaatctgtgaacaacgacatctcctcctggacaaagggcagaagcggagaagctctgagcctcctgaagaaaagattctcccatagacccgtgcaggagaagttcgtgtgcctgaactgcggcttcgagacacacgcagccgagcaagccgccctgaacatcgccagatcctggctgttcctgcggagccaggagtacaagaaataccagacaaacaagacaaccggcaacaccgataagagagccttcgtcgagacctggcagtccttttaccggaagaagcttaaggaggtgtggaaacctgccgtgcggtctggcggatctggcggaggctccaaggaggccttcgtggccttcggcgacgtggccgtggacttcacccaggaggagtggaggctgctgagccccgcccagaggaccctgcacagggaggtgatgctggagacctacaaccacctggtgagcctggagatccccttcagcaagcccaagctgatcagccagctggagaggggcgaggagccctggatcgaggagaggcagaggcccctgggcctgtgccccgccagcaggcccaccggcggcccaagcagcggcgcccctcctcccagcggcggcagcccagccggctccccaacctctaccgaggagggcacctctgagtccgccacccccgagagcggccctggcacctccaccgagcccagcgagggcagcgcacccggcagccctgccggcagccccacctccacagaggagggaaccagcaccgagcccagcgaaggcagcgccccaggcaccagcaccgagcctagtgagcaggagattaaacggatcaacaagatcagaagaagacttgtgaaagacagcaacaccaagaaggccggcaagacaggccccatgaaaaccctgctggttagagtgatgacacccgatctgagagagcggctggaaaacctgagaaagaagcctgaaaatatcccccagcccatcagcaatacatctagagccaacctgaataagctgctgaccgattacaccgaaatgaagaaggcgatcctgcatgtgtactgggaagagttccagaaggaccctgtgggcctgatgagccgggtggcccagcctgccagcaagaagatcgatcagaacaagctgaaacctgagatggacgagaagggcaacctgaccaccgccggctttgcctgctctcagtgtggccagcccctgttcgtgtacaagctggagcaggtgtctgagaagggcaaggcttacaccaactacttcggacggtgcaatgtggccgagcacgaaaagctgatcctgctggcccagctgaagcccgagaaggatagcgacgaagccgtgacatatagcctgggaaagtttgggcagagggccctggatttctacagcattcatgtgaccaaggagtccacccaccccgtgaagcccctggcccagatcgccggaaacagatacgcctccggacctgtgggaaaggccctgagcgacgcatgtatgggcacaatcgcctccttcctgtctaagtaccaggacatcatcatcgaacaccagaaggtggtgaagggcaaccagaagagactggagagcctgcgggagctggccggcaaggaaaacctggaataccctagcgtgaccctgccacctcagcctcacaccaaggagggcgttgatgcctacaacgaagtgatcgcccgggtgcgaatgtgggtgaacctgaacctgtggcagaagctgaagctaagcagagatgatgccaagcctctgctgagactgaagggattcccttcctttcctctggtcgagagacaggccaacgaagtggactggtgggacatggtgtgtaacgtgaagaagctgatcaacgagaaaaaggaggatggcaaggtgttttggcagaatctggctggctacaagagacaggaagccctgagaccatacctgagcagcgaggaagatcggaagaagggaaagaaattcgctcggtaccagctgggcgacctgctgctgcacctggaaaagaagcacggcgaggactggggaaaggtgtacgacgaggcctgggagcggattgacaagaaagtggaaggcctgagcaagcacatcaagctggaagaggaacggagaagcgaggacgcccagagcaaggccgccctgaccgactggctgcgggctaaggccagcttcgtgatcgagggcctgaaggaggccgacaaggacgagttctgcagatgcgagctgaagctgcagaagtggtacggggacctgcggggaaagcccttcgccatcgaagccgagaacagcatcctggacatcagcggcttcagcaagcagtacaactgtgccttcatctggcagaaggacggcgtgaagaagctgaacctgtacctgatcatcaactacttcaagggcggcaagctgcggttcaagaagatcaaacctgaagccttcgaagccaacagattctacaccgtgatcaacaaaaagagcggcgagatcgtgcccatggaggtgaacttcaacttcgacgaccccaacctgatcatcctgcctctggcctttggcaagagacagggcagagaattcatctggaacgacctgctgtccctggaaaccggcagcctgaagctggccaacggaagagtgatcgagaagacactgtacaacagaagaacccggcaggatgagcctgccctgttcgtggccctgaccttcgagcggcgggaggtcctggactcctccaatatcaaaccaatgaacctgatcggcgtggcaagaggcgaaaacatccccgccgtgatcgccctgaccgaccccgagggctgcccactgagccggtttaaggatagcctgggaaacccaacccacatcctgagaatcggcgagagctataaggagaagcagcggaccatccaggccaagaaggaggtggagcagcggagagccggcggctacagccggaagtacgccagcaaagccaagaatctggcagacgatatggtgagaaacaccgctagagatctgctgtactacgccgtgacccaggatgccatgctgatcttcgccaacctgagccggggcttcggccggcagggcaagcggaccttcatggccgagagacagtacacacggatggaggactggctgaccgccaagctggcctacgagggcctgagcaagacctacctgtccaagacactggcccagtacacctccaagacatgcagcaactgtgggtttaccatcaccagcgccgactacgacagggtgctggagaagctgaagaagacagcaacaggctggatgaccacaattaacggcaaggagctgaaggtggagggccagattacctactacaacagatacaagagacagaacgtagtcaaggacctgtccgtcgagctggatagactgagcgaagaatctgtgaacaacgacatctcctcctggacaaagggcagaagcggagaagctctgagcctcctgaagaaaagattctcccatagacccgtgcaggagaagttcgtgtgcctgaactgcggcttcgagacacacgcagccgagcaagccgccctgaacatcgccagatcctggctgttcctgcggagccaggagtacaagaaataccagacaaacaagacaaccggcaacaccgataagagagccttcgtcgagacctggcagtccttttaccggaagaagcttaaggaggtgtggaaacctgccgtgcggtctggcggatctggcggaggctcctaaggaggccttcgtggccttcggcgacgtggccgtggacttcacccaggaggagtggaggctgctgagccccgcccagaggaccctgcacagggaggtgatgctggagacctacaaccacctggtgagcctggagatccccttcagcaagcccaagctgatcagccagctggagaggggcgaggagccctggatcgaggagaggcagaggcccctgggcctgtgccccgccagcaggcccaccggatctggctccggcagcggccccaagaaaaagagaaaagtctaagctgccttctgcggggcttgccttctggccatgcccttcttctctcccttgcacctgtacctcttggtctttgaataaagcctgagtaggaaggctagcaaaaaaaaaaaaaaaaaaaaaaaaaaaaaaaaaaaaaaaaaaaaaaaaaaaaaaaaaaaaaaaaaaaaaaaaaaaaaaaa

SEQ ID NO: 15796 - RNA, 9485 nt, synthetic construct
  source 1..9485: mol_type = other RNA
aggaaataagagagaaaagaagagtaagaagaaatataagagccaccatggcccctaagaagaagcgtaaagtgagccggatggaacgcctcgtctacgaggtgcggcagaagtgcagaaacatcgaggacatctgcatctcctgcggatctctgaacgtgaccctggagcacccactgttcatcggcggcatgtgccagaactgtaaaaactgttttctggagtgtgcctatcaatacgacgatgacggctaccagagctactgcaccatctgttgcggcggaagagaggtgctgatgtgtggaaataacaactgctgccggtgcttctgcgtggaatgcgtggacctgctggtgggccccggcgccgcccaggccgctattaaggaagatccttggaactgctacatgtgcggccacaagggcacatacggcctgctgagacggagagaggactggcctagcagactgcagatgttcttcgccaataaccacgaccaggagttcgacccccctaaggtgtaccctcccgtccccgccgagaagagaaagcccatccgggtcctgagcctgttcgatggcatcgccaccggtctgctggtgctgaaggacctgggcatccaggtggataggtacattgcctccgaggtgtgcgaggactccatcaccgtgggaatggtgcgtcatcagggcaagatcatgtacgtgggcgacgtgcggagcgtgacacagaagcatatccaggagtggggccctttcgacctggtgatcggcggcagcccttgcaatgacctgagcatcgtgaacccagcccggaagggcctgtacgagggaaccggcagactgttcttcgagttttacagactgctgcacgacgcccggcctaaggaaggcgacgaccggcccttcttttggctgttcgagaatgtggtggccatgggagtcagcgacaagcgggatattagccggttcctggagagcaaccccgtgatgatcgatgccaaggaagtgagcgccgcccaccgggccagatacttctggggcaatctgcctggcatgaacagacccctggccagcaccgtgaacgacaagctggagctgcaggagtgcctggagcacggccggatcgccaagttcagcaaggtgagaaccatcaccacccgaagcaacagcatcaaacaaggcaaggaccagcactttcctgtgttcatgaacgagaaggaggacatcctgtggtgtaccgagatggagagagtgttcgggttcccagtccactacacagatgtcagcaacatgtctagactggccagacagagactgctgggaagaagctggtccgtccctgtgatcagacacctgttcgcccctctgaaggagtacttcgcctgcgtgagcagcggcaacagcaacgccaacagccggggccccagcttctctagcggcctggtgccactgtccctgagagggagccacatgggccccatggagatctacaaaaccgtgagcgcctggaagcggcagcctgtgcgcgtgctgagcctgtttcggaatatcgataaagtcctgaaaagcctgggattcctggagagcggctctggctccggcggtggcaccctgaagtacgtggaggatgtgacaaacgtggtcagacgggatgtggagaagtggggccccttcgatctggtgtacggcagcacccaacccctgggcagctcttgtgaccggtgccctggctggtacatgtttcagttccaccggatcctgcagtacgccctgccgagacaggagtcccagcggccattcttttggattttcatggacaacttgctgctgaccgaggatgaccaggaaactaccactcggttcctgcagaccgaagccgtgaccctgcaggacgtgagaggccgggactaccagaacgccatgcgggtgtggtccaacatccctggactgaaaagcaagcacgcacctctgacccctaaagaagaggagtacctgcaggcccaggtgcggagcagaagcaagctggacgcccctaaggtggatctgctggtgaagaattgcctcctgcccctgagagagtacttcaagtatttcagccagaatagtctgcccctgggaggcagcggcggcggcgccctggtgacatttgaggacgtcgccgtgcggttcacccaggaggaatgggctctgctggatccttctcagaaaatcctgtaccgggacgtgatgagagagacataccggaatctgacctccgtgggcatcaactgggaatgttgggaccttgaagcctgcttcagaagcctgggaagaaacctgagagtgcaggtggtgaagagaaagtgcgagctgaccaacagcggcccctgcgccgagggcggcccaagcagcggcgcccctcctcccagcggcggcagcccagccggctccccaacctctaccgaggagggcacctctgagtccgccacccccgagagcggccctggcacctccaccgagcccagcgagggcagcgcacccggcagccctgccggcagccccacctccacagaggagggaaccagcaccgagcccagcgaaggcagcgccccaggcaccagcaccgagcctagtgagcaggagattaaacggatcaacaagatcagaagaagacttgtgaaagacagcaacaccaagaaggccggcaagacaggccccatgaaaaccctgctggttagagtgatgacacccgatctgagagagcggctggaaaacctgagaaagaagcctgaaaatatcccccagcccatcagcaatacatctagagccaacctgaataagctgctgaccgattacaccgaaatgaagaaggcgatcctgcatgtgtactgggaagagttccagaaggaccctgtgggcctgatgagccgggtggcccagcctgccagcaagaagatcgatcagaacaagctgaaacctgagatggacgagaagggcaacctgaccaccgccggctttgcctgctctcagtgtggccagcccctgttcgtgtacaagctggagcaggtgtctgagaagggcaaggcttacaccaactacttcggacggtgcaatgtggccgagcacgaaaagctgatcctgctggcccagctgaagcccgagaaggatagcgacgaagccgtgacatatagcctgggaaagtttgggcagagggccctggatttctacagcattcatgtgaccaaggagtccacccaccccgtgaagcccctggcccagatcgccggaaacagatacgcctccggacctgtgggaaaggccctgagcgacgcatgtatgggcacaatcgcctccttcctgtctaagtaccaggacatcatcatcgaacaccagaaggtggtgaagggcaaccagaagagactggagagcctgcgggagctggccggcaaggaaaacctggaataccctagcgtgaccctgccacctcagcctcacaccaaggagggcgttgatgcctacaacgaagtgatcgcccgggtgcgaatgtgggtgaacctgaacctgtggcagaagctgaagctaagcagagatgatgccaagcctctgctgagactgaagggattcccttcctttcctctggtcgagagacaggccaacgaagtggactggtgggacatggtgtgtaacgtgaagaagctgatcaacgagaaaaaggaggatggcaaggtgttttggcagaatctggctggctacaagagacaggaagccctgagaccatacctgagcagcgaggaagatcggaagaagggaaagaaattcgctcggtaccagctgggcgacctgctgctgcacctggaaaagaagcacggcgaggactggggaaaggtgtacgacgaggcctgggagcggattgacaagaaagtggaaggcctgagcaagcacatcaagctggaagaggaacggagaagcgaggacgcccagagcaaggccgccctgaccgactggctgcgggctaaggccagcttcgtgatcgagggcctgaaggaggccgacaaggacgagttctgcagatgcgagctgaagctgcagaagtggtacggggacctgcggggaaagcccttcgccatcgaagccgagaacagcatcctggacatcagcggcttcagcaagcagtacaactgtgccttcatctggcagaaggacggcgtgaagaagctgaacctgtacctgatcatcaactacttcaagggcggcaagctgcggttcaagaagatcaaacctgaagccttcgaagccaacagattctacaccgtgatcaacaaaaagagcggcgagatcgtgcccatggaggtgaacttcaacttcgacgaccccaacctgatcatcctgcctctggcctttggcaagagacagggcagagaattcatctggaacgacctgctgtccctggaaaccggcagcctgaagctggccaacggaagagtgatcgagaagacactgtacaacagaagaacccggcaggatgagcctgccctgttcgtggccctgaccttcgagcggcgggaggtcctggactcctccaatatcaaaccaatgaacctgatcggcgtggcaagaggcgaaaacatccccgccgtgatcgccctgaccgaccccgagggctgcccactgagccggtttaaggatagcctgggaaacccaacccacatcctgagaatcggcgagagctataaggagaagcagcggaccatccaggccaagaaggaggtggagcagcggagagccggcggctacagccggaagtacgccagcaaagccaagaatctggcagacgatatggtgagaaacaccgctagagatctgctgtactacgccgtgacccaggatgccatgctgatcttcgccaacctgagccggggcttcggccggcagggcaagcggaccttcatggccgagagacagtacacacggatggaggactggctgaccgccaagctggcctacgagggcctgagcaagacctacctgtccaagacactggcccagtacacctccaagacatgcagcaactgtgggtttaccatcaccagcgccgactacgacagggtgctggagaagctgaagaagacagcaacaggctggatgaccacaattaacggcaaggagctgaaggtggagggccagattacctactacaacagatacaagagacagaacgtagtcaaggacctgtccgtcgagctggatagactgagcgaagaatctgtgaacaacgacatctcctcctggacaaagggcagaagcggagaagctctgagcctcctgaagaaaagattctcccatagacccgtgcaggagaagttcgtgtgcctgaactgcggcttcgagacacacgcagccgagcaagccgccctgaacatcgccagatcctggctgttcctgcggagccaggagtacaagaaataccagacaaacaagacaaccggcaacaccgataagagagccttcgtcgagacctggcagtccttttaccggaagaagcttaaggaggtgtggaaacctgccgtgcggtctggcggatctggcggaggctccccccaggagagcgtgaccttcaaggacatcgccgtggacttcacccaggaggagtgggccctgctggacaccagccagaggaagctgtacagggacgtgatgctggagaacatcagccacctggtgagcgtgggctaccacctgtgcaagagcgacgtggtgagccagctggagcagggcgtggagctgtggagggagggcaggggcttcccccagggccccaaccccgacaggaagagcggcggcggcccaagcagcggcgcccctcctcccagcggcggcagcccagccggctccccaacctctaccgaggagggcacctctgagtccgccacccccgagagcggccctggcacctccaccgagcccagcgagggcagcgcacccggcagccctgccggcagccccacctccacagaggagggaaccagcaccgagcccagcgaaggcagcgccccaggcaccagcaccgagcctagtgagcaggagattaaacggatcaacaagatcagaagaagacttgtgaaagacagcaacaccaagaaggccggcaagacaggccccatgaaaaccctgctggttagagtgatgacacccgatctgagagagcggctggaaaacctgagaaagaagcctgaaaatatcccccagcccatcagcaatacatctagagccaacctgaataagctgctgaccgattacaccgaaatgaagaaggcgatcctgcatgtgtactgggaagagttccagaaggaccctgtgggcctgatgagccgggtggcccagcctgccagcaagaagatcgatcagaacaagctgaaacctgagatggacgagaagggcaacctgaccaccgccggctttgcctgctctcagtgtggccagcccctgttcgtgtacaagctggagcaggtgtctgagaagggcaaggcttacaccaactacttcggacggtgcaatgtggccgagcacgaaaagctgatcctgctggcccagctgaagcccgagaaggatagcgacgaagccgtgacatatagcctgggaaagtttgggcagagggccctggatttctacagcattcatgtgaccaaggagtccacccaccccgtgaagcccctggcccagatcgccggaaacagatacgcctccggacctgtgggaaaggccctgagcgacgcatgtatgggcacaatcgcctccttcctgtctaagtaccaggacatcatcatcgaacaccagaaggtggtgaagggcaaccagaagagactggagagcctgcgggagctggccggcaaggaaaacctggaataccctagcgtgaccctgccacctcagcctcacaccaaggagggcgttgatgcctacaacgaagtgatcgcccgggtgcgaatgtgggtgaacctgaacctgtggcagaagctgaagctaagcagagatgatgccaagcctctgctgagactgaagggattcccttcctttcctctggtcgagagacaggccaacgaagtggactggtgggacatggtgtgtaacgtgaagaagctgatcaacgagaaaaaggaggatggcaaggtgttttggcagaatctggctggctacaagagacaggaagccctgagaccatacctgagcagcgaggaagatcggaagaagggaaagaaattcgctcggtaccagctgggcgacctgctgctgcacctggaaaagaagcacggcgaggactggggaaaggtgtacgacgaggcctgggagcggattgacaagaaagtggaaggcctgagcaagcacatcaagctggaagaggaacggagaagcgaggacgcccagagcaaggccgccctgaccgactggctgcgggctaaggccagcttcgtgatcgagggcctgaaggaggccgacaaggacgagttctgcagatgcgagctgaagctgcagaagtggtacggggacctgcggggaaagcccttcgccatcgaagccgagaacagcatcctggacatcagcggcttcagcaagcagtacaactgtgccttcatctggcagaaggacggcgtgaagaagctgaacctgtacctgatcatcaactacttcaagggcggcaagctgcggttcaagaagatcaaacctgaagccttcgaagccaacagattctacaccgtgatcaacaaaaagagcggcgagatcgtgcccatggaggtgaacttcaacttcgacgaccccaacctgatcatcctgcctctggcctttggcaagagacagggcagagaattcatctggaacgacctgctgtccctggaaaccggcagcctgaagctggccaacggaagagtgatcgagaagacactgtacaacagaagaacccggcaggatgagcctgccctgttcgtggccctgaccttcgagcggcgggaggtcctggactcctccaatatcaaaccaatgaacctgatcggcgtggcaagaggcgaaaacatccccgccgtgatcgccctgaccgaccccgagggctgcccactgagccggtttaaggatagcctgggaaacccaacccacatcctgagaatcggcgagagctataaggagaagcagcggaccatccaggccaagaaggaggtggagcagcggagagccggcggctacagccggaagtacgccagcaaagccaagaatctggcagacgatatggtgagaaacaccgctagagatctgctgtactacgccgtgacccaggatgccatgctgatcttcgccaacctgagccggggcttcggccggcagggcaagcggaccttcatggccgagagacagtacacacggatggaggactggctgaccgccaagctggcctacgagggcctgagcaagacctacctgtccaagacactggcccagtacacctccaagacatgcagcaactgtgggtttaccatcaccagcgccgactacgacagggtgctggagaagctgaagaagacagcaacaggctggatgaccacaattaacggcaaggagctgaaggtggagggccagattacctactacaacagatacaagagacagaacgtagtcaaggacctgtccgtcgagctggatagactgagcgaagaatctgtgaacaacgacatctcctcctggacaaagggcagaagcggagaagctctgagcctcctgaagaaaagattctcccatagacccgtgcaggagaagttcgtgtgcctgaactgcggcttcgagacacacgcagccgagcaagccgccctgaacatcgccagatcctggctgttcctgcggagccaggagtacaagaaataccagacaaacaagacaaccggcaacaccgataagagagccttcgtcgagacctggcagtccttttaccggaagaagcttaaggaggtgtggaaacctgccgtgcggtctggcggatctggcggaggctcctccccaggagagcgtgaccttcaaggacatcgccgtggacttcacccaggaggagtgggccctgctggacaccagccagaggaagctgtacagggacgtgatgctggagaacatcagccacctggtgagcgtgggctaccacctgtgcaagagcgacgtggtgagccagctggagcagggcgtggagctgtggagggagggcaggggcttcccccagggccccaaccccgacaggaagagcggcggatctggctccggcagcggccccaagaaaaagagaaaagtctaagctgccttctgcggggcttgccttctggccatgcccttcttctctcccttgcacctgtacctcttggtctttgaataaagcctgagtaggaaggctagcaaaaaaaaaaaaaaaaaaaaaaaaaaaaaaaaaaaaaaaaaaaaaaaaaaaaaaaaaaaaaaaaaaaaaaaaaaaaaaaa

SEQ ID NO: 15797 - RNA, 9485 nt, synthetic construct
  source 1..9485: mol_type = other RNA
aggaaataagagagaaaagaagagtaagaagaaatataagagccaccatggcccctaagaagaagcgtaaagtgagccggatggaacgcctcgtctacgaggtgcggcagaagtgcagaaacatcgaggacatctgcatctcctgcggatctctgaacgtgaccctggagcacccactgttcatcggcggcatgtgccagaactgtaaaaactgttttctggagtgtgcctatcaatacgacgatgacggctaccagagctactgcaccatctgttgcggcggaagagaggtgctgatgtgtggaaataacaactgctgccggtgcttctgcgtggaatgcgtggacctgctggtgggccccggcgccgcccaggccgctattaaggaagatccttggaactgctacatgtgcggccacaagggcacatacggcctgctgagacggagagaggactggcctagcagactgcagatgttcttcgccaataaccacgaccaggagttcgacccccctaaggtgtaccctcccgtccccgccgagaagagaaagcccatccgggtcctgagcctgttcgatggcatcgccaccggtctgctggtgctgaaggacctgggcatccaggtggataggtacattgcctccgaggtgtgcgaggactccatcaccgtgggaatggtgcgtcatcagggcaagatcatgtacgtgggcgacgtgcggagcgtgacacagaagcatatccaggagtggggccctttcgacctggtgatcggcggcagcccttgcaatgacctgagcatcgtgaacccagcccggaagggcctgtacgagggaaccggcagactgttcttcgagttttacagactgctgcacgacgcccggcctaaggaaggcgacgaccggcccttcttttggctgttcgagaatgtggtggccatgggagtcagcgacaagcgggatattagccggttcctggagagcaaccccgtgatgatcgatgccaaggaagtgagcgccgcccaccgggccagatacttctggggcaatctgcctggcatgaacagacccctggccagcaccgtgaacgacaagctggagctgcaggagtgcctggagcacggccggatcgccaagttcagcaaggtgagaaccatcaccacccgaagcaacagcatcaaacaaggcaaggaccagcactttcctgtgttcatgaacgagaaggaggacatcctgtggtgtaccgagatggagagagtgttcgggttcccagtccactacacagatgtcagcaacatgtctagactggccagacagagactgctgggaagaagctggtccgtccctgtgatcagacacctgttcgcccctctgaaggagtacttcgcctgcgtgagcagcggcaacagcaacgccaacagccggggccccagcttctctagcggcctggtgccactgtccctgagagggagccacatgggccccatggagatctacaaaaccgtgagcgcctggaagcggcagcctgtgcgcgtgctgagcctgtttcggaatatcgataaagtcctgaaaagcctgggattcctggagagcggctctggctccggcggtggcaccctgaagtacgtggaggatgtgacaaacgtggtcagacgggatgtggagaagtggggccccttcgatctggtgtacggcagcacccaacccctgggcagctcttgtgaccggtgccctggctggtacatgtttcagttccaccggatcctgcagtacgccctgccgagacaggagtcccagcggccattcttttggattttcatggacaacttgctgctgaccgaggatgaccaggaaactaccactcggttcctgcagaccgaagccgtgaccctgcaggacgtgagaggccgggactaccagaacgccatgcgggtgtggtccaacatccctggactgaaaagcaagcacgcacctctgacccctaaagaagaggagtacctgcaggcccaggtgcggagcagaagcaagctggacgcccctaaggtggatctgctggtgaagaattgcctcctgcccctgagagagtacttcaagtatttcagccagaatagtctgcccctgggaggcagcggcggcggcgccctggtgacatttgaggacgtcgccgtgcggttcacccaggaggaatgggctctgctggatccttctcagaaaatcctgtaccgggacgtgatgagagagacataccggaatctgacctccgtgggcatcaactgggaatgttgggaccttgaagcctgcttcagaagcctgggaagaaacctgagagtgcaggtggtgaagagaaagtgcgagctgaccaacagcggcccctgcgccgagggcggcccaagcagcggcgcccctcctcccagcggcggcagcccagccggctccccaacctctaccgaggagggcacctctgagtccgccacccccgagagcggccctggcacctccaccgagcccagcgagggcagcgcacccggcagccctgccggcagccccacctccacagaggagggaaccagcaccgagcccagcgaaggcagcgccccaggcaccagcaccgagcctagtgagcaggagattaaacggatcaacaagatcagaagaagacttgtgaaagacagcaacaccaagaaggccggcaagacaggccccatgaaaaccctgctggttagagtgatgacacccgatctgagagagcggctggaaaacctgagaaagaagcctgaaaatatcccccagcccatcagcaatacatctagagccaacctgaataagctgctgaccgattacaccgaaatgaagaaggcgatcctgcatgtgtactgggaagagttccagaaggaccctgtgggcctgatgagccgggtggcccagcctgccagcaagaagatcgatcagaacaagctgaaacctgagatggacgagaagggcaacctgaccaccgccggctttgcctgctctcagtgtggccagcccctgttcgtgtacaagctggagcaggtgtctgagaagggcaaggcttacaccaactacttcggacggtgcaatgtggccgagcacgaaaagctgatcctgctggcccagctgaagcccgagaaggatagcgacgaagccgtgacatatagcctgggaaagtttgggcagagggccctggatttctacagcattcatgtgaccaaggagtccacccaccccgtgaagcccctggcccagatcgccggaaacagatacgcctccggacctgtgggaaaggccctgagcgacgcatgtatgggcacaatcgcctccttcctgtctaagtaccaggacatcatcatcgaacaccagaaggtggtgaagggcaaccagaagagactggagagcctgcgggagctggccggcaaggaaaacctggaataccctagcgtgaccctgccacctcagcctcacaccaaggagggcgttgatgcctacaacgaagtgatcgcccgggtgcgaatgtgggtgaacctgaacctgtggcagaagctgaagctaagcagagatgatgccaagcctctgctgagactgaagggattcccttcctttcctctggtcgagagacaggccaacgaagtggactggtgggacatggtgtgtaacgtgaagaagctgatcaacgagaaaaaggaggatggcaaggtgttttggcagaatctggctggctacaagagacaggaagccctgagaccatacctgagcagcgaggaagatcggaagaagggaaagaaattcgctcggtaccagctgggcgacctgctgctgcacctggaaaagaagcacggcgaggactggggaaaggtgtacgacgaggcctgggagcggattgacaagaaagtggaaggcctgagcaagcacatcaagctggaagaggaacggagaagcgaggacgcccagagcaaggccgccctgaccgactggctgcgggctaaggccagcttcgtgatcgagggcctgaaggaggccgacaaggacgagttctgcagatgcgagctgaagctgcagaagtggtacggggacctgcggggaaagcccttcgccatcgaagccgagaacagcatcctggacatcagcggcttcagcaagcagtacaactgtgccttcatctggcagaaggacggcgtgaagaagctgaacctgtacctgatcatcaactacttcaagggcggcaagctgcggttcaagaagatcaaacctgaagccttcgaagccaacagattctacaccgtgatcaacaaaaagagcggcgagatcgtgcccatggaggtgaacttcaacttcgacgaccccaacctgatcatcctgcctctggcctttggcaagagacagggcagagaattcatctggaacgacctgctgtccctggaaaccggcagcctgaagctggccaacggaagagtgatcgagaagacactgtacaacagaagaacccggcaggatgagcctgccctgttcgtggccctgaccttcgagcggcgggaggtcctggactcctccaatatcaaaccaatgaacctgatcggcgtggcaagaggcgaaaacatccccgccgtgatcgccctgaccgaccccgagggctgcccactgagccggtttaaggatagcctgggaaacccaacccacatcctgagaatcggcgagagctataaggagaagcagcggaccatccaggccaagaaggaggtggagcagcggagagccggcggctacagccggaagtacgccagcaaagccaagaatctggcagacgatatggtgagaaacaccgctagagatctgctgtactacgccgtgacccaggatgccatgctgatcttcgccaacctgagccggggcttcggccggcagggcaagcggaccttcatggccgagagacagtacacacggatggaggactggctgaccgccaagctggcctacgagggcctgagcaagacctacctgtccaagacactggcccagtacacctccaagacatgcagcaactgtgggtttaccatcaccagcgccgactacgacagggtgctggagaagctgaagaagacagcaacaggctggatgaccacaattaacggcaaggagctgaaggtggagggccagattacctactacaacagatacaagagacagaacgtagtcaaggacctgtccgtcgagctggatagactgagcgaagaatctgtgaacaacgacatctcctcctggacaaagggcagaagcggagaagctctgagcctcctgaagaaaagattctcccatagacccgtgcaggagaagttcgtgtgcctgaactgcggcttcgagacacacgcagccgagcaagccgccctgaacatcgccagatcctggctgttcctgcggagccaggagtacaagaaataccagacaaacaagacaaccggcaacaccgataagagagccttcgtcgagacctggcagtccttttaccggaagaagcttaaggaggtgtggaaacctgccgtgcggtctggcggatctggcggaggctccatggccgagggcctgaagttcaaggacgtggtgatctacttcagccagaaggagtgggagtgcctgcacagcgcccagaaggacctgtacagggacgtgatgctggagaactacggcaacctggtgctgctgggcctgagcgacaccaagcccaacgtgatcagcctgctggagcagaagaaggagccctggatggtgaagaggaaggagaccaaggagtggtgccccgactgggagttcggcggcggcccaagcagcggcgcccctcctcccagcggcggcagcccagccggctccccaacctctaccgaggagggcacctctgagtccgccacccccgagagcggccctggcacctccaccgagcccagcgagggcagcgcacccggcagccctgccggcagccccacctccacagaggagggaaccagcaccgagcccagcgaaggcagcgccccaggcaccagcaccgagcctagtgagcaggagattaaacggatcaacaagatcagaagaagacttgtgaaagacagcaacaccaagaaggccggcaagacaggccccatgaaaaccctgctggttagagtgatgacacccgatctgagagagcggctggaaaacctgagaaagaagcctgaaaatatcccccagcccatcagcaatacatctagagccaacctgaataagctgctgaccgattacaccgaaatgaagaaggcgatcctgcatgtgtactgggaagagttccagaaggaccctgtgggcctgatgagccgggtggcccagcctgccagcaagaagatcgatcagaacaagctgaaacctgagatggacgagaagggcaacctgaccaccgccggctttgcctgctctcagtgtggccagcccctgttcgtgtacaagctggagcaggtgtctgagaagggcaaggcttacaccaactacttcggacggtgcaatgtggccgagcacgaaaagctgatcctgctggcccagctgaagcccgagaaggatagcgacgaagccgtgacatatagcctgggaaagtttgggcagagggccctggatttctacagcattcatgtgaccaaggagtccacccaccccgtgaagcccctggcccagatcgccggaaacagatacgcctccggacctgtgggaaaggccctgagcgacgcatgtatgggcacaatcgcctccttcctgtctaagtaccaggacatcatcatcgaacaccagaaggtggtgaagggcaaccagaagagactggagagcctgcgggagctggccggcaaggaaaacctggaataccctagcgtgaccctgccacctcagcctcacaccaaggagggcgttgatgcctacaacgaagtgatcgcccgggtgcgaatgtgggtgaacctgaacctgtggcagaagctgaagctaagcagagatgatgccaagcctctgctgagactgaagggattcccttcctttcctctggtcgagagacaggccaacgaagtggactggtgggacatggtgtgtaacgtgaagaagctgatcaacgagaaaaaggaggatggcaaggtgttttggcagaatctggctggctacaagagacaggaagccctgagaccatacctgagcagcgaggaagatcggaagaagggaaagaaattcgctcggtaccagctgggcgacctgctgctgcacctggaaaagaagcacggcgaggactggggaaaggtgtacgacgaggcctgggagcggattgacaagaaagtggaaggcctgagcaagcacatcaagctggaagaggaacggagaagcgaggacgcccagagcaaggccgccctgaccgactggctgcgggctaaggccagcttcgtgatcgagggcctgaaggaggccgacaaggacgagttctgcagatgcgagctgaagctgcagaagtggtacggggacctgcggggaaagcccttcgccatcgaagccgagaacagcatcctggacatcagcggcttcagcaagcagtacaactgtgccttcatctggcagaaggacggcgtgaagaagctgaacctgtacctgatcatcaactacttcaagggcggcaagctgcggttcaagaagatcaaacctgaagccttcgaagccaacagattctacaccgtgatcaacaaaaagagcggcgagatcgtgcccatggaggtgaacttcaacttcgacgaccccaacctgatcatcctgcctctggcctttggcaagagacagggcagagaattcatctggaacgacctgctgtccctggaaaccggcagcctgaagctggccaacggaagagtgatcgagaagacactgtacaacagaagaacccggcaggatgagcctgccctgttcgtggccctgaccttcgagcggcgggaggtcctggactcctccaatatcaaaccaatgaacctgatcggcgtggcaagaggcgaaaacatccccgccgtgatcgccctgaccgaccccgagggctgcccactgagccggtttaaggatagcctgggaaacccaacccacatcctgagaatcggcgagagctataaggagaagcagcggaccatccaggccaagaaggaggtggagcagcggagagccggcggctacagccggaagtacgccagcaaagccaagaatctggcagacgatatggtgagaaacaccgctagagatctgctgtactacgccgtgacccaggatgccatgctgatcttcgccaacctgagccggggcttcggccggcagggcaagcggaccttcatggccgagagacagtacacacggatggaggactggctgaccgccaagctggcctacgagggcctgagcaagacctacctgtccaagacactggcccagtacacctccaagacatgcagcaactgtgggtttaccatcaccagcgccgactacgacagggtgctggagaagctgaagaagacagcaacaggctggatgaccacaattaacggcaaggagctgaaggtggagggccagattacctactacaacagatacaagagacagaacgtagtcaaggacctgtccgtcgagctggatagactgagcgaagaatctgtgaacaacgacatctcctcctggacaaagggcagaagcggagaagctctgagcctcctgaagaaaagattctcccatagacccgtgcaggagaagttcgtgtgcctgaactgcggcttcgagacacacgcagccgagcaagccgccctgaacatcgccagatcctggctgttcctgcggagccaggagtacaagaaataccagacaaacaagacaaccggcaacaccgataagagagccttcgtcgagacctggcagtccttttaccggaagaagcttaaggaggtgtggaaacctgccgtgcggtctggcggatctggcggaggctcctatggccgagggcctgaagttcaaggacgtggtgatctacttcagccagaaggagtgggagtgcctgcacagcgcccagaaggacctgtacagggacgtgatgctggagaactacggcaacctggtgctgctgggcctgagcgacaccaagcccaacgtgatcagcctgctggagcagaagaaggagccctggatggtgaagaggaaggagaccaaggagtggtgccccgactgggagttcggcggatctggctccggcagcggccccaagaaaaagagaaaagtctaagctgccttctgcggggcttgccttctggccatgcccttcttctctcccttgcacctgtacctcttggtctttgaataaagcctgagtaggaaggctagcaaaaaaaaaaaaaaaaaaaaaaaaaaaaaaaaaaaaaaaaaaaaaaaaaaaaaaaaaaaaaaaaaaaaaaaaaaaaaaaa

SEQ ID NO: 15798 - RNA, 9485 nt, synthetic construct
  source 1..9485: mol_type = other RNA
aggaaataagagagaaaagaagagtaagaagaaatataagagccaccatggcccctaagaagaagcgtaaagtgagccggatggaacgcctcgtctacgaggtgcggcagaagtgcagaaacatcgaggacatctgcatctcctgcggatctctgaacgtgaccctggagcacccactgttcatcggcggcatgtgccagaactgtaaaaactgttttctggagtgtgcctatcaatacgacgatgacggctaccagagctactgcaccatctgttgcggcggaagagaggtgctgatgtgtggaaataacaactgctgccggtgcttctgcgtggaatgcgtggacctgctggtgggccccggcgccgcccaggccgctattaaggaagatccttggaactgctacatgtgcggccacaagggcacatacggcctgctgagacggagagaggactggcctagcagactgcagatgttcttcgccaataaccacgaccaggagttcgacccccctaaggtgtaccctcccgtccccgccgagaagagaaagcccatccgggtcctgagcctgttcgatggcatcgccaccggtctgctggtgctgaaggacctgggcatccaggtggataggtacattgcctccgaggtgtgcgaggactccatcaccgtgggaatggtgcgtcatcagggcaagatcatgtacgtgggcgacgtgcggagcgtgacacagaagcatatccaggagtggggccctttcgacctggtgatcggcggcagcccttgcaatgacctgagcatcgtgaacccagcccggaagggcctgtacgagggaaccggcagactgttcttcgagttttacagactgctgcacgacgcccggcctaaggaaggcgacgaccggcccttcttttggctgttcgagaatgtggtggccatgggagtcagcgacaagcgggatattagccggttcctggagagcaaccccgtgatgatcgatgccaaggaagtgagcgccgcccaccgggccagatacttctggggcaatctgcctggcatgaacagacccctggccagcaccgtgaacgacaagctggagctgcaggagtgcctggagcacggccggatcgccaagttcagcaaggtgagaaccatcaccacccgaagcaacagcatcaaacaaggcaaggaccagcactttcctgtgttcatgaacgagaaggaggacatcctgtggtgtaccgagatggagagagtgttcgggttcccagtccactacacagatgtcagcaacatgtctagactggccagacagagactgctgggaagaagctggtccgtccctgtgatcagacacctgttcgcccctctgaaggagtacttcgcctgcgtgagcagcggcaacagcaacgccaacagccggggccccagcttctctagcggcctggtgccactgtccctgagagggagccacatgggccccatggagatctacaaaaccgtgagcgcctggaagcggcagcctgtgcgcgtgctgagcctgtttcggaatatcgataaagtcctgaaaagcctgggattcctggagagcggctctggctccggcggtggcaccctgaagtacgtggaggatgtgacaaacgtggtcagacgggatgtggagaagtggggccccttcgatctggtgtacggcagcacccaacccctgggcagctcttgtgaccggtgccctggctggtacatgtttcagttccaccggatcctgcagtacgccctgccgagacaggagtcccagcggccattcttttggattttcatggacaacttgctgctgaccgaggatgaccaggaaactaccactcggttcctgcagaccgaagccgtgaccctgcaggacgtgagaggccgggactaccagaacgccatgcgggtgtggtccaacatccctggactgaaaagcaagcacgcacctctgacccctaaagaagaggagtacctgcaggcccaggtgcggagcagaagcaagctggacgcccctaaggtggatctgctggtgaagaattgcctcctgcccctgagagagtacttcaagtatttcagccagaatagtctgcccctgggaggcagcggcggcggcgccctggtgacatttgaggacgtcgccgtgcggttcacccaggaggaatgggctctgctggatccttctcagaaaatcctgtaccgggacgtgatgagagagacataccggaatctgacctccgtgggcatcaactgggaatgttgggaccttgaagcctgcttcagaagcctgggaagaaacctgagagtgcaggtggtgaagagaaagtgcgagctgaccaacagcggcccctgcgccgagggcggcccaagcagcggcgcccctcctcccagcggcggcagcccagccggctccccaacctctaccgaggagggcacctctgagtccgccacccccgagagcggccctggcacctccaccgagcccagcgagggcagcgcacccggcagccctgccggcagccccacctccacagaggagggaaccagcaccgagcccagcgaaggcagcgccccaggcaccagcaccgagcctagtgagcaggagattaaacggatcaacaagatcagaagaagacttgtgaaagacagcaacaccaagaaggccggcaagacaggccccatgaaaaccctgctggttagagtgatgacacccgatctgagagagcggctggaaaacctgagaaagaagcctgaaaatatcccccagcccatcagcaatacatctagagccaacctgaataagctgctgaccgattacaccgaaatgaagaaggcgatcctgcatgtgtactgggaagagttccagaaggaccctgtgggcctgatgagccgggtggcccagcctgccagcaagaagatcgatcagaacaagctgaaacctgagatggacgagaagggcaacctgaccaccgccggctttgcctgctctcagtgtggccagcccctgttcgtgtacaagctggagcaggtgtctgagaagggcaaggcttacaccaactacttcggacggtgcaatgtggccgagcacgaaaagctgatcctgctggcccagctgaagcccgagaaggatagcgacgaagccgtgacatatagcctgggaaagtttgggcagagggccctggatttctacagcattcatgtgaccaaggagtccacccaccccgtgaagcccctggcccagatcgccggaaacagatacgcctccggacctgtgggaaaggccctgagcgacgcatgtatgggcacaatcgcctccttcctgtctaagtaccaggacatcatcatcgaacaccagaaggtggtgaagggcaaccagaagagactggagagcctgcgggagctggccggcaaggaaaacctggaataccctagcgtgaccctgccacctcagcctcacaccaaggagggcgttgatgcctacaacgaagtgatcgcccgggtgcgaatgtgggtgaacctgaacctgtggcagaagctgaagctaagcagagatgatgccaagcctctgctgagactgaagggattcccttcctttcctctggtcgagagacaggccaacgaagtggactggtgggacatggtgtgtaacgtgaagaagctgatcaacgagaaaaaggaggatggcaaggtgttttggcagaatctggctggctacaagagacaggaagccctgagaccatacctgagcagcgaggaagatcggaagaagggaaagaaattcgctcggtaccagctgggcgacctgctgctgcacctggaaaagaagcacggcgaggactggggaaaggtgtacgacgaggcctgggagcggattgacaagaaagtggaaggcctgagcaagcacatcaagctggaagaggaacggagaagcgaggacgcccagagcaaggccgccctgaccgactggctgcgggctaaggccagcttcgtgatcgagggcctgaaggaggccgacaaggacgagttctgcagatgcgagctgaagctgcagaagtggtacggggacctgcggggaaagcccttcgccatcgaagccgagaacagcatcctggacatcagcggcttcagcaagcagtacaactgtgccttcatctggcagaaggacggcgtgaagaagctgaacctgtacctgatcatcaactacttcaagggcggcaagctgcggttcaagaagatcaaacctgaagccttcgaagccaacagattctacaccgtgatcaacaaaaagagcggcgagatcgtgcccatggaggtgaacttcaacttcgacgaccccaacctgatcatcctgcctctggcctttggcaagagacagggcagagaattcatctggaacgacctgctgtccctggaaaccggcagcctgaagctggccaacggaagagtgatcgagaagacactgtacaacagaagaacccggcaggatgagcctgccctgttcgtggccctgaccttcgagcggcgggaggtcctggactcctccaatatcaaaccaatgaacctgatcggcgtggcaagaggcgaaaacatccccgccgtgatcgccctgaccgaccccgagggctgcccactgagccggtttaaggatagcctgggaaacccaacccacatcctgagaatcggcgagagctataaggagaagcagcggaccatccaggccaagaaggaggtggagcagcggagagccggcggctacagccggaagtacgccagcaaagccaagaatctggcagacgatatggtgagaaacaccgctagagatctgctgtactacgccgtgacccaggatgccatgctgatcttcgccaacctgagccggggcttcggccggcagggcaagcggaccttcatggccgagagacagtacacacggatggaggactggctgaccgccaagctggcctacgagggcctgagcaagacctacctgtccaagacactggcccagtacacctccaagacatgcagcaactgtgggtttaccatcaccagcgccgactacgacagggtgctggagaagctgaagaagacagcaacaggctggatgaccacaattaacggcaaggagctgaaggtggagggccagattacctactacaacagatacaagagacagaacgtagtcaaggacctgtccgtcgagctggatagactgagcgaagaatctgtgaacaacgacatctcctcctggacaaagggcagaagcggagaagctctgagcctcctgaagaaaagattctcccatagacccgtgcaggagaagttcgtgtgcctgaactgcggcttcgagacacacgcagccgagcaagccgccctgaacatcgccagatcctggctgttcctgcggagccaggagtacaagaaataccagacaaacaagacaaccggcaacaccgataagagagccttcgtcgagacctggcagtccttttaccggaagaagcttaaggaggtgtggaaacctgccgtgcggtctggcggatctggcggaggctccgagggcgaggcccagaagaggaaggccgaggagagcggcatgcccctgacccagggccacctgaccttcagggacgtggccatcgagttcagccaggaggagtggaagtgcctggaccccgtgcagaaggccctgtacagggacgtgatgctggagaactacaggaacctggtgagcctgggcatctgcctgcccgacctgagcatcttcagcatgatgaagcagaggaccgagagctggaccggcggcccaagcagcggcgcccctcctcccagcggcggcagcccagccggctccccaacctctaccgaggagggcacctctgagtccgccacccccgagagcggccctggcacctccaccgagcccagcgagggcagcgcacccggcagccctgccggcagccccacctccacagaggagggaaccagcaccgagcccagcgaaggcagcgccccaggcaccagcaccgagcctagtgagcaggagattaaacggatcaacaagatcagaagaagacttgtgaaagacagcaacaccaagaaggccggcaagacaggccccatgaaaaccctgctggttagagtgatgacacccgatctgagagagcggctggaaaacctgagaaagaagcctgaaaatatcccccagcccatcagcaatacatctagagccaacctgaataagctgctgaccgattacaccgaaatgaagaaggcgatcctgcatgtgtactgggaagagttccagaaggaccctgtgggcctgatgagccgggtggcccagcctgccagcaagaagatcgatcagaacaagctgaaacctgagatggacgagaagggcaacctgaccaccgccggctttgcctgctctcagtgtggccagcccctgttcgtgtacaagctggagcaggtgtctgagaagggcaaggcttacaccaactacttcggacggtgcaatgtggccgagcacgaaaagctgatcctgctggcccagctgaagcccgagaaggatagcgacgaagccgtgacatatagcctgggaaagtttgggcagagggccctggatttctacagcattcatgtgaccaaggagtccacccaccccgtgaagcccctggcccagatcgccggaaacagatacgcctccggacctgtgggaaaggccctgagcgacgcatgtatgggcacaatcgcctccttcctgtctaagtaccaggacatcatcatcgaacaccagaaggtggtgaagggcaaccagaagagactggagagcctgcgggagctggccggcaaggaaaacctggaataccctagcgtgaccctgccacctcagcctcacaccaaggagggcgttgatgcctacaacgaagtgatcgcccgggtgcgaatgtgggtgaacctgaacctgtggcagaagctgaagctaagcagagatgatgccaagcctctgctgagactgaagggattcccttcctttcctctggtcgagagacaggccaacgaagtggactggtgggacatggtgtgtaacgtgaagaagctgatcaacgagaaaaaggaggatggcaaggtgttttggcagaatctggctggctacaagagacaggaagccctgagaccatacctgagcagcgaggaagatcggaagaagggaaagaaattcgctcggtaccagctgggcgacctgctgctgcacctggaaaagaagcacggcgaggactggggaaaggtgtacgacgaggcctgggagcggattgacaagaaagtggaaggcctgagcaagcacatcaagctggaagaggaacggagaagcgaggacgcccagagcaaggccgccctgaccgactggctgcgggctaaggccagcttcgtgatcgagggcctgaaggaggccgacaaggacgagttctgcagatgcgagctgaagctgcagaagtggtacggggacctgcggggaaagcccttcgccatcgaagccgagaacagcatcctggacatcagcggcttcagcaagcagtacaactgtgccttcatctggcagaaggacggcgtgaagaagctgaacctgtacctgatcatcaactacttcaagggcggcaagctgcggttcaagaagatcaaacctgaagccttcgaagccaacagattctacaccgtgatcaacaaaaagagcggcgagatcgtgcccatggaggtgaacttcaacttcgacgaccccaacctgatcatcctgcctctggcctttggcaagagacagggcagagaattcatctggaacgacctgctgtccctggaaaccggcagcctgaagctggccaacggaagagtgatcgagaagacactgtacaacagaagaacccggcaggatgagcctgccctgttcgtggccctgaccttcgagcggcgggaggtcctggactcctccaatatcaaaccaatgaacctgatcggcgtggcaagaggcgaaaacatccccgccgtgatcgccctgaccgaccccgagggctgcccactgagccggtttaaggatagcctgggaaacccaacccacatcctgagaatcggcgagagctataaggagaagcagcggaccatccaggccaagaaggaggtggagcagcggagagccggcggctacagccggaagtacgccagcaaagccaagaatctggcagacgatatggtgagaaacaccgctagagatctgctgtactacgccgtgacccaggatgccatgctgatcttcgccaacctgagccggggcttcggccggcagggcaagcggaccttcatggccgagagacagtacacacggatggaggactggctgaccgccaagctggcctacgagggcctgagcaagacctacctgtccaagacactggcccagtacacctccaagacatgcagcaactgtgggtttaccatcaccagcgccgactacgacagggtgctggagaagctgaagaagacagcaacaggctggatgaccacaattaacggcaaggagctgaaggtggagggccagattacctactacaacagatacaagagacagaacgtagtcaaggacctgtccgtcgagctggatagactgagcgaagaatctgtgaacaacgacatctcctcctggacaaagggcagaagcggagaagctctgagcctcctgaagaaaagattctcccatagacccgtgcaggagaagttcgtgtgcctgaactgcggcttcgagacacacgcagccgagcaagccgccctgaacatcgccagatcctggctgttcctgcggagccaggagtacaagaaataccagacaaacaagacaaccggcaacaccgataagagagccttcgtcgagacctggcagtccttttaccggaagaagcttaaggaggtgtggaaacctgccgtgcggtctggcggatctggcggaggctcctgagggcgaggcccagaagaggaaggccgaggagagcggcatgcccctgacccagggccacctgaccttcagggacgtggccatcgagttcagccaggaggagtggaagtgcctggaccccgtgcagaaggccctgtacagggacgtgatgctggagaactacaggaacctggtgagcctgggcatctgcctgcccgacctgagcatcttcagcatgatgaagcagaggaccgagagctggaccggatctggctccggcagcggccccaagaaaaagagaaaagtctaagctgccttctgcggggcttgccttctggccatgcccttcttctctcccttgcacctgtacctcttggtctttgaataaagcctgagtaggaaggctagcaaaaaaaaaaaaaaaaaaaaaaaaaaaaaaaaaaaaaaaaaaaaaaaaaaaaaaaaaaaaaaaaaaaaaaaaaaaaaaaa

SEQ ID NO: 15799 - RNA, 9485 nt, synthetic construct
  source 1..9485: mol_type = other RNA
aggaaataagagagaaaagaagagtaagaagaaatataagagccaccatggcccctaagaagaagcgtaaagtgagccggatggaacgcctcgtctacgaggtgcggcagaagtgcagaaacatcgaggacatctgcatctcctgcggatctctgaacgtgaccctggagcacccactgttcatcggcggcatgtgccagaactgtaaaaactgttttctggagtgtgcctatcaatacgacgatgacggctaccagagctactgcaccatctgttgcggcggaagagaggtgctgatgtgtggaaataacaactgctgccggtgcttctgcgtggaatgcgtggacctgctggtgggccccggcgccgcccaggccgctattaaggaagatccttggaactgctacatgtgcggccacaagggcacatacggcctgctgagacggagagaggactggcctagcagactgcagatgttcttcgccaataaccacgaccaggagttcgacccccctaaggtgtaccctcccgtccccgccgagaagagaaagcccatccgggtcctgagcctgttcgatggcatcgccaccggtctgctggtgctgaaggacctgggcatccaggtggataggtacattgcctccgaggtgtgcgaggactccatcaccgtgggaatggtgcgtcatcagggcaagatcatgtacgtgggcgacgtgcggagcgtgacacagaagcatatccaggagtggggccctttcgacctggtgatcggcggcagcccttgcaatgacctgagcatcgtgaacccagcccggaagggcctgtacgagggaaccggcagactgttcttcgagttttacagactgctgcacgacgcccggcctaaggaaggcgacgaccggcccttcttttggctgttcgagaatgtggtggccatgggagtcagcgacaagcgggatattagccggttcctggagagcaaccccgtgatgatcgatgccaaggaagtgagcgccgcccaccgggccagatacttctggggcaatctgcctggcatgaacagacccctggccagcaccgtgaacgacaagctggagctgcaggagtgcctggagcacggccggatcgccaagttcagcaaggtgagaaccatcaccacccgaagcaacagcatcaaacaaggcaaggaccagcactttcctgtgttcatgaacgagaaggaggacatcctgtggtgtaccgagatggagagagtgttcgggttcccagtccactacacagatgtcagcaacatgtctagactggccagacagagactgctgggaagaagctggtccgtccctgtgatcagacacctgttcgcccctctgaaggagtacttcgcctgcgtgagcagcggcaacagcaacgccaacagccggggccccagcttctctagcggcctggtgccactgtccctgagagggagccacatgggccccatggagatctacaaaaccgtgagcgcctggaagcggcagcctgtgcgcgtgctgagcctgtttcggaatatcgataaagtcctgaaaagcctgggattcctggagagcggctctggctccggcggtggcaccctgaagtacgtggaggatgtgacaaacgtggtcagacgggatgtggagaagtggggccccttcgatctggtgtacggcagcacccaacccctgggcagctcttgtgaccggtgccctggctggtacatgtttcagttccaccggatcctgcagtacgccctgccgagacaggagtcccagcggccattcttttggattttcatggacaacttgctgctgaccgaggatgaccaggaaactaccactcggttcctgcagaccgaagccgtgaccctgcaggacgtgagaggccgggactaccagaacgccatgcgggtgtggtccaacatccctggactgaaaagcaagcacgcacctctgacccctaaagaagaggagtacctgcaggcccaggtgcggagcagaagcaagctggacgcccctaaggtggatctgctggtgaagaattgcctcctgcccctgagagagtacttcaagtatttcagccagaatagtctgcccctgggaggcagcggcggcggcgccctggtgacatttgaggacgtcgccgtgcggttcacccaggaggaatgggctctgctggatccttctcagaaaatcctgtaccgggacgtgatgagagagacataccggaatctgacctccgtgggcatcaactgggaatgttgggaccttgaagcctgcttcagaagcctgggaagaaacctgagagtgcaggtggtgaagagaaagtgcgagctgaccaacagcggcccctgcgccgagggcggcccaagcagcggcgcccctcctcccagcggcggcagcccagccggctccccaacctctaccgaggagggcacctctgagtccgccacccccgagagcggccctggcacctccaccgagcccagcgagggcagcgcacccggcagccctgccggcagccccacctccacagaggagggaaccagcaccgagcccagcgaaggcagcgccccaggcaccagcaccgagcctagtgagcaggagattaaacggatcaacaagatcagaagaagacttgtgaaagacagcaacaccaagaaggccggcaagacaggccccatgaaaaccctgctggttagagtgatgacacccgatctgagagagcggctggaaaacctgagaaagaagcctgaaaatatcccccagcccatcagcaatacatctagagccaacctgaataagctgctgaccgattacaccgaaatgaagaaggcgatcctgcatgtgtactgggaagagttccagaaggaccctgtgggcctgatgagccgggtggcccagcctgccagcaagaagatcgatcagaacaagctgaaacctgagatggacgagaagggcaacctgaccaccgccggctttgcctgctctcagtgtggccagcccctgttcgtgtacaagctggagcaggtgtctgagaagggcaaggcttacaccaactacttcggacggtgcaatgtggccgagcacgaaaagctgatcctgctggcccagctgaagcccgagaaggatagcgacgaagccgtgacatatagcctgggaaagtttgggcagagggccctggatttctacagcattcatgtgaccaaggagtccacccaccccgtgaagcccctggcccagatcgccggaaacagatacgcctccggacctgtgggaaaggccctgagcgacgcatgtatgggcacaatcgcctccttcctgtctaagtaccaggacatcatcatcgaacaccagaaggtggtgaagggcaaccagaagagactggagagcctgcgggagctggccggcaaggaaaacctggaataccctagcgtgaccctgccacctcagcctcacaccaaggagggcgttgatgcctacaacgaagtgatcgcccgggtgcgaatgtgggtgaacctgaacctgtggcagaagctgaagctaagcagagatgatgccaagcctctgctgagactgaagggattcccttcctttcctctggtcgagagacaggccaacgaagtggactggtgggacatggtgtgtaacgtgaagaagctgatcaacgagaaaaaggaggatggcaaggtgttttggcagaatctggctggctacaagagacaggaagccctgagaccatacctgagcagcgaggaagatcggaagaagggaaagaaattcgctcggtaccagctgggcgacctgctgctgcacctggaaaagaagcacggcgaggactggggaaaggtgtacgacgaggcctgggagcggattgacaagaaagtggaaggcctgagcaagcacatcaagctggaagaggaacggagaagcgaggacgcccagagcaaggccgccctgaccgactggctgcgggctaaggccagcttcgtgatcgagggcctgaaggaggccgacaaggacgagttctgcagatgcgagctgaagctgcagaagtggtacggggacctgcggggaaagcccttcgccatcgaagccgagaacagcatcctggacatcagcggcttcagcaagcagtacaactgtgccttcatctggcagaaggacggcgtgaagaagctgaacctgtacctgatcatcaactacttcaagggcggcaagctgcggttcaagaagatcaaacctgaagccttcgaagccaacagattctacaccgtgatcaacaaaaagagcggcgagatcgtgcccatggaggtgaacttcaacttcgacgaccccaacctgatcatcctgcctctggcctttggcaagagacagggcagagaattcatctggaacgacctgctgtccctggaaaccggcagcctgaagctggccaacggaagagtgatcgagaagacactgtacaacagaagaacccggcaggatgagcctgccctgttcgtggccctgaccttcgagcggcgggaggtcctggactcctccaatatcaaaccaatgaacctgatcggcgtggcaagaggcgaaaacatccccgccgtgatcgccctgaccgaccccgagggctgcccactgagccggtttaaggatagcctgggaaacccaacccacatcctgagaatcggcgagagctataaggagaagcagcggaccatccaggccaagaaggaggtggagcagcggagagccggcggctacagccggaagtacgccagcaaagccaagaatctggcagacgatatggtgagaaacaccgctagagatctgctgtactacgccgtgacccaggatgccatgctgatcttcgccaacctgagccggggcttcggccggcagggcaagcggaccttcatggccgagagacagtacacacggatggaggactggctgaccgccaagctggcctacgagggcctgagcaagacctacctgtccaagacactggcccagtacacctccaagacatgcagcaactgtgggtttaccatcaccagcgccgactacgacagggtgctggagaagctgaagaagacagcaacaggctggatgaccacaattaacggcaaggagctgaaggtggagggccagattacctactacaacagatacaagagacagaacgtagtcaaggacctgtccgtcgagctggatagactgagcgaagaatctgtgaacaacgacatctcctcctggacaaagggcagaagcggagaagctctgagcctcctgaagaaaagattctcccatagacccgtgcaggagaagttcgtgtgcctgaactgcggcttcgagacacacgcagccgagcaagccgccctgaacatcgccagatcctggctgttcctgcggagccaggagtacaagaaataccagacaaacaagacaaccggcaacaccgataagagagccttcgtcgagacctggcagtccttttaccggaagaagcttaaggaggtgtggaaacctgccgtgcggtctggcggatctggcggaggctccatggaggaccccctgagcttcaccgacgtggccatcgacttcagcgccgacgagtgcgagtgcctggacagcgcccagtggaacctgtacaaggaggtgatgctggagaactacagcaacctggtgttcctgggcctggccttcagcaagccccacctggtgaccttcctggagcagagcagcgacccctggagcgtgaagaggaaggccagcgccaccatccccctgggcagcaagccccacggcggcccaagcagcggcgcccctcctcccagcggcggcagcccagccggctccccaacctctaccgaggagggcacctctgagtccgccacccccgagagcggccctggcacctccaccgagcccagcgagggcagcgcacccggcagccctgccggcagccccacctccacagaggagggaaccagcaccgagcccagcgaaggcagcgccccaggcaccagcaccgagcctagtgagcaggagattaaacggatcaacaagatcagaagaagacttgtgaaagacagcaacaccaagaaggccggcaagacaggccccatgaaaaccctgctggttagagtgatgacacccgatctgagagagcggctggaaaacctgagaaagaagcctgaaaatatcccccagcccatcagcaatacatctagagccaacctgaataagctgctgaccgattacaccgaaatgaagaaggcgatcctgcatgtgtactgggaagagttccagaaggaccctgtgggcctgatgagccgggtggcccagcctgccagcaagaagatcgatcagaacaagctgaaacctgagatggacgagaagggcaacctgaccaccgccggctttgcctgctctcagtgtggccagcccctgttcgtgtacaagctggagcaggtgtctgagaagggcaaggcttacaccaactacttcggacggtgcaatgtggccgagcacgaaaagctgatcctgctggcccagctgaagcccgagaaggatagcgacgaagccgtgacatatagcctgggaaagtttgggcagagggccctggatttctacagcattcatgtgaccaaggagtccacccaccccgtgaagcccctggcccagatcgccggaaacagatacgcctccggacctgtgggaaaggccctgagcgacgcatgtatgggcacaatcgcctccttcctgtctaagtaccaggacatcatcatcgaacaccagaaggtggtgaagggcaaccagaagagactggagagcctgcgggagctggccggcaaggaaaacctggaataccctagcgtgaccctgccacctcagcctcacaccaaggagggcgttgatgcctacaacgaagtgatcgcccgggtgcgaatgtgggtgaacctgaacctgtggcagaagctgaagctaagcagagatgatgccaagcctctgctgagactgaagggattcccttcctttcctctggtcgagagacaggccaacgaagtggactggtgggacatggtgtgtaacgtgaagaagctgatcaacgagaaaaaggaggatggcaaggtgttttggcagaatctggctggctacaagagacaggaagccctgagaccatacctgagcagcgaggaagatcggaagaagggaaagaaattcgctcggtaccagctgggcgacctgctgctgcacctggaaaagaagcacggcgaggactggggaaaggtgtacgacgaggcctgggagcggattgacaagaaagtggaaggcctgagcaagcacatcaagctggaagaggaacggagaagcgaggacgcccagagcaaggccgccctgaccgactggctgcgggctaaggccagcttcgtgatcgagggcctgaaggaggccgacaaggacgagttctgcagatgcgagctgaagctgcagaagtggtacggggacctgcggggaaagcccttcgccatcgaagccgagaacagcatcctggacatcagcggcttcagcaagcagtacaactgtgccttcatctggcagaaggacggcgtgaagaagctgaacctgtacctgatcatcaactacttcaagggcggcaagctgcggttcaagaagatcaaacctgaagccttcgaagccaacagattctacaccgtgatcaacaaaaagagcggcgagatcgtgcccatggaggtgaacttcaacttcgacgaccccaacctgatcatcctgcctctggcctttggcaagagacagggcagagaattcatctggaacgacctgctgtccctggaaaccggcagcctgaagctggccaacggaagagtgatcgagaagacactgtacaacagaagaacccggcaggatgagcctgccctgttcgtggccctgaccttcgagcggcgggaggtcctggactcctccaatatcaaaccaatgaacctgatcggcgtggcaagaggcgaaaacatccccgccgtgatcgccctgaccgaccccgagggctgcccactgagccggtttaaggatagcctgggaaacccaacccacatcctgagaatcggcgagagctataaggagaagcagcggaccatccaggccaagaaggaggtggagcagcggagagccggcggctacagccggaagtacgccagcaaagccaagaatctggcagacgatatggtgagaaacaccgctagagatctgctgtactacgccgtgacccaggatgccatgctgatcttcgccaacctgagccggggcttcggccggcagggcaagcggaccttcatggccgagagacagtacacacggatggaggactggctgaccgccaagctggcctacgagggcctgagcaagacctacctgtccaagacactggcccagtacacctccaagacatgcagcaactgtgggtttaccatcaccagcgccgactacgacagggtgctggagaagctgaagaagacagcaacaggctggatgaccacaattaacggcaaggagctgaaggtggagggccagattacctactacaacagatacaagagacagaacgtagtcaaggacctgtccgtcgagctggatagactgagcgaagaatctgtgaacaacgacatctcctcctggacaaagggcagaagcggagaagctctgagcctcctgaagaaaagattctcccatagacccgtgcaggagaagttcgtgtgcctgaactgcggcttcgagacacacgcagccgagcaagccgccctgaacatcgccagatcctggctgttcctgcggagccaggagtacaagaaataccagacaaacaagacaaccggcaacaccgataagagagccttcgtcgagacctggcagtccttttaccggaagaagcttaaggaggtgtggaaacctgccgtgcggtctggcggatctggcggaggctcctatggaggaccccctgagcttcaccgacgtggccatcgacttcagcgccgacgagtgcgagtgcctggacagcgcccagtggaacctgtacaaggaggtgatgctggagaactacagcaacctggtgttcctgggcctggccttcagcaagccccacctggtgaccttcctggagcagagcagcgacccctggagcgtgaagaggaaggccagcgccaccatccccctgggcagcaagccccacggatctggctccggcagcggccccaagaaaaagagaaaagtctaagctgccttctgcggggcttgccttctggccatgcccttcttctctcccttgcacctgtacctcttggtctttgaataaagcctgagtaggaaggctagcaaaaaaaaaaaaaaaaaaaaaaaaaaaaaaaaaaaaaaaaaaaaaaaaaaaaaaaaaaaaaaaaaaaaaaaaaaaaaaaa

SEQ ID NO: 15800 - RNA, 9485 nt, synthetic construct
  source 1..9485: mol_type = other RNA
aggaaataagagagaaaagaagagtaagaagaaatataagagccaccatggcccctaagaagaagcgtaaagtgagccggatggaacgcctcgtctacgaggtgcggcagaagtgcagaaacatcgaggacatctgcatctcctgcggatctctgaacgtgaccctggagcacccactgttcatcggcggcatgtgccagaactgtaaaaactgttttctggagtgtgcctatcaatacgacgatgacggctaccagagctactgcaccatctgttgcggcggaagagaggtgctgatgtgtggaaataacaactgctgccggtgcttctgcgtggaatgcgtggacctgctggtgggccccggcgccgcccaggccgctattaaggaagatccttggaactgctacatgtgcggccacaagggcacatacggcctgctgagacggagagaggactggcctagcagactgcagatgttcttcgccaataaccacgaccaggagttcgacccccctaaggtgtaccctcccgtccccgccgagaagagaaagcccatccgggtcctgagcctgttcgatggcatcgccaccggtctgctggtgctgaaggacctgggcatccaggtggataggtacattgcctccgaggtgtgcgaggactccatcaccgtgggaatggtgcgtcatcagggcaagatcatgtacgtgggcgacgtgcggagcgtgacacagaagcatatccaggagtggggccctttcgacctggtgatcggcggcagcccttgcaatgacctgagcatcgtgaacccagcccggaagggcctgtacgagggaaccggcagactgttcttcgagttttacagactgctgcacgacgcccggcctaaggaaggcgacgaccggcccttcttttggctgttcgagaatgtggtggccatgggagtcagcgacaagcgggatattagccggttcctggagagcaaccccgtgatgatcgatgccaaggaagtgagcgccgcccaccgggccagatacttctggggcaatctgcctggcatgaacagacccctggccagcaccgtgaacgacaagctggagctgcaggagtgcctggagcacggccggatcgccaagttcagcaaggtgagaaccatcaccacccgaagcaacagcatcaaacaaggcaaggaccagcactttcctgtgttcatgaacgagaaggaggacatcctgtggtgtaccgagatggagagagtgttcgggttcccagtccactacacagatgtcagcaacatgtctagactggccagacagagactgctgggaagaagctggtccgtccctgtgatcagacacctgttcgcccctctgaaggagtacttcgcctgcgtgagcagcggcaacagcaacgccaacagccggggccccagcttctctagcggcctggtgccactgtccctgagagggagccacatgggccccatggagatctacaaaaccgtgagcgcctggaagcggcagcctgtgcgcgtgctgagcctgtttcggaatatcgataaagtcctgaaaagcctgggattcctggagagcggctctggctccggcggtggcaccctgaagtacgtggaggatgtgacaaacgtggtcagacgggatgtggagaagtggggccccttcgatctggtgtacggcagcacccaacccctgggcagctcttgtgaccggtgccctggctggtacatgtttcagttccaccggatcctgcagtacgccctgccgagacaggagtcccagcggccattcttttggattttcatggacaacttgctgctgaccgaggatgaccaggaaactaccactcggttcctgcagaccgaagccgtgaccctgcaggacgtgagaggccgggactaccagaacgccatgcgggtgtggtccaacatccctggactgaaaagcaagcacgcacctctgacccctaaagaagaggagtacctgcaggcccaggtgcggagcagaagcaagctggacgcccctaaggtggatctgctggtgaagaattgcctcctgcccctgagagagtacttcaagtatttcagccagaatagtctgcccctgggaggcagcggcggcggcgccctggtgacatttgaggacgtcgccgtgcggttcacccaggaggaatgggctctgctggatccttctcagaaaatcctgtaccgggacgtgatgagagagacataccggaatctgacctccgtgggcatcaactgggaatgttgggaccttgaagcctgcttcagaagcctgggaagaaacctgagagtgcaggtggtgaagagaaagtgcgagctgaccaacagcggcccctgcgccgagggcggcccaagcagcggcgcccctcctcccagcggcggcagcccagccggctccccaacctctaccgaggagggcacctctgagtccgccacccccgagagcggccctggcacctccaccgagcccagcgagggcagcgcacccggcagccctgccggcagccccacctccacagaggagggaaccagcaccgagcccagcgaaggcagcgccccaggcaccagcaccgagcctagtgagcaggagattaaacggatcaacaagatcagaagaagacttgtgaaagacagcaacaccaagaaggccggcaagacaggccccatgaaaaccctgctggttagagtgatgacacccgatctgagagagcggctggaaaacctgagaaagaagcctgaaaatatcccccagcccatcagcaatacatctagagccaacctgaataagctgctgaccgattacaccgaaatgaagaaggcgatcctgcatgtgtactgggaagagttccagaaggaccctgtgggcctgatgagccgggtggcccagcctgccagcaagaagatcgatcagaacaagctgaaacctgagatggacgagaagggcaacctgaccaccgccggctttgcctgctctcagtgtggccagcccctgttcgtgtacaagctggagcaggtgtctgagaagggcaaggcttacaccaactacttcggacggtgcaatgtggccgagcacgaaaagctgatcctgctggcccagctgaagcccgagaaggatagcgacgaagccgtgacatatagcctgggaaagtttgggcagagggccctggatttctacagcattcatgtgaccaaggagtccacccaccccgtgaagcccctggcccagatcgccggaaacagatacgcctccggacctgtgggaaaggccctgagcgacgcatgtatgggcacaatcgcctccttcctgtctaagtaccaggacatcatcatcgaacaccagaaggtggtgaagggcaaccagaagagactggagagcctgcgggagctggccggcaaggaaaacctggaataccctagcgtgaccctgccacctcagcctcacaccaaggagggcgttgatgcctacaacgaagtgatcgcccgggtgcgaatgtgggtgaacctgaacctgtggcagaagctgaagctaagcagagatgatgccaagcctctgctgagactgaagggattcccttcctttcctctggtcgagagacaggccaacgaagtggactggtgggacatggtgtgtaacgtgaagaagctgatcaacgagaaaaaggaggatggcaaggtgttttggcagaatctggctggctacaagagacaggaagccctgagaccatacctgagcagcgaggaagatcggaagaagggaaagaaattcgctcggtaccagctgggcgacctgctgctgcacctggaaaagaagcacggcgaggactggggaaaggtgtacgacgaggcctgggagcggattgacaagaaagtggaaggcctgagcaagcacatcaagctggaagaggaacggagaagcgaggacgcccagagcaaggccgccctgaccgactggctgcgggctaaggccagcttcgtgatcgagggcctgaaggaggccgacaaggacgagttctgcagatgcgagctgaagctgcagaagtggtacggggacctgcggggaaagcccttcgccatcgaagccgagaacagcatcctggacatcagcggcttcagcaagcagtacaactgtgccttcatctggcagaaggacggcgtgaagaagctgaacctgtacctgatcatcaactacttcaagggcggcaagctgcggttcaagaagatcaaacctgaagccttcgaagccaacagattctacaccgtgatcaacaaaaagagcggcgagatcgtgcccatggaggtgaacttcaacttcgacgaccccaacctgatcatcctgcctctggcctttggcaagagacagggcagagaattcatctggaacgacctgctgtccctggaaaccggcagcctgaagctggccaacggaagagtgatcgagaagacactgtacaacagaagaacccggcaggatgagcctgccctgttcgtggccctgaccttcgagcggcgggaggtcctggactcctccaatatcaaaccaatgaacctgatcggcgtggcaagaggcgaaaacatccccgccgtgatcgccctgaccgaccccgagggctgcccactgagccggtttaaggatagcctgggaaacccaacccacatcctgagaatcggcgagagctataaggagaagcagcggaccatccaggccaagaaggaggtggagcagcggagagccggcggctacagccggaagtacgccagcaaagccaagaatctggcagacgatatggtgagaaacaccgctagagatctgctgtactacgccgtgacccaggatgccatgctgatcttcgccaacctgagccggggcttcggccggcagggcaagcggaccttcatggccgagagacagtacacacggatggaggactggctgaccgccaagctggcctacgagggcctgagcaagacctacctgtccaagacactggcccagtacacctccaagacatgcagcaactgtgggtttaccatcaccagcgccgactacgacagggtgctggagaagctgaagaagacagcaacaggctggatgaccacaattaacggcaaggagctgaaggtggagggccagattacctactacaacagatacaagagacagaacgtagtcaaggacctgtccgtcgagctggatagactgagcgaagaatctgtgaacaacgacatctcctcctggacaaagggcagaagcggagaagctctgagcctcctgaagaaaagattctcccatagacccgtgcaggagaagttcgtgtgcctgaactgcggcttcgagacacacgcagccgagcaagccgccctgaacatcgccagatcctggctgttcctgcggagccaggagtacaagaaataccagacaaacaagacaaccggcaacaccgataagagagccttcgtcgagacctggcagtccttttaccggaagaagcttaaggaggtgtggaaacctgccgtgcggtctggcggatctggcggaggctccgcccccggcagcgtgaccttcagggacgtggccatcgacttcagccaggaggagtggaagtggctgcagcccgcccagagggacctgtacaggtgcgtgatgctggagaactacggccacctggtgagcctgggcctgtgcatcagcaagcccgacgtggtgagcctgctggagcagggcaaggagccctggctgggcaagggcggcgtgaacagggacctgttcagcgtgagcgacggcaagggcggcccaagcagcggcgcccctcctcccagcggcggcagcccagccggctccccaacctctaccgaggagggcacctctgagtccgccacccccgagagcggccctggcacctccaccgagcccagcgagggcagcgcacccggcagccctgccggcagccccacctccacagaggagggaaccagcaccgagcccagcgaaggcagcgccccaggcaccagcaccgagcctagtgagcaggagattaaacggatcaacaagatcagaagaagacttgtgaaagacagcaacaccaagaaggccggcaagacaggccccatgaaaaccctgctggttagagtgatgacacccgatctgagagagcggctggaaaacctgagaaagaagcctgaaaatatcccccagcccatcagcaatacatctagagccaacctgaataagctgctgaccgattacaccgaaatgaagaaggcgatcctgcatgtgtactgggaagagttccagaaggaccctgtgggcctgatgagccgggtggcccagcctgccagcaagaagatcgatcagaacaagctgaaacctgagatggacgagaagggcaacctgaccaccgccggctttgcctgctctcagtgtggccagcccctgttcgtgtacaagctggagcaggtgtctgagaagggcaaggcttacaccaactacttcggacggtgcaatgtggccgagcacgaaaagctgatcctgctggcccagctgaagcccgagaaggatagcgacgaagccgtgacatatagcctgggaaagtttgggcagagggccctggatttctacagcattcatgtgaccaaggagtccacccaccccgtgaagcccctggcccagatcgccggaaacagatacgcctccggacctgtgggaaaggccctgagcgacgcatgtatgggcacaatcgcctccttcctgtctaagtaccaggacatcatcatcgaacaccagaaggtggtgaagggcaaccagaagagactggagagcctgcgggagctggccggcaaggaaaacctggaataccctagcgtgaccctgccacctcagcctcacaccaaggagggcgttgatgcctacaacgaagtgatcgcccgggtgcgaatgtgggtgaacctgaacctgtggcagaagctgaagctaagcagagatgatgccaagcctctgctgagactgaagggattcccttcctttcctctggtcgagagacaggccaacgaagtggactggtgggacatggtgtgtaacgtgaagaagctgatcaacgagaaaaaggaggatggcaaggtgttttggcagaatctggctggctacaagagacaggaagccctgagaccatacctgagcagcgaggaagatcggaagaagggaaagaaattcgctcggtaccagctgggcgacctgctgctgcacctggaaaagaagcacggcgaggactggggaaaggtgtacgacgaggcctgggagcggattgacaagaaagtggaaggcctgagcaagcacatcaagctggaagaggaacggagaagcgaggacgcccagagcaaggccgccctgaccgactggctgcgggctaaggccagcttcgtgatcgagggcctgaaggaggccgacaaggacgagttctgcagatgcgagctgaagctgcagaagtggtacggggacctgcggggaaagcccttcgccatcgaagccgagaacagcatcctggacatcagcggcttcagcaagcagtacaactgtgccttcatctggcagaaggacggcgtgaagaagctgaacctgtacctgatcatcaactacttcaagggcggcaagctgcggttcaagaagatcaaacctgaagccttcgaagccaacagattctacaccgtgatcaacaaaaagagcggcgagatcgtgcccatggaggtgaacttcaacttcgacgaccccaacctgatcatcctgcctctggcctttggcaagagacagggcagagaattcatctggaacgacctgctgtccctggaaaccggcagcctgaagctggccaacggaagagtgatcgagaagacactgtacaacagaagaacccggcaggatgagcctgccctgttcgtggccctgaccttcgagcggcgggaggtcctggactcctccaatatcaaaccaatgaacctgatcggcgtggcaagaggcgaaaacatccccgccgtgatcgccctgaccgaccccgagggctgcccactgagccggtttaaggatagcctgggaaacccaacccacatcctgagaatcggcgagagctataaggagaagcagcggaccatccaggccaagaaggaggtggagcagcggagagccggcggctacagccggaagtacgccagcaaagccaagaatctggcagacgatatggtgagaaacaccgctagagatctgctgtactacgccgtgacccaggatgccatgctgatcttcgccaacctgagccggggcttcggccggcagggcaagcggaccttcatggccgagagacagtacacacggatggaggactggctgaccgccaagctggcctacgagggcctgagcaagacctacctgtccaagacactggcccagtacacctccaagacatgcagcaactgtgggtttaccatcaccagcgccgactacgacagggtgctggagaagctgaagaagacagcaacaggctggatgaccacaattaacggcaaggagctgaaggtggagggccagattacctactacaacagatacaagagacagaacgtagtcaaggacctgtccgtcgagctggatagactgagcgaagaatctgtgaacaacgacatctcctcctggacaaagggcagaagcggagaagctctgagcctcctgaagaaaagattctcccatagacccgtgcaggagaagttcgtgtgcctgaactgcggcttcgagacacacgcagccgagcaagccgccctgaacatcgccagatcctggctgttcctgcggagccaggagtacaagaaataccagacaaacaagacaaccggcaacaccgataagagagccttcgtcgagacctggcagtccttttaccggaagaagcttaaggaggtgtggaaacctgccgtgcggtctggcggatctggcggaggctcctgcccccggcagcgtgaccttcagggacgtggccatcgacttcagccaggaggagtggaagtggctgcagcccgcccagagggacctgtacaggtgcgtgatgctggagaactacggccacctggtgagcctgggcctgtgcatcagcaagcccgacgtggtgagcctgctggagcagggcaaggagccctggctgggcaagggcggcgtgaacagggacctgttcagcgtgagcgacggcaagggatctggctccggcagcggccccaagaaaaagagaaaagtctaagctgccttctgcggggcttgccttctggccatgcccttcttctctcccttgcacctgtacctcttggtctttgaataaagcctgagtaggaaggctagcaaaaaaaaaaaaaaaaaaaaaaaaaaaaaaaaaaaaaaaaaaaaaaaaaaaaaaaaaaaaaaaaaaaaaaaaaaaaaaaa

SEQ ID NO: 15801 - RNA, 9485 nt, synthetic construct
  source 1..9485: mol_type = other RNA
aggaaataagagagaaaagaagagtaagaagaaatataagagccaccatggcccctaagaagaagcgtaaagtgagccggatggaacgcctcgtctacgaggtgcggcagaagtgcagaaacatcgaggacatctgcatctcctgcggatctctgaacgtgaccctggagcacccactgttcatcggcggcatgtgccagaactgtaaaaactgttttctggagtgtgcctatcaatacgacgatgacggctaccagagctactgcaccatctgttgcggcggaagagaggtgctgatgtgtggaaataacaactgctgccggtgcttctgcgtggaatgcgtggacctgctggtgggccccggcgccgcccaggccgctattaaggaagatccttggaactgctacatgtgcggccacaagggcacatacggcctgctgagacggagagaggactggcctagcagactgcagatgttcttcgccaataaccacgaccaggagttcgacccccctaaggtgtaccctcccgtccccgccgagaagagaaagcccatccgggtcctgagcctgttcgatggcatcgccaccggtctgctggtgctgaaggacctgggcatccaggtggataggtacattgcctccgaggtgtgcgaggactccatcaccgtgggaatggtgcgtcatcagggcaagatcatgtacgtgggcgacgtgcggagcgtgacacagaagcatatccaggagtggggccctttcgacctggtgatcggcggcagcccttgcaatgacctgagcatcgtgaacccagcccggaagggcctgtacgagggaaccggcagactgttcttcgagttttacagactgctgcacgacgcccggcctaaggaaggcgacgaccggcccttcttttggctgttcgagaatgtggtggccatgggagtcagcgacaagcgggatattagccggttcctggagagcaaccccgtgatgatcgatgccaaggaagtgagcgccgcccaccgggccagatacttctggggcaatctgcctggcatgaacagacccctggccagcaccgtgaacgacaagctggagctgcaggagtgcctggagcacggccggatcgccaagttcagcaaggtgagaaccatcaccacccgaagcaacagcatcaaacaaggcaaggaccagcactttcctgtgttcatgaacgagaaggaggacatcctgtggtgtaccgagatggagagagtgttcgggttcccagtccactacacagatgtcagcaacatgtctagactggccagacagagactgctgggaagaagctggtccgtccctgtgatcagacacctgttcgcccctctgaaggagtacttcgcctgcgtgagcagcggcaacagcaacgccaacagccggggccccagcttctctagcggcctggtgccactgtccctgagagggagccacatgggccccatggagatctacaaaaccgtgagcgcctggaagcggcagcctgtgcgcgtgctgagcctgtttcggaatatcgataaagtcctgaaaagcctgggattcctggagagcggctctggctccggcggtggcaccctgaagtacgtggaggatgtgacaaacgtggtcagacgggatgtggagaagtggggccccttcgatctggtgtacggcagcacccaacccctgggcagctcttgtgaccggtgccctggctggtacatgtttcagttccaccggatcctgcagtacgccctgccgagacaggagtcccagcggccattcttttggattttcatggacaacttgctgctgaccgaggatgaccaggaaactaccactcggttcctgcagaccgaagccgtgaccctgcaggacgtgagaggccgggactaccagaacgccatgcgggtgtggtccaacatccctggactgaaaagcaagcacgcacctctgacccctaaagaagaggagtacctgcaggcccaggtgcggagcagaagcaagctggacgcccctaaggtggatctgctggtgaagaattgcctcctgcccctgagagagtacttcaagtatttcagccagaatagtctgcccctgggaggcagcggcggcggcgccctggtgacatttgaggacgtcgccgtgcggttcacccaggaggaatgggctctgctggatccttctcagaaaatcctgtaccgggacgtgatgagagagacataccggaatctgacctccgtgggcatcaactgggaatgttgggaccttgaagcctgcttcagaagcctgggaagaaacctgagagtgcaggtggtgaagagaaagtgcgagctgaccaacagcggcccctgcgccgagggcggcccaagcagcggcgcccctcctcccagcggcggcagcccagccggctccccaacctctaccgaggagggcacctctgagtccgccacccccgagagcggccctggcacctccaccgagcccagcgagggcagcgcacccggcagccctgccggcagccccacctccacagaggagggaaccagcaccgagcccagcgaaggcagcgccccaggcaccagcaccgagcctagtgagcaggagattaaacggatcaacaagatcagaagaagacttgtgaaagacagcaacaccaagaaggccggcaagacaggccccatgaaaaccctgctggttagagtgatgacacccgatctgagagagcggctggaaaacctgagaaagaagcctgaaaatatcccccagcccatcagcaatacatctagagccaacctgaataagctgctgaccgattacaccgaaatgaagaaggcgatcctgcatgtgtactgggaagagttccagaaggaccctgtgggcctgatgagccgggtggcccagcctgccagcaagaagatcgatcagaacaagctgaaacctgagatggacgagaagggcaacctgaccaccgccggctttgcctgctctcagtgtggccagcccctgttcgtgtacaagctggagcaggtgtctgagaagggcaaggcttacaccaactacttcggacggtgcaatgtggccgagcacgaaaagctgatcctgctggcccagctgaagcccgagaaggatagcgacgaagccgtgacatatagcctgggaaagtttgggcagagggccctggatttctacagcattcatgtgaccaaggagtccacccaccccgtgaagcccctggcccagatcgccggaaacagatacgcctccggacctgtgggaaaggccctgagcgacgcatgtatgggcacaatcgcctccttcctgtctaagtaccaggacatcatcatcgaacaccagaaggtggtgaagggcaaccagaagagactggagagcctgcgggagctggccggcaaggaaaacctggaataccctagcgtgaccctgccacctcagcctcacaccaaggagggcgttgatgcctacaacgaagtgatcgcccgggtgcgaatgtgggtgaacctgaacctgtggcagaagctgaagctaagcagagatgatgccaagcctctgctgagactgaagggattcccttcctttcctctggtcgagagacaggccaacgaagtggactggtgggacatggtgtgtaacgtgaagaagctgatcaacgagaaaaaggaggatggcaaggtgttttggcagaatctggctggctacaagagacaggaagccctgagaccatacctgagcagcgaggaagatcggaagaagggaaagaaattcgctcggtaccagctgggcgacctgctgctgcacctggaaaagaagcacggcgaggactggggaaaggtgtacgacgaggcctgggagcggattgacaagaaagtggaaggcctgagcaagcacatcaagctggaagaggaacggagaagcgaggacgcccagagcaaggccgccctgaccgactggctgcgggctaaggccagcttcgtgatcgagggcctgaaggaggccgacaaggacgagttctgcagatgcgagctgaagctgcagaagtggtacggggacctgcggggaaagcccttcgccatcgaagccgagaacagcatcctggacatcagcggcttcagcaagcagtacaactgtgccttcatctggcagaaggacggcgtgaagaagctgaacctgtacctgatcatcaactacttcaagggcggcaagctgcggttcaagaagatcaaacctgaagccttcgaagccaacagattctacaccgtgatcaacaaaaagagcggcgagatcgtgcccatggaggtgaacttcaacttcgacgaccccaacctgatcatcctgcctctggcctttggcaagagacagggcagagaattcatctggaacgacctgctgtccctggaaaccggcagcctgaagctggccaacggaagagtgatcgagaagacactgtacaacagaagaacccggcaggatgagcctgccctgttcgtggccctgaccttcgagcggcgggaggtcctggactcctccaatatcaaaccaatgaacctgatcggcgtggcaagaggcgaaaacatccccgccgtgatcgccctgaccgaccccgagggctgcccactgagccggtttaaggatagcctgggaaacccaacccacatcctgagaatcggcgagagctataaggagaagcagcggaccatccaggccaagaaggaggtggagcagcggagagccggcggctacagccggaagtacgccagcaaagccaagaatctggcagacgatatggtgagaaacaccgctagagatctgctgtactacgccgtgacccaggatgccatgctgatcttcgccaacctgagccggggcttcggccggcagggcaagcggaccttcatggccgagagacagtacacacggatggaggactggctgaccgccaagctggcctacgagggcctgagcaagacctacctgtccaagacactggcccagtacacctccaagacatgcagcaactgtgggtttaccatcaccagcgccgactacgacagggtgctggagaagctgaagaagacagcaacaggctggatgaccacaattaacggcaaggagctgaaggtggagggccagattacctactacaacagatacaagagacagaacgtagtcaaggacctgtccgtcgagctggatagactgagcgaagaatctgtgaacaacgacatctcctcctggacaaagggcagaagcggagaagctctgagcctcctgaagaaaagattctcccatagacccgtgcaggagaagttcgtgtgcctgaactgcggcttcgagacacacgcagccgagcaagccgccctgaacatcgccagatcctggctgttcctgcggagccaggagtacaagaaataccagacaaacaagacaaccggcaacaccgataagagagccttcgtcgagacctggcagtccttttaccggaagaagcttaaggaggtgtggaaacctgccgtgcggtctggcggatctggcggaggctccggcagcgtgatgttcagcgacgtgagcgtggacttcagccaggacgagtgggagtgcctggaccccgtgcagagggacctgtacagggaggtgatgctggagaactacagcaacctggtgagcgtgggcctgtacatccccaagccccaggtgatcagcctgctggagcagggcaaggagccctggatggtgggcaaggagctgaccaggggcctgtgcagcgacctggagagcatgtgcgagggcggcccaagcagcggcgcccctcctcccagcggcggcagcccagccggctccccaacctctaccgaggagggcacctctgagtccgccacccccgagagcggccctggcacctccaccgagcccagcgagggcagcgcacccggcagccctgccggcagccccacctccacagaggagggaaccagcaccgagcccagcgaaggcagcgccccaggcaccagcaccgagcctagtgagcaggagattaaacggatcaacaagatcagaagaagacttgtgaaagacagcaacaccaagaaggccggcaagacaggccccatgaaaaccctgctggttagagtgatgacacccgatctgagagagcggctggaaaacctgagaaagaagcctgaaaatatcccccagcccatcagcaatacatctagagccaacctgaataagctgctgaccgattacaccgaaatgaagaaggcgatcctgcatgtgtactgggaagagttccagaaggaccctgtgggcctgatgagccgggtggcccagcctgccagcaagaagatcgatcagaacaagctgaaacctgagatggacgagaagggcaacctgaccaccgccggctttgcctgctctcagtgtggccagcccctgttcgtgtacaagctggagcaggtgtctgagaagggcaaggcttacaccaactacttcggacggtgcaatgtggccgagcacgaaaagctgatcctgctggcccagctgaagcccgagaaggatagcgacgaagccgtgacatatagcctgggaaagtttgggcagagggccctggatttctacagcattcatgtgaccaaggagtccacccaccccgtgaagcccctggcccagatcgccggaaacagatacgcctccggacctgtgggaaaggccctgagcgacgcatgtatgggcacaatcgcctccttcctgtctaagtaccaggacatcatcatcgaacaccagaaggtggtgaagggcaaccagaagagactggagagcctgcgggagctggccggcaaggaaaacctggaataccctagcgtgaccctgccacctcagcctcacaccaaggagggcgttgatgcctacaacgaagtgatcgcccgggtgcgaatgtgggtgaacctgaacctgtggcagaagctgaagctaagcagagatgatgccaagcctctgctgagactgaagggattcccttcctttcctctggtcgagagacaggccaacgaagtggactggtgggacatggtgtgtaacgtgaagaagctgatcaacgagaaaaaggaggatggcaaggtgttttggcagaatctggctggctacaagagacaggaagccctgagaccatacctgagcagcgaggaagatcggaagaagggaaagaaattcgctcggtaccagctgggcgacctgctgctgcacctggaaaagaagcacggcgaggactggggaaaggtgtacgacgaggcctgggagcggattgacaagaaagtggaaggcctgagcaagcacatcaagctggaagaggaacggagaagcgaggacgcccagagcaaggccgccctgaccgactggctgcgggctaaggccagcttcgtgatcgagggcctgaaggaggccgacaaggacgagttctgcagatgcgagctgaagctgcagaagtggtacggggacctgcggggaaagcccttcgccatcgaagccgagaacagcatcctggacatcagcggcttcagcaagcagtacaactgtgccttcatctggcagaaggacggcgtgaagaagctgaacctgtacctgatcatcaactacttcaagggcggcaagctgcggttcaagaagatcaaacctgaagccttcgaagccaacagattctacaccgtgatcaacaaaaagagcggcgagatcgtgcccatggaggtgaacttcaacttcgacgaccccaacctgatcatcctgcctctggcctttggcaagagacagggcagagaattcatctggaacgacctgctgtccctggaaaccggcagcctgaagctggccaacggaagagtgatcgagaagacactgtacaacagaagaacccggcaggatgagcctgccctgttcgtggccctgaccttcgagcggcgggaggtcctggactcctccaatatcaaaccaatgaacctgatcggcgtggcaagaggcgaaaacatccccgccgtgatcgccctgaccgaccccgagggctgcccactgagccggtttaaggatagcctgggaaacccaacccacatcctgagaatcggcgagagctataaggagaagcagcggaccatccaggccaagaaggaggtggagcagcggagagccggcggctacagccggaagtacgccagcaaagccaagaatctggcagacgatatggtgagaaacaccgctagagatctgctgtactacgccgtgacccaggatgccatgctgatcttcgccaacctgagccggggcttcggccggcagggcaagcggaccttcatggccgagagacagtacacacggatggaggactggctgaccgccaagctggcctacgagggcctgagcaagacctacctgtccaagacactggcccagtacacctccaagacatgcagcaactgtgggtttaccatcaccagcgccgactacgacagggtgctggagaagctgaagaagacagcaacaggctggatgaccacaattaacggcaaggagctgaaggtggagggccagattacctactacaacagatacaagagacagaacgtagtcaaggacctgtccgtcgagctggatagactgagcgaagaatctgtgaacaacgacatctcctcctggacaaagggcagaagcggagaagctctgagcctcctgaagaaaagattctcccatagacccgtgcaggagaagttcgtgtgcctgaactgcggcttcgagacacacgcagccgagcaagccgccctgaacatcgccagatcctggctgttcctgcggagccaggagtacaagaaataccagacaaacaagacaaccggcaacaccgataagagagccttcgtcgagacctggcagtccttttaccggaagaagcttaaggaggtgtggaaacctgccgtgcggtctggcggatctggcggaggctcctggcagcgtgatgttcagcgacgtgagcgtggacttcagccaggacgagtgggagtgcctggaccccgtgcagagggacctgtacagggaggtgatgctggagaactacagcaacctggtgagcgtgggcctgtacatccccaagccccaggtgatcagcctgctggagcagggcaaggagccctggatggtgggcaaggagctgaccaggggcctgtgcagcgacctggagagcatgtgcgagggatctggctccggcagcggccccaagaaaaagagaaaagtctaagctgccttctgcggggcttgccttctggccatgcccttcttctctcccttgcacctgtacctcttggtctttgaataaagcctgagtaggaaggctagcaaaaaaaaaaaaaaaaaaaaaaaaaaaaaaaaaaaaaaaaaaaaaaaaaaaaaaaaaaaaaaaaaaaaaaaaaaaaaaaa

SEQ ID NO: 15802 - RNA, 9485 nt, synthetic construct
  source 1..9485: mol_type = other RNA
aggaaataagagagaaaagaagagtaagaagaaatataagagccaccatggcccctaagaagaagcgtaaagtgagccggatggaacgcctcgtctacgaggtgcggcagaagtgcagaaacatcgaggacatctgcatctcctgcggatctctgaacgtgaccctggagcacccactgttcatcggcggcatgtgccagaactgtaaaaactgttttctggagtgtgcctatcaatacgacgatgacggctaccagagctactgcaccatctgttgcggcggaagagaggtgctgatgtgtggaaataacaactgctgccggtgcttctgcgtggaatgcgtggacctgctggtgggccccggcgccgcccaggccgctattaaggaagatccttggaactgctacatgtgcggccacaagggcacatacggcctgctgagacggagagaggactggcctagcagactgcagatgttcttcgccaataaccacgaccaggagttcgacccccctaaggtgtaccctcccgtccccgccgagaagagaaagcccatccgggtcctgagcctgttcgatggcatcgccaccggtctgctggtgctgaaggacctgggcatccaggtggataggtacattgcctccgaggtgtgcgaggactccatcaccgtgggaatggtgcgtcatcagggcaagatcatgtacgtgggcgacgtgcggagcgtgacacagaagcatatccaggagtggggccctttcgacctggtgatcggcggcagcccttgcaatgacctgagcatcgtgaacccagcccggaagggcctgtacgagggaaccggcagactgttcttcgagttttacagactgctgcacgacgcccggcctaaggaaggcgacgaccggcccttcttttggctgttcgagaatgtggtggccatgggagtcagcgacaagcgggatattagccggttcctggagagcaaccccgtgatgatcgatgccaaggaagtgagcgccgcccaccgggccagatacttctggggcaatctgcctggcatgaacagacccctggccagcaccgtgaacgacaagctggagctgcaggagtgcctggagcacggccggatcgccaagttcagcaaggtgagaaccatcaccacccgaagcaacagcatcaaacaaggcaaggaccagcactttcctgtgttcatgaacgagaaggaggacatcctgtggtgtaccgagatggagagagtgttcgggttcccagtccactacacagatgtcagcaacatgtctagactggccagacagagactgctgggaagaagctggtccgtccctgtgatcagacacctgttcgcccctctgaaggagtacttcgcctgcgtgagcagcggcaacagcaacgccaacagccggggccccagcttctctagcggcctggtgccactgtccctgagagggagccacatgggccccatggagatctacaaaaccgtgagcgcctggaagcggcagcctgtgcgcgtgctgagcctgtttcggaatatcgataaagtcctgaaaagcctgggattcctggagagcggctctggctccggcggtggcaccctgaagtacgtggaggatgtgacaaacgtggtcagacgggatgtggagaagtggggccccttcgatctggtgtacggcagcacccaacccctgggcagctcttgtgaccggtgccctggctggtacatgtttcagttccaccggatcctgcagtacgccctgccgagacaggagtcccagcggccattcttttggattttcatggacaacttgctgctgaccgaggatgaccaggaaactaccactcggttcctgcagaccgaagccgtgaccctgcaggacgtgagaggccgggactaccagaacgccatgcgggtgtggtccaacatccctggactgaaaagcaagcacgcacctctgacccctaaagaagaggagtacctgcaggcccaggtgcggagcagaagcaagctggacgcccctaaggtggatctgctggtgaagaattgcctcctgcccctgagagagtacttcaagtatttcagccagaatagtctgcccctgggaggcagcggcggcggcgccctggtgacatttgaggacgtcgccgtgcggttcacccaggaggaatgggctctgctggatccttctcagaaaatcctgtaccgggacgtgatgagagagacataccggaatctgacctccgtgggcatcaactgggaatgttgggaccttgaagcctgcttcagaagcctgggaagaaacctgagagtgcaggtggtgaagagaaagtgcgagctgaccaacagcggcccctgcgccgagggcggcccaagcagcggcgcccctcctcccagcggcggcagcccagccggctccccaacctctaccgaggagggcacctctgagtccgccacccccgagagcggccctggcacctccaccgagcccagcgagggcagcgcacccggcagccctgccggcagccccacctccacagaggagggaaccagcaccgagcccagcgaaggcagcgccccaggcaccagcaccgagcctagtgagcaggagattaaacggatcaacaagatcagaagaagacttgtgaaagacagcaacaccaagaaggccggcaagacaggccccatgaaaaccctgctggttagagtgatgacacccgatctgagagagcggctggaaaacctgagaaagaagcctgaaaatatcccccagcccatcagcaatacatctagagccaacctgaataagctgctgaccgattacaccgaaatgaagaaggcgatcctgcatgtgtactgggaagagttccagaaggaccctgtgggcctgatgagccgggtggcccagcctgccagcaagaagatcgatcagaacaagctgaaacctgagatggacgagaagggcaacctgaccaccgccggctttgcctgctctcagtgtggccagcccctgttcgtgtacaagctggagcaggtgtctgagaagggcaaggcttacaccaactacttcggacggtgcaatgtggccgagcacgaaaagctgatcctgctggcccagctgaagcccgagaaggatagcgacgaagccgtgacatatagcctgggaaagtttgggcagagggccctggatttctacagcattcatgtgaccaaggagtccacccaccccgtgaagcccctggcccagatcgccggaaacagatacgcctccggacctgtgggaaaggccctgagcgacgcatgtatgggcacaatcgcctccttcctgtctaagtaccaggacatcatcatcgaacaccagaaggtggtgaagggcaaccagaagagactggagagcctgcgggagctggccggcaaggaaaacctggaataccctagcgtgaccctgccacctcagcctcacaccaaggagggcgttgatgcctacaacgaagtgatcgcccgggtgcgaatgtgggtgaacctgaacctgtggcagaagctgaagctaagcagagatgatgccaagcctctgctgagactgaagggattcccttcctttcctctggtcgagagacaggccaacgaagtggactggtgggacatggtgtgtaacgtgaagaagctgatcaacgagaaaaaggaggatggcaaggtgttttggcagaatctggctggctacaagagacaggaagccctgagaccatacctgagcagcgaggaagatcggaagaagggaaagaaattcgctcggtaccagctgggcgacctgctgctgcacctggaaaagaagcacggcgaggactggggaaaggtgtacgacgaggcctgggagcggattgacaagaaagtggaaggcctgagcaagcacatcaagctggaagaggaacggagaagcgaggacgcccagagcaaggccgccctgaccgactggctgcgggctaaggccagcttcgtgatcgagggcctgaaggaggccgacaaggacgagttctgcagatgcgagctgaagctgcagaagtggtacggggacctgcggggaaagcccttcgccatcgaagccgagaacagcatcctggacatcagcggcttcagcaagcagtacaactgtgccttcatctggcagaaggacggcgtgaagaagctgaacctgtacctgatcatcaactacttcaagggcggcaagctgcggttcaagaagatcaaacctgaagccttcgaagccaacagattctacaccgtgatcaacaaaaagagcggcgagatcgtgcccatggaggtgaacttcaacttcgacgaccccaacctgatcatcctgcctctggcctttggcaagagacagggcagagaattcatctggaacgacctgctgtccctggaaaccggcagcctgaagctggccaacggaagagtgatcgagaagacactgtacaacagaagaacccggcaggatgagcctgccctgttcgtggccctgaccttcgagcggcgggaggtcctggactcctccaatatcaaaccaatgaacctgatcggcgtggcaagaggcgaaaacatccccgccgtgatcgccctgaccgaccccgagggctgcccactgagccggtttaaggatagcctgggaaacccaacccacatcctgagaatcggcgagagctataaggagaagcagcggaccatccaggccaagaaggaggtggagcagcggagagccggcggctacagccggaagtacgccagcaaagccaagaatctggcagacgatatggtgagaaacaccgctagagatctgctgtactacgccgtgacccaggatgccatgctgatcttcgccaacctgagccggggcttcggccggcagggcaagcggaccttcatggccgagagacagtacacacggatggaggactggctgaccgccaagctggcctacgagggcctgagcaagacctacctgtccaagacactggcccagtacacctccaagacatgcagcaactgtgggtttaccatcaccagcgccgactacgacagggtgctggagaagctgaagaagacagcaacaggctggatgaccacaattaacggcaaggagctgaaggtggagggccagattacctactacaacagatacaagagacagaacgtagtcaaggacctgtccgtcgagctggatagactgagcgaagaatctgtgaacaacgacatctcctcctggacaaagggcagaagcggagaagctctgagcctcctgaagaaaagattctcccatagacccgtgcaggagaagttcgtgtgcctgaactgcggcttcgagacacacgcagccgagcaagccgccctgaacatcgccagatcctggctgttcctgcggagccaggagtacaagaaataccagacaaacaagacaaccggcaacaccgataagagagccttcgtcgagacctggcagtccttttaccggaagaagcttaaggaggtgtggaaacctgccgtgcggtctggcggatctggcggaggctccggcagcgtgtgcgaggtgagcgtgagcttcgaggacgtgaccgtggacttcagcagggaggagtggcagcacctggaccccgcccagaggaggctgtactgggacgtgaccctggagaactacagccacctgtgcagcgtgggctaccaggtgcccaagcccgaggtgatcttcaagctggagcagggcgagggcccctggaccctggaggaggagaccccccaccagagctgcagcggcgccggcggcccaagcagcggcgcccctcctcccagcggcggcagcccagccggctccccaacctctaccgaggagggcacctctgagtccgccacccccgagagcggccctggcacctccaccgagcccagcgagggcagcgcacccggcagccctgccggcagccccacctccacagaggagggaaccagcaccgagcccagcgaaggcagcgccccaggcaccagcaccgagcctagtgagcaggagattaaacggatcaacaagatcagaagaagacttgtgaaagacagcaacaccaagaaggccggcaagacaggccccatgaaaaccctgctggttagagtgatgacacccgatctgagagagcggctggaaaacctgagaaagaagcctgaaaatatcccccagcccatcagcaatacatctagagccaacctgaataagctgctgaccgattacaccgaaatgaagaaggcgatcctgcatgtgtactgggaagagttccagaaggaccctgtgggcctgatgagccgggtggcccagcctgccagcaagaagatcgatcagaacaagctgaaacctgagatggacgagaagggcaacctgaccaccgccggctttgcctgctctcagtgtggccagcccctgttcgtgtacaagctggagcaggtgtctgagaagggcaaggcttacaccaactacttcggacggtgcaatgtggccgagcacgaaaagctgatcctgctggcccagctgaagcccgagaaggatagcgacgaagccgtgacatatagcctgggaaagtttgggcagagggccctggatttctacagcattcatgtgaccaaggagtccacccaccccgtgaagcccctggcccagatcgccggaaacagatacgcctccggacctgtgggaaaggccctgagcgacgcatgtatgggcacaatcgcctccttcctgtctaagtaccaggacatcatcatcgaacaccagaaggtggtgaagggcaaccagaagagactggagagcctgcgggagctggccggcaaggaaaacctggaataccctagcgtgaccctgccacctcagcctcacaccaaggagggcgttgatgcctacaacgaagtgatcgcccgggtgcgaatgtgggtgaacctgaacctgtggcagaagctgaagctaagcagagatgatgccaagcctctgctgagactgaagggattcccttcctttcctctggtcgagagacaggccaacgaagtggactggtgggacatggtgtgtaacgtgaagaagctgatcaacgagaaaaaggaggatggcaaggtgttttggcagaatctggctggctacaagagacaggaagccctgagaccatacctgagcagcgaggaagatcggaagaagggaaagaaattcgctcggtaccagctgggcgacctgctgctgcacctggaaaagaagcacggcgaggactggggaaaggtgtacgacgaggcctgggagcggattgacaagaaagtggaaggcctgagcaagcacatcaagctggaagaggaacggagaagcgaggacgcccagagcaaggccgccctgaccgactggctgcgggctaaggccagcttcgtgatcgagggcctgaaggaggccgacaaggacgagttctgcagatgcgagctgaagctgcagaagtggtacggggacctgcggggaaagcccttcgccatcgaagccgagaacagcatcctggacatcagcggcttcagcaagcagtacaactgtgccttcatctggcagaaggacggcgtgaagaagctgaacctgtacctgatcatcaactacttcaagggcggcaagctgcggttcaagaagatcaaacctgaagccttcgaagccaacagattctacaccgtgatcaacaaaaagagcggcgagatcgtgcccatggaggtgaacttcaacttcgacgaccccaacctgatcatcctgcctctggcctttggcaagagacagggcagagaattcatctggaacgacctgctgtccctggaaaccggcagcctgaagctggccaacggaagagtgatcgagaagacactgtacaacagaagaacccggcaggatgagcctgccctgttcgtggccctgaccttcgagcggcgggaggtcctggactcctccaatatcaaaccaatgaacctgatcggcgtggcaagaggcgaaaacatccccgccgtgatcgccctgaccgaccccgagggctgcccactgagccggtttaaggatagcctgggaaacccaacccacatcctgagaatcggcgagagctataaggagaagcagcggaccatccaggccaagaaggaggtggagcagcggagagccggcggctacagccggaagtacgccagcaaagccaagaatctggcagacgatatggtgagaaacaccgctagagatctgctgtactacgccgtgacccaggatgccatgctgatcttcgccaacctgagccggggcttcggccggcagggcaagcggaccttcatggccgagagacagtacacacggatggaggactggctgaccgccaagctggcctacgagggcctgagcaagacctacctgtccaagacactggcccagtacacctccaagacatgcagcaactgtgggtttaccatcaccagcgccgactacgacagggtgctggagaagctgaagaagacagcaacaggctggatgaccacaattaacggcaaggagctgaaggtggagggccagattacctactacaacagatacaagagacagaacgtagtcaaggacctgtccgtcgagctggatagactgagcgaagaatctgtgaacaacgacatctcctcctggacaaagggcagaagcggagaagctctgagcctcctgaagaaaagattctcccatagacccgtgcaggagaagttcgtgtgcctgaactgcggcttcgagacacacgcagccgagcaagccgccctgaacatcgccagatcctggctgttcctgcggagccaggagtacaagaaataccagacaaacaagacaaccggcaacaccgataagagagccttcgtcgagacctggcagtccttttaccggaagaagcttaaggaggtgtggaaacctgccgtgcggtctggcggatctggcggaggctcctggcagcgtgtgcgaggtgagcgtgagcttcgaggacgtgaccgtggacttcagcagggaggagtggcagcacctggaccccgcccagaggaggctgtactgggacgtgaccctggagaactacagccacctgtgcagcgtgggctaccaggtgcccaagcccgaggtgatcttcaagctggagcagggcgagggcccctggaccctggaggaggagaccccccaccagagctgcagcggcgccggatctggctccggcagcggccccaagaaaaagagaaaagtctaagctgccttctgcggggcttgccttctggccatgcccttcttctctcccttgcacctgtacctcttggtctttgaataaagcctgagtaggaaggctagcaaaaaaaaaaaaaaaaaaaaaaaaaaaaaaaaaaaaaaaaaaaaaaaaaaaaaaaaaaaaaaaaaaaaaaaaaaaaaaaa

SEQ ID NO: 15803 - RNA, 9485 nt, synthetic construct
  source 1..9485: mol_type = other RNA
aggaaataagagagaaaagaagagtaagaagaaatataagagccaccatggcccctaagaagaagcgtaaagtgagccggatggaacgcctcgtctacgaggtgcggcagaagtgcagaaacatcgaggacatctgcatctcctgcggatctctgaacgtgaccctggagcacccactgttcatcggcggcatgtgccagaactgtaaaaactgttttctggagtgtgcctatcaatacgacgatgacggctaccagagctactgcaccatctgttgcggcggaagagaggtgctgatgtgtggaaataacaactgctgccggtgcttctgcgtggaatgcgtggacctgctggtgggccccggcgccgcccaggccgctattaaggaagatccttggaactgctacatgtgcggccacaagggcacatacggcctgctgagacggagagaggactggcctagcagactgcagatgttcttcgccaataaccacgaccaggagttcgacccccctaaggtgtaccctcccgtccccgccgagaagagaaagcccatccgggtcctgagcctgttcgatggcatcgccaccggtctgctggtgctgaaggacctgggcatccaggtggataggtacattgcctccgaggtgtgcgaggactccatcaccgtgggaatggtgcgtcatcagggcaagatcatgtacgtgggcgacgtgcggagcgtgacacagaagcatatccaggagtggggccctttcgacctggtgatcggcggcagcccttgcaatgacctgagcatcgtgaacccagcccggaagggcctgtacgagggaaccggcagactgttcttcgagttttacagactgctgcacgacgcccggcctaaggaaggcgacgaccggcccttcttttggctgttcgagaatgtggtggccatgggagtcagcgacaagcgggatattagccggttcctggagagcaaccccgtgatgatcgatgccaaggaagtgagcgccgcccaccgggccagatacttctggggcaatctgcctggcatgaacagacccctggccagcaccgtgaacgacaagctggagctgcaggagtgcctggagcacggccggatcgccaagttcagcaaggtgagaaccatcaccacccgaagcaacagcatcaaacaaggcaaggaccagcactttcctgtgttcatgaacgagaaggaggacatcctgtggtgtaccgagatggagagagtgttcgggttcccagtccactacacagatgtcagcaacatgtctagactggccagacagagactgctgggaagaagctggtccgtccctgtgatcagacacctgttcgcccctctgaaggagtacttcgcctgcgtgagcagcggcaacagcaacgccaacagccggggccccagcttctctagcggcctggtgccactgtccctgagagggagccacatgggccccatggagatctacaaaaccgtgagcgcctggaagcggcagcctgtgcgcgtgctgagcctgtttcggaatatcgataaagtcctgaaaagcctgggattcctggagagcggctctggctccggcggtggcaccctgaagtacgtggaggatgtgacaaacgtggtcagacgggatgtggagaagtggggccccttcgatctggtgtacggcagcacccaacccctgggcagctcttgtgaccggtgccctggctggtacatgtttcagttccaccggatcctgcagtacgccctgccgagacaggagtcccagcggccattcttttggattttcatggacaacttgctgctgaccgaggatgaccaggaaactaccactcggttcctgcagaccgaagccgtgaccctgcaggacgtgagaggccgggactaccagaacgccatgcgggtgtggtccaacatccctggactgaaaagcaagcacgcacctctgacccctaaagaagaggagtacctgcaggcccaggtgcggagcagaagcaagctggacgcccctaaggtggatctgctggtgaagaattgcctcctgcccctgagagagtacttcaagtatttcagccagaatagtctgcccctgggaggcagcggcggcggcgccctggtgacatttgaggacgtcgccgtgcggttcacccaggaggaatgggctctgctggatccttctcagaaaatcctgtaccgggacgtgatgagagagacataccggaatctgacctccgtgggcatcaactgggaatgttgggaccttgaagcctgcttcagaagcctgggaagaaacctgagagtgcaggtggtgaagagaaagtgcgagctgaccaacagcggcccctgcgccgagggcggcccaagcagcggcgcccctcctcccagcggcggcagcccagccggctccccaacctctaccgaggagggcacctctgagtccgccacccccgagagcggccctggcacctccaccgagcccagcgagggcagcgcacccggcagccctgccggcagccccacctccacagaggagggaaccagcaccgagcccagcgaaggcagcgccccaggcaccagcaccgagcctagtgagcaggagattaaacggatcaacaagatcagaagaagacttgtgaaagacagcaacaccaagaaggccggcaagacaggccccatgaaaaccctgctggttagagtgatgacacccgatctgagagagcggctggaaaacctgagaaagaagcctgaaaatatcccccagcccatcagcaatacatctagagccaacctgaataagctgctgaccgattacaccgaaatgaagaaggcgatcctgcatgtgtactgggaagagttccagaaggaccctgtgggcctgatgagccgggtggcccagcctgccagcaagaagatcgatcagaacaagctgaaacctgagatggacgagaagggcaacctgaccaccgccggctttgcctgctctcagtgtggccagcccctgttcgtgtacaagctggagcaggtgtctgagaagggcaaggcttacaccaactacttcggacggtgcaatgtggccgagcacgaaaagctgatcctgctggcccagctgaagcccgagaaggatagcgacgaagccgtgacatatagcctgggaaagtttgggcagagggccctggatttctacagcattcatgtgaccaaggagtccacccaccccgtgaagcccctggcccagatcgccggaaacagatacgcctccggacctgtgggaaaggccctgagcgacgcatgtatgggcacaatcgcctccttcctgtctaagtaccaggacatcatcatcgaacaccagaaggtggtgaagggcaaccagaagagactggagagcctgcgggagctggccggcaaggaaaacctggaataccctagcgtgaccctgccacctcagcctcacaccaaggagggcgttgatgcctacaacgaagtgatcgcccgggtgcgaatgtgggtgaacctgaacctgtggcagaagctgaagctaagcagagatgatgccaagcctctgctgagactgaagggattcccttcctttcctctggtcgagagacaggccaacgaagtggactggtgggacatggtgtgtaacgtgaagaagctgatcaacgagaaaaaggaggatggcaaggtgttttggcagaatctggctggctacaagagacaggaagccctgagaccatacctgagcagcgaggaagatcggaagaagggaaagaaattcgctcggtaccagctgggcgacctgctgctgcacctggaaaagaagcacggcgaggactggggaaaggtgtacgacgaggcctgggagcggattgacaagaaagtggaaggcctgagcaagcacatcaagctggaagaggaacggagaagcgaggacgcccagagcaaggccgccctgaccgactggctgcgggctaaggccagcttcgtgatcgagggcctgaaggaggccgacaaggacgagttctgcagatgcgagctgaagctgcagaagtggtacggggacctgcggggaaagcccttcgccatcgaagccgagaacagcatcctggacatcagcggcttcagcaagcagtacaactgtgccttcatctggcagaaggacggcgtgaagaagctgaacctgtacctgatcatcaactacttcaagggcggcaagctgcggttcaagaagatcaaacctgaagccttcgaagccaacagattctacaccgtgatcaacaaaaagagcggcgagatcgtgcccatggaggtgaacttcaacttcgacgaccccaacctgatcatcctgcctctggcctttggcaagagacagggcagagaattcatctggaacgacctgctgtccctggaaaccggcagcctgaagctggccaacggaagagtgatcgagaagacactgtacaacagaagaacccggcaggatgagcctgccctgttcgtggccctgaccttcgagcggcgggaggtcctggactcctccaatatcaaaccaatgaacctgatcggcgtggcaagaggcgaaaacatccccgccgtgatcgccctgaccgaccccgagggctgcccactgagccggtttaaggatagcctgggaaacccaacccacatcctgagaatcggcgagagctataaggagaagcagcggaccatccaggccaagaaggaggtggagcagcggagagccggcggctacagccggaagtacgccagcaaagccaagaatctggcagacgatatggtgagaaacaccgctagagatctgctgtactacgccgtgacccaggatgccatgctgatcttcgccaacctgagccggggcttcggccggcagggcaagcggaccttcatggccgagagacagtacacacggatggaggactggctgaccgccaagctggcctacgagggcctgagcaagacctacctgtccaagacactggcccagtacacctccaagacatgcagcaactgtgggtttaccatcaccagcgccgactacgacagggtgctggagaagctgaagaagacagcaacaggctggatgaccacaattaacggcaaggagctgaaggtggagggccagattacctactacaacagatacaagagacagaacgtagtcaaggacctgtccgtcgagctggatagactgagcgaagaatctgtgaacaacgacatctcctcctggacaaagggcagaagcggagaagctctgagcctcctgaagaaaagattctcccatagacccgtgcaggagaagttcgtgtgcctgaactgcggcttcgagacacacgcagccgagcaagccgccctgaacatcgccagatcctggctgttcctgcggagccaggagtacaagaaataccagacaaacaagacaaccggcaacaccgataagagagccttcgtcgagacctggcagtccttttaccggaagaagcttaaggaggtgtggaaacctgccgtgcggtctggcggatctggcggaggctccatggtgttcgaggacgtggccgtgtacttcagcagggaggagtggggcctgctggacagcgcccagagggccctgtacaggcaggtgatgctggagaacttcgccctggtggccagcctgggcctgagcgccagcaggcccaggatcatcctgcagctggagaggggcgaggagccctgggtgctgagcggcctggacgtggccctggccagggacgcccagaggaggcccagccccgcccagggcggcccaagcagcggcgcccctcctcccagcggcggcagcccagccggctccccaacctctaccgaggagggcacctctgagtccgccacccccgagagcggccctggcacctccaccgagcccagcgagggcagcgcacccggcagccctgccggcagccccacctccacagaggagggaaccagcaccgagcccagcgaaggcagcgccccaggcaccagcaccgagcctagtgagcaggagattaaacggatcaacaagatcagaagaagacttgtgaaagacagcaacaccaagaaggccggcaagacaggccccatgaaaaccctgctggttagagtgatgacacccgatctgagagagcggctggaaaacctgagaaagaagcctgaaaatatcccccagcccatcagcaatacatctagagccaacctgaataagctgctgaccgattacaccgaaatgaagaaggcgatcctgcatgtgtactgggaagagttccagaaggaccctgtgggcctgatgagccgggtggcccagcctgccagcaagaagatcgatcagaacaagctgaaacctgagatggacgagaagggcaacctgaccaccgccggctttgcctgctctcagtgtggccagcccctgttcgtgtacaagctggagcaggtgtctgagaagggcaaggcttacaccaactacttcggacggtgcaatgtggccgagcacgaaaagctgatcctgctggcccagctgaagcccgagaaggatagcgacgaagccgtgacatatagcctgggaaagtttgggcagagggccctggatttctacagcattcatgtgaccaaggagtccacccaccccgtgaagcccctggcccagatcgccggaaacagatacgcctccggacctgtgggaaaggccctgagcgacgcatgtatgggcacaatcgcctccttcctgtctaagtaccaggacatcatcatcgaacaccagaaggtggtgaagggcaaccagaagagactggagagcctgcgggagctggccggcaaggaaaacctggaataccctagcgtgaccctgccacctcagcctcacaccaaggagggcgttgatgcctacaacgaagtgatcgcccgggtgcgaatgtgggtgaacctgaacctgtggcagaagctgaagctaagcagagatgatgccaagcctctgctgagactgaagggattcccttcctttcctctggtcgagagacaggccaacgaagtggactggtgggacatggtgtgtaacgtgaagaagctgatcaacgagaaaaaggaggatggcaaggtgttttggcagaatctggctggctacaagagacaggaagccctgagaccatacctgagcagcgaggaagatcggaagaagggaaagaaattcgctcggtaccagctgggcgacctgctgctgcacctggaaaagaagcacggcgaggactggggaaaggtgtacgacgaggcctgggagcggattgacaagaaagtggaaggcctgagcaagcacatcaagctggaagaggaacggagaagcgaggacgcccagagcaaggccgccctgaccgactggctgcgggctaaggccagcttcgtgatcgagggcctgaaggaggccgacaaggacgagttctgcagatgcgagctgaagctgcagaagtggtacggggacctgcggggaaagcccttcgccatcgaagccgagaacagcatcctggacatcagcggcttcagcaagcagtacaactgtgccttcatctggcagaaggacggcgtgaagaagctgaacctgtacctgatcatcaactacttcaagggcggcaagctgcggttcaagaagatcaaacctgaagccttcgaagccaacagattctacaccgtgatcaacaaaaagagcggcgagatcgtgcccatggaggtgaacttcaacttcgacgaccccaacctgatcatcctgcctctggcctttggcaagagacagggcagagaattcatctggaacgacctgctgtccctggaaaccggcagcctgaagctggccaacggaagagtgatcgagaagacactgtacaacagaagaacccggcaggatgagcctgccctgttcgtggccctgaccttcgagcggcgggaggtcctggactcctccaatatcaaaccaatgaacctgatcggcgtggcaagaggcgaaaacatccccgccgtgatcgccctgaccgaccccgagggctgcccactgagccggtttaaggatagcctgggaaacccaacccacatcctgagaatcggcgagagctataaggagaagcagcggaccatccaggccaagaaggaggtggagcagcggagagccggcggctacagccggaagtacgccagcaaagccaagaatctggcagacgatatggtgagaaacaccgctagagatctgctgtactacgccgtgacccaggatgccatgctgatcttcgccaacctgagccggggcttcggccggcagggcaagcggaccttcatggccgagagacagtacacacggatggaggactggctgaccgccaagctggcctacgagggcctgagcaagacctacctgtccaagacactggcccagtacacctccaagacatgcagcaactgtgggtttaccatcaccagcgccgactacgacagggtgctggagaagctgaagaagacagcaacaggctggatgaccacaattaacggcaaggagctgaaggtggagggccagattacctactacaacagatacaagagacagaacgtagtcaaggacctgtccgtcgagctggatagactgagcgaagaatctgtgaacaacgacatctcctcctggacaaagggcagaagcggagaagctctgagcctcctgaagaaaagattctcccatagacccgtgcaggagaagttcgtgtgcctgaactgcggcttcgagacacacgcagccgagcaagccgccctgaacatcgccagatcctggctgttcctgcggagccaggagtacaagaaataccagacaaacaagacaaccggcaacaccgataagagagccttcgtcgagacctggcagtccttttaccggaagaagcttaaggaggtgtggaaacctgccgtgcggtctggcggatctggcggaggctcctatggtgttcgaggacgtggccgtgtacttcagcagggaggagtggggcctgctggacagcgcccagagggccctgtacaggcaggtgatgctggagaacttcgccctggtggccagcctgggcctgagcgccagcaggcccaggatcatcctgcagctggagaggggcgaggagccctgggtgctgagcggcctggacgtggccctggccagggacgcccagaggaggcccagccccgcccagggatctggctccggcagcggccccaagaaaaagagaaaagtctaagctgccttctgcggggcttgccttctggccatgcccttcttctctcccttgcacctgtacctcttggtctttgaataaagcctgagtaggaaggctagcaaaaaaaaaaaaaaaaaaaaaaaaaaaaaaaaaaaaaaaaaaaaaaaaaaaaaaaaaaaaaaaaaaaaaaaaaaaaaaaa

SEQ ID NO: 15804 - RNA, 9485 nt, synthetic construct
  source 1..9485: mol_type = other RNA
aggaaataagagagaaaagaagagtaagaagaaatataagagccaccatggcccctaagaagaagcgtaaagtgagccggatggaacgcctcgtctacgaggtgcggcagaagtgcagaaacatcgaggacatctgcatctcctgcggatctctgaacgtgaccctggagcacccactgttcatcggcggcatgtgccagaactgtaaaaactgttttctggagtgtgcctatcaatacgacgatgacggctaccagagctactgcaccatctgttgcggcggaagagaggtgctgatgtgtggaaataacaactgctgccggtgcttctgcgtggaatgcgtggacctgctggtgggccccggcgccgcccaggccgctattaaggaagatccttggaactgctacatgtgcggccacaagggcacatacggcctgctgagacggagagaggactggcctagcagactgcagatgttcttcgccaataaccacgaccaggagttcgacccccctaaggtgtaccctcccgtccccgccgagaagagaaagcccatccgggtcctgagcctgttcgatggcatcgccaccggtctgctggtgctgaaggacctgggcatccaggtggataggtacattgcctccgaggtgtgcgaggactccatcaccgtgggaatggtgcgtcatcagggcaagatcatgtacgtgggcgacgtgcggagcgtgacacagaagcatatccaggagtggggccctttcgacctggtgatcggcggcagcccttgcaatgacctgagcatcgtgaacccagcccggaagggcctgtacgagggaaccggcagactgttcttcgagttttacagactgctgcacgacgcccggcctaaggaaggcgacgaccggcccttcttttggctgttcgagaatgtggtggccatgggagtcagcgacaagcgggatattagccggttcctggagagcaaccccgtgatgatcgatgccaaggaagtgagcgccgcccaccgggccagatacttctggggcaatctgcctggcatgaacagacccctggccagcaccgtgaacgacaagctggagctgcaggagtgcctggagcacggccggatcgccaagttcagcaaggtgagaaccatcaccacccgaagcaacagcatcaaacaaggcaaggaccagcactttcctgtgttcatgaacgagaaggaggacatcctgtggtgtaccgagatggagagagtgttcgggttcccagtccactacacagatgtcagcaacatgtctagactggccagacagagactgctgggaagaagctggtccgtccctgtgatcagacacctgttcgcccctctgaaggagtacttcgcctgcgtgagcagcggcaacagcaacgccaacagccggggccccagcttctctagcggcctggtgccactgtccctgagagggagccacatgggccccatggagatctacaaaaccgtgagcgcctggaagcggcagcctgtgcgcgtgctgagcctgtttcggaatatcgataaagtcctgaaaagcctgggattcctggagagcggctctggctccggcggtggcaccctgaagtacgtggaggatgtgacaaacgtggtcagacgggatgtggagaagtggggccccttcgatctggtgtacggcagcacccaacccctgggcagctcttgtgaccggtgccctggctggtacatgtttcagttccaccggatcctgcagtacgccctgccgagacaggagtcccagcggccattcttttggattttcatggacaacttgctgctgaccgaggatgaccaggaaactaccactcggttcctgcagaccgaagccgtgaccctgcaggacgtgagaggccgggactaccagaacgccatgcgggtgtggtccaacatccctggactgaaaagcaagcacgcacctctgacccctaaagaagaggagtacctgcaggcccaggtgcggagcagaagcaagctggacgcccctaaggtggatctgctggtgaagaattgcctcctgcccctgagagagtacttcaagtatttcagccagaatagtctgcccctgggaggcagcggcggcggcgccctggtgacatttgaggacgtcgccgtgcggttcacccaggaggaatgggctctgctggatccttctcagaaaatcctgtaccgggacgtgatgagagagacataccggaatctgacctccgtgggcatcaactgggaatgttgggaccttgaagcctgcttcagaagcctgggaagaaacctgagagtgcaggtggtgaagagaaagtgcgagctgaccaacagcggcccctgcgccgagggcggcccaagcagcggcgcccctcctcccagcggcggcagcccagccggctccccaacctctaccgaggagggcacctctgagtccgccacccccgagagcggccctggcacctccaccgagcccagcgagggcagcgcacccggcagccctgccggcagccccacctccacagaggagggaaccagcaccgagcccagcgaaggcagcgccccaggcaccagcaccgagcctagtgagcaggagattaaacggatcaacaagatcagaagaagacttgtgaaagacagcaacaccaagaaggccggcaagacaggccccatgaaaaccctgctggttagagtgatgacacccgatctgagagagcggctggaaaacctgagaaagaagcctgaaaatatcccccagcccatcagcaatacatctagagccaacctgaataagctgctgaccgattacaccgaaatgaagaaggcgatcctgcatgtgtactgggaagagttccagaaggaccctgtgggcctgatgagccgggtggcccagcctgccagcaagaagatcgatcagaacaagctgaaacctgagatggacgagaagggcaacctgaccaccgccggctttgcctgctctcagtgtggccagcccctgttcgtgtacaagctggagcaggtgtctgagaagggcaaggcttacaccaactacttcggacggtgcaatgtggccgagcacgaaaagctgatcctgctggcccagctgaagcccgagaaggatagcgacgaagccgtgacatatagcctgggaaagtttgggcagagggccctggatttctacagcattcatgtgaccaaggagtccacccaccccgtgaagcccctggcccagatcgccggaaacagatacgcctccggacctgtgggaaaggccctgagcgacgcatgtatgggcacaatcgcctccttcctgtctaagtaccaggacatcatcatcgaacaccagaaggtggtgaagggcaaccagaagagactggagagcctgcgggagctggccggcaaggaaaacctggaataccctagcgtgaccctgccacctcagcctcacaccaaggagggcgttgatgcctacaacgaagtgatcgcccgggtgcgaatgtgggtgaacctgaacctgtggcagaagctgaagctaagcagagatgatgccaagcctctgctgagactgaagggattcccttcctttcctctggtcgagagacaggccaacgaagtggactggtgggacatggtgtgtaacgtgaagaagctgatcaacgagaaaaaggaggatggcaaggtgttttggcagaatctggctggctacaagagacaggaagccctgagaccatacctgagcagcgaggaagatcggaagaagggaaagaaattcgctcggtaccagctgggcgacctgctgctgcacctggaaaagaagcacggcgaggactggggaaaggtgtacgacgaggcctgggagcggattgacaagaaagtggaaggcctgagcaagcacatcaagctggaagaggaacggagaagcgaggacgcccagagcaaggccgccctgaccgactggctgcgggctaaggccagcttcgtgatcgagggcctgaaggaggccgacaaggacgagttctgcagatgcgagctgaagctgcagaagtggtacggggacctgcggggaaagcccttcgccatcgaagccgagaacagcatcctggacatcagcggcttcagcaagcagtacaactgtgccttcatctggcagaaggacggcgtgaagaagctgaacctgtacctgatcatcaactacttcaagggcggcaagctgcggttcaagaagatcaaacctgaagccttcgaagccaacagattctacaccgtgatcaacaaaaagagcggcgagatcgtgcccatggaggtgaacttcaacttcgacgaccccaacctgatcatcctgcctctggcctttggcaagagacagggcagagaattcatctggaacgacctgctgtccctggaaaccggcagcctgaagctggccaacggaagagtgatcgagaagacactgtacaacagaagaacccggcaggatgagcctgccctgttcgtggccctgaccttcgagcggcgggaggtcctggactcctccaatatcaaaccaatgaacctgatcggcgtggcaagaggcgaaaacatccccgccgtgatcgccctgaccgaccccgagggctgcccactgagccggtttaaggatagcctgggaaacccaacccacatcctgagaatcggcgagagctataaggagaagcagcggaccatccaggccaagaaggaggtggagcagcggagagccggcggctacagccggaagtacgccagcaaagccaagaatctggcagacgatatggtgagaaacaccgctagagatctgctgtactacgccgtgacccaggatgccatgctgatcttcgccaacctgagccggggcttcggccggcagggcaagcggaccttcatggccgagagacagtacacacggatggaggactggctgaccgccaagctggcctacgagggcctgagcaagacctacctgtccaagacactggcccagtacacctccaagacatgcagcaactgtgggtttaccatcaccagcgccgactacgacagggtgctggagaagctgaagaagacagcaacaggctggatgaccacaattaacggcaaggagctgaaggtggagggccagattacctactacaacagatacaagagacagaacgtagtcaaggacctgtccgtcgagctggatagactgagcgaagaatctgtgaacaacgacatctcctcctggacaaagggcagaagcggagaagctctgagcctcctgaagaaaagattctcccatagacccgtgcaggagaagttcgtgtgcctgaactgcggcttcgagacacacgcagccgagcaagccgccctgaacatcgccagatcctggctgttcctgcggagccaggagtacaagaaataccagacaaacaagacaaccggcaacaccgataagagagccttcgtcgagacctggcagtccttttaccggaagaagcttaaggaggtgtggaaacctgccgtgcggtctggcggatctggcggaggctccagcatcaccttcaaggacgtggtggtggacttcacccaggaggagtggtgcctgctggaccccagccagaaggagctgtacagggaggtgatgctggagaacgtgcagaacctgttcttcgtggaggccgagaccaacttcgaggtgaaggagatgagcaccaagatgaggctgttcgtggagggcagcaacagccccaggggcatgaagaggaacccctgcgacttcctgttcagggagatcggcggcccaagcagcggcgcccctcctcccagcggcggcagcccagccggctccccaacctctaccgaggagggcacctctgagtccgccacccccgagagcggccctggcacctccaccgagcccagcgagggcagcgcacccggcagccctgccggcagccccacctccacagaggagggaaccagcaccgagcccagcgaaggcagcgccccaggcaccagcaccgagcctagtgagcaggagattaaacggatcaacaagatcagaagaagacttgtgaaagacagcaacaccaagaaggccggcaagacaggccccatgaaaaccctgctggttagagtgatgacacccgatctgagagagcggctggaaaacctgagaaagaagcctgaaaatatcccccagcccatcagcaatacatctagagccaacctgaataagctgctgaccgattacaccgaaatgaagaaggcgatcctgcatgtgtactgggaagagttccagaaggaccctgtgggcctgatgagccgggtggcccagcctgccagcaagaagatcgatcagaacaagctgaaacctgagatggacgagaagggcaacctgaccaccgccggctttgcctgctctcagtgtggccagcccctgttcgtgtacaagctggagcaggtgtctgagaagggcaaggcttacaccaactacttcggacggtgcaatgtggccgagcacgaaaagctgatcctgctggcccagctgaagcccgagaaggatagcgacgaagccgtgacatatagcctgggaaagtttgggcagagggccctggatttctacagcattcatgtgaccaaggagtccacccaccccgtgaagcccctggcccagatcgccggaaacagatacgcctccggacctgtgggaaaggccctgagcgacgcatgtatgggcacaatcgcctccttcctgtctaagtaccaggacatcatcatcgaacaccagaaggtggtgaagggcaaccagaagagactggagagcctgcgggagctggccggcaaggaaaacctggaataccctagcgtgaccctgccacctcagcctcacaccaaggagggcgttgatgcctacaacgaagtgatcgcccgggtgcgaatgtgggtgaacctgaacctgtggcagaagctgaagctaagcagagatgatgccaagcctctgctgagactgaagggattcccttcctttcctctggtcgagagacaggccaacgaagtggactggtgggacatggtgtgtaacgtgaagaagctgatcaacgagaaaaaggaggatggcaaggtgttttggcagaatctggctggctacaagagacaggaagccctgagaccatacctgagcagcgaggaagatcggaagaagggaaagaaattcgctcggtaccagctgggcgacctgctgctgcacctggaaaagaagcacggcgaggactggggaaaggtgtacgacgaggcctgggagcggattgacaagaaagtggaaggcctgagcaagcacatcaagctggaagaggaacggagaagcgaggacgcccagagcaaggccgccctgaccgactggctgcgggctaaggccagcttcgtgatcgagggcctgaaggaggccgacaaggacgagttctgcagatgcgagctgaagctgcagaagtggtacggggacctgcggggaaagcccttcgccatcgaagccgagaacagcatcctggacatcagcggcttcagcaagcagtacaactgtgccttcatctggcagaaggacggcgtgaagaagctgaacctgtacctgatcatcaactacttcaagggcggcaagctgcggttcaagaagatcaaacctgaagccttcgaagccaacagattctacaccgtgatcaacaaaaagagcggcgagatcgtgcccatggaggtgaacttcaacttcgacgaccccaacctgatcatcctgcctctggcctttggcaagagacagggcagagaattcatctggaacgacctgctgtccctggaaaccggcagcctgaagctggccaacggaagagtgatcgagaagacactgtacaacagaagaacccggcaggatgagcctgccctgttcgtggccctgaccttcgagcggcgggaggtcctggactcctccaatatcaaaccaatgaacctgatcggcgtggcaagaggcgaaaacatccccgccgtgatcgccctgaccgaccccgagggctgcccactgagccggtttaaggatagcctgggaaacccaacccacatcctgagaatcggcgagagctataaggagaagcagcggaccatccaggccaagaaggaggtggagcagcggagagccggcggctacagccggaagtacgccagcaaagccaagaatctggcagacgatatggtgagaaacaccgctagagatctgctgtactacgccgtgacccaggatgccatgctgatcttcgccaacctgagccggggcttcggccggcagggcaagcggaccttcatggccgagagacagtacacacggatggaggactggctgaccgccaagctggcctacgagggcctgagcaagacctacctgtccaagacactggcccagtacacctccaagacatgcagcaactgtgggtttaccatcaccagcgccgactacgacagggtgctggagaagctgaagaagacagcaacaggctggatgaccacaattaacggcaaggagctgaaggtggagggccagattacctactacaacagatacaagagacagaacgtagtcaaggacctgtccgtcgagctggatagactgagcgaagaatctgtgaacaacgacatctcctcctggacaaagggcagaagcggagaagctctgagcctcctgaagaaaagattctcccatagacccgtgcaggagaagttcgtgtgcctgaactgcggcttcgagacacacgcagccgagcaagccgccctgaacatcgccagatcctggctgttcctgcggagccaggagtacaagaaataccagacaaacaagacaaccggcaacaccgataagagagccttcgtcgagacctggcagtccttttaccggaagaagcttaaggaggtgtggaaacctgccgtgcggtctggcggatctggcggaggctcctagcatcaccttcaaggacgtggtggtggacttcacccaggaggagtggtgcctgctggaccccagccagaaggagctgtacagggaggtgatgctggagaacgtgcagaacctgttcttcgtggaggccgagaccaacttcgaggtgaaggagatgagcaccaagatgaggctgttcgtggagggcagcaacagccccaggggcatgaagaggaacccctgcgacttcctgttcagggagatcggatctggctccggcagcggccccaagaaaaagagaaaagtctaagctgccttctgcggggcttgccttctggccatgcccttcttctctcccttgcacctgtacctcttggtctttgaataaagcctgagtaggaaggctagcaaaaaaaaaaaaaaaaaaaaaaaaaaaaaaaaaaaaaaaaaaaaaaaaaaaaaaaaaaaaaaaaaaaaaaaaaaaaaaaa

SEQ ID NO: 15805 - RNA, 9485 nt, synthetic construct
  source 1..9485: mol_type = other RNA
aggaaataagagagaaaagaagagtaagaagaaatataagagccaccatggcccctaagaagaagcgtaaagtgagccggatggaacgcctcgtctacgaggtgcggcagaagtgcagaaacatcgaggacatctgcatctcctgcggatctctgaacgtgaccctggagcacccactgttcatcggcggcatgtgccagaactgtaaaaactgttttctggagtgtgcctatcaatacgacgatgacggctaccagagctactgcaccatctgttgcggcggaagagaggtgctgatgtgtggaaataacaactgctgccggtgcttctgcgtggaatgcgtggacctgctggtgggccccggcgccgcccaggccgctattaaggaagatccttggaactgctacatgtgcggccacaagggcacatacggcctgctgagacggagagaggactggcctagcagactgcagatgttcttcgccaataaccacgaccaggagttcgacccccctaaggtgtaccctcccgtccccgccgagaagagaaagcccatccgggtcctgagcctgttcgatggcatcgccaccggtctgctggtgctgaaggacctgggcatccaggtggataggtacattgcctccgaggtgtgcgaggactccatcaccgtgggaatggtgcgtcatcagggcaagatcatgtacgtgggcgacgtgcggagcgtgacacagaagcatatccaggagtggggccctttcgacctggtgatcggcggcagcccttgcaatgacctgagcatcgtgaacccagcccggaagggcctgtacgagggaaccggcagactgttcttcgagttttacagactgctgcacgacgcccggcctaaggaaggcgacgaccggcccttcttttggctgttcgagaatgtggtggccatgggagtcagcgacaagcgggatattagccggttcctggagagcaaccccgtgatgatcgatgccaaggaagtgagcgccgcccaccgggccagatacttctggggcaatctgcctggcatgaacagacccctggccagcaccgtgaacgacaagctggagctgcaggagtgcctggagcacggccggatcgccaagttcagcaaggtgagaaccatcaccacccgaagcaacagcatcaaacaaggcaaggaccagcactttcctgtgttcatgaacgagaaggaggacatcctgtggtgtaccgagatggagagagtgttcgggttcccagtccactacacagatgtcagcaacatgtctagactggccagacagagactgctgggaagaagctggtccgtccctgtgatcagacacctgttcgcccctctgaaggagtacttcgcctgcgtgagcagcggcaacagcaacgccaacagccggggccccagcttctctagcggcctggtgccactgtccctgagagggagccacatgggccccatggagatctacaaaaccgtgagcgcctggaagcggcagcctgtgcgcgtgctgagcctgtttcggaatatcgataaagtcctgaaaagcctgggattcctggagagcggctctggctccggcggtggcaccctgaagtacgtggaggatgtgacaaacgtggtcagacgggatgtggagaagtggggccccttcgatctggtgtacggcagcacccaacccctgggcagctcttgtgaccggtgccctggctggtacatgtttcagttccaccggatcctgcagtacgccctgccgagacaggagtcccagcggccattcttttggattttcatggacaacttgctgctgaccgaggatgaccaggaaactaccactcggttcctgcagaccgaagccgtgaccctgcaggacgtgagaggccgggactaccagaacgccatgcgggtgtggtccaacatccctggactgaaaagcaagcacgcacctctgacccctaaagaagaggagtacctgcaggcccaggtgcggagcagaagcaagctggacgcccctaaggtggatctgctggtgaagaattgcctcctgcccctgagagagtacttcaagtatttcagccagaatagtctgcccctgggaggcagcggcggcggcgccctggtgacatttgaggacgtcgccgtgcggttcacccaggaggaatgggctctgctggatccttctcagaaaatcctgtaccgggacgtgatgagagagacataccggaatctgacctccgtgggcatcaactgggaatgttgggaccttgaagcctgcttcagaagcctgggaagaaacctgagagtgcaggtggtgaagagaaagtgcgagctgaccaacagcggcccctgcgccgagggcggcccaagcagcggcgcccctcctcccagcggcggcagcccagccggctccccaacctctaccgaggagggcacctctgagtccgccacccccgagagcggccctggcacctccaccgagcccagcgagggcagcgcacccggcagccctgccggcagccccacctccacagaggagggaaccagcaccgagcccagcgaaggcagcgccccaggcaccagcaccgagcctagtgagcaggagattaaacggatcaacaagatcagaagaagacttgtgaaagacagcaacaccaagaaggccggcaagacaggccccatgaaaaccctgctggttagagtgatgacacccgatctgagagagcggctggaaaacctgagaaagaagcctgaaaatatcccccagcccatcagcaatacatctagagccaacctgaataagctgctgaccgattacaccgaaatgaagaaggcgatcctgcatgtgtactgggaagagttccagaaggaccctgtgggcctgatgagccgggtggcccagcctgccagcaagaagatcgatcagaacaagctgaaacctgagatggacgagaagggcaacctgaccaccgccggctttgcctgctctcagtgtggccagcccctgttcgtgtacaagctggagcaggtgtctgagaagggcaaggcttacaccaactacttcggacggtgcaatgtggccgagcacgaaaagctgatcctgctggcccagctgaagcccgagaaggatagcgacgaagccgtgacatatagcctgggaaagtttgggcagagggccctggatttctacagcattcatgtgaccaaggagtccacccaccccgtgaagcccctggcccagatcgccggaaacagatacgcctccggacctgtgggaaaggccctgagcgacgcatgtatgggcacaatcgcctccttcctgtctaagtaccaggacatcatcatcgaacaccagaaggtggtgaagggcaaccagaagagactggagagcctgcgggagctggccggcaaggaaaacctggaataccctagcgtgaccctgccacctcagcctcacaccaaggagggcgttgatgcctacaacgaagtgatcgcccgggtgcgaatgtgggtgaacctgaacctgtggcagaagctgaagctaagcagagatgatgccaagcctctgctgagactgaagggattcccttcctttcctctggtcgagagacaggccaacgaagtggactggtgggacatggtgtgtaacgtgaagaagctgatcaacgagaaaaaggaggatggcaaggtgttttggcagaatctggctggctacaagagacaggaagccctgagaccatacctgagcagcgaggaagatcggaagaagggaaagaaattcgctcggtaccagctgggcgacctgctgctgcacctggaaaagaagcacggcgaggactggggaaaggtgtacgacgaggcctgggagcggattgacaagaaagtggaaggcctgagcaagcacatcaagctggaagaggaacggagaagcgaggacgcccagagcaaggccgccctgaccgactggctgcgggctaaggccagcttcgtgatcgagggcctgaaggaggccgacaaggacgagttctgcagatgcgagctgaagctgcagaagtggtacggggacctgcggggaaagcccttcgccatcgaagccgagaacagcatcctggacatcagcggcttcagcaagcagtacaactgtgccttcatctggcagaaggacggcgtgaagaagctgaacctgtacctgatcatcaactacttcaagggcggcaagctgcggttcaagaagatcaaacctgaagccttcgaagccaacagattctacaccgtgatcaacaaaaagagcggcgagatcgtgcccatggaggtgaacttcaacttcgacgaccccaacctgatcatcctgcctctggcctttggcaagagacagggcagagaattcatctggaacgacctgctgtccctggaaaccggcagcctgaagctggccaacggaagagtgatcgagaagacactgtacaacagaagaacccggcaggatgagcctgccctgttcgtggccctgaccttcgagcggcgggaggtcctggactcctccaatatcaaaccaatgaacctgatcggcgtggcaagaggcgaaaacatccccgccgtgatcgccctgaccgaccccgagggctgcccactgagccggtttaaggatagcctgggaaacccaacccacatcctgagaatcggcgagagctataaggagaagcagcggaccatccaggccaagaaggaggtggagcagcggagagccggcggctacagccggaagtacgccagcaaagccaagaatctggcagacgatatggtgagaaacaccgctagagatctgctgtactacgccgtgacccaggatgccatgctgatcttcgccaacctgagccggggcttcggccggcagggcaagcggaccttcatggccgagagacagtacacacggatggaggactggctgaccgccaagctggcctacgagggcctgagcaagacctacctgtccaagacactggcccagtacacctccaagacatgcagcaactgtgggtttaccatcaccagcgccgactacgacagggtgctggagaagctgaagaagacagcaacaggctggatgaccacaattaacggcaaggagctgaaggtggagggccagattacctactacaacagatacaagagacagaacgtagtcaaggacctgtccgtcgagctggatagactgagcgaagaatctgtgaacaacgacatctcctcctggacaaagggcagaagcggagaagctctgagcctcctgaagaaaagattctcccatagacccgtgcaggagaagttcgtgtgcctgaactgcggcttcgagacacacgcagccgagcaagccgccctgaacatcgccagatcctggctgttcctgcggagccaggagtacaagaaataccagacaaacaagacaaccggcaacaccgataagagagccttcgtcgagacctggcagtccttttaccggaagaagcttaaggaggtgtggaaacctgccgtgcggtctggcggatctggcggaggctcccagagcctggtgaccttcggcgacgtggccgtggacttcagcagggaggagtgggagtggctgaacagcgcccagaggaccctgcacagggacgtgatgctggagaactacaggaacctggtgagcctgggcctgtgcgtgagcaagcccgacatgatcagcagcctggagcagaggaaggagccctggatgctgaagaggaagctgaccaggggcaggtgccccgacctgaagaccatgcagggcggcccaagcagcggcgcccctcctcccagcggcggcagcccagccggctccccaacctctaccgaggagggcacctctgagtccgccacccccgagagcggccctggcacctccaccgagcccagcgagggcagcgcacccggcagccctgccggcagccccacctccacagaggagggaaccagcaccgagcccagcgaaggcagcgccccaggcaccagcaccgagcctagtgagcaggagattaaacggatcaacaagatcagaagaagacttgtgaaagacagcaacaccaagaaggccggcaagacaggccccatgaaaaccctgctggttagagtgatgacacccgatctgagagagcggctggaaaacctgagaaagaagcctgaaaatatcccccagcccatcagcaatacatctagagccaacctgaataagctgctgaccgattacaccgaaatgaagaaggcgatcctgcatgtgtactgggaagagttccagaaggaccctgtgggcctgatgagccgggtggcccagcctgccagcaagaagatcgatcagaacaagctgaaacctgagatggacgagaagggcaacctgaccaccgccggctttgcctgctctcagtgtggccagcccctgttcgtgtacaagctggagcaggtgtctgagaagggcaaggcttacaccaactacttcggacggtgcaatgtggccgagcacgaaaagctgatcctgctggcccagctgaagcccgagaaggatagcgacgaagccgtgacatatagcctgggaaagtttgggcagagggccctggatttctacagcattcatgtgaccaaggagtccacccaccccgtgaagcccctggcccagatcgccggaaacagatacgcctccggacctgtgggaaaggccctgagcgacgcatgtatgggcacaatcgcctccttcctgtctaagtaccaggacatcatcatcgaacaccagaaggtggtgaagggcaaccagaagagactggagagcctgcgggagctggccggcaaggaaaacctggaataccctagcgtgaccctgccacctcagcctcacaccaaggagggcgttgatgcctacaacgaagtgatcgcccgggtgcgaatgtgggtgaacctgaacctgtggcagaagctgaagctaagcagagatgatgccaagcctctgctgagactgaagggattcccttcctttcctctggtcgagagacaggccaacgaagtggactggtgggacatggtgtgtaacgtgaagaagctgatcaacgagaaaaaggaggatggcaaggtgttttggcagaatctggctggctacaagagacaggaagccctgagaccatacctgagcagcgaggaagatcggaagaagggaaagaaattcgctcggtaccagctgggcgacctgctgctgcacctggaaaagaagcacggcgaggactggggaaaggtgtacgacgaggcctgggagcggattgacaagaaagtggaaggcctgagcaagcacatcaagctggaagaggaacggagaagcgaggacgcccagagcaaggccgccctgaccgactggctgcgggctaaggccagcttcgtgatcgagggcctgaaggaggccgacaaggacgagttctgcagatgcgagctgaagctgcagaagtggtacggggacctgcggggaaagcccttcgccatcgaagccgagaacagcatcctggacatcagcggcttcagcaagcagtacaactgtgccttcatctggcagaaggacggcgtgaagaagctgaacctgtacctgatcatcaactacttcaagggcggcaagctgcggttcaagaagatcaaacctgaagccttcgaagccaacagattctacaccgtgatcaacaaaaagagcggcgagatcgtgcccatggaggtgaacttcaacttcgacgaccccaacctgatcatcctgcctctggcctttggcaagagacagggcagagaattcatctggaacgacctgctgtccctggaaaccggcagcctgaagctggccaacggaagagtgatcgagaagacactgtacaacagaagaacccggcaggatgagcctgccctgttcgtggccctgaccttcgagcggcgggaggtcctggactcctccaatatcaaaccaatgaacctgatcggcgtggcaagaggcgaaaacatccccgccgtgatcgccctgaccgaccccgagggctgcccactgagccggtttaaggatagcctgggaaacccaacccacatcctgagaatcggcgagagctataaggagaagcagcggaccatccaggccaagaaggaggtggagcagcggagagccggcggctacagccggaagtacgccagcaaagccaagaatctggcagacgatatggtgagaaacaccgctagagatctgctgtactacgccgtgacccaggatgccatgctgatcttcgccaacctgagccggggcttcggccggcagggcaagcggaccttcatggccgagagacagtacacacggatggaggactggctgaccgccaagctggcctacgagggcctgagcaagacctacctgtccaagacactggcccagtacacctccaagacatgcagcaactgtgggtttaccatcaccagcgccgactacgacagggtgctggagaagctgaagaagacagcaacaggctggatgaccacaattaacggcaaggagctgaaggtggagggccagattacctactacaacagatacaagagacagaacgtagtcaaggacctgtccgtcgagctggatagactgagcgaagaatctgtgaacaacgacatctcctcctggacaaagggcagaagcggagaagctctgagcctcctgaagaaaagattctcccatagacccgtgcaggagaagttcgtgtgcctgaactgcggcttcgagacacacgcagccgagcaagccgccctgaacatcgccagatcctggctgttcctgcggagccaggagtacaagaaataccagacaaacaagacaaccggcaacaccgataagagagccttcgtcgagacctggcagtccttttaccggaagaagcttaaggaggtgtggaaacctgccgtgcggtctggcggatctggcggaggctcctcagagcctggtgaccttcggcgacgtggccgtggacttcagcagggaggagtgggagtggctgaacagcgcccagaggaccctgcacagggacgtgatgctggagaactacaggaacctggtgagcctgggcctgtgcgtgagcaagcccgacatgatcagcagcctggagcagaggaaggagccctggatgctgaagaggaagctgaccaggggcaggtgccccgacctgaagaccatgcagggatctggctccggcagcggccccaagaaaaagagaaaagtctaagctgccttctgcggggcttgccttctggccatgcccttcttctctcccttgcacctgtacctcttggtctttgaataaagcctgagtaggaaggctagcaaaaaaaaaaaaaaaaaaaaaaaaaaaaaaaaaaaaaaaaaaaaaaaaaaaaaaaaaaaaaaaaaaaaaaaaaaaaaaaa

SEQ ID NO: 15806 - RNA, 9485 nt, synthetic construct
  source 1..9485: mol_type = other RNA
aggaaataagagagaaaagaagagtaagaagaaatataagagccaccatggcccctaagaagaagcgtaaagtgagccggatggaacgcctcgtctacgaggtgcggcagaagtgcagaaacatcgaggacatctgcatctcctgcggatctctgaacgtgaccctggagcacccactgttcatcggcggcatgtgccagaactgtaaaaactgttttctggagtgtgcctatcaatacgacgatgacggctaccagagctactgcaccatctgttgcggcggaagagaggtgctgatgtgtggaaataacaactgctgccggtgcttctgcgtggaatgcgtggacctgctggtgggccccggcgccgcccaggccgctattaaggaagatccttggaactgctacatgtgcggccacaagggcacatacggcctgctgagacggagagaggactggcctagcagactgcagatgttcttcgccaataaccacgaccaggagttcgacccccctaaggtgtaccctcccgtccccgccgagaagagaaagcccatccgggtcctgagcctgttcgatggcatcgccaccggtctgctggtgctgaaggacctgggcatccaggtggataggtacattgcctccgaggtgtgcgaggactccatcaccgtgggaatggtgcgtcatcagggcaagatcatgtacgtgggcgacgtgcggagcgtgacacagaagcatatccaggagtggggccctttcgacctggtgatcggcggcagcccttgcaatgacctgagcatcgtgaacccagcccggaagggcctgtacgagggaaccggcagactgttcttcgagttttacagactgctgcacgacgcccggcctaaggaaggcgacgaccggcccttcttttggctgttcgagaatgtggtggccatgggagtcagcgacaagcgggatattagccggttcctggagagcaaccccgtgatgatcgatgccaaggaagtgagcgccgcccaccgggccagatacttctggggcaatctgcctggcatgaacagacccctggccagcaccgtgaacgacaagctggagctgcaggagtgcctggagcacggccggatcgccaagttcagcaaggtgagaaccatcaccacccgaagcaacagcatcaaacaaggcaaggaccagcactttcctgtgttcatgaacgagaaggaggacatcctgtggtgtaccgagatggagagagtgttcgggttcccagtccactacacagatgtcagcaacatgtctagactggccagacagagactgctgggaagaagctggtccgtccctgtgatcagacacctgttcgcccctctgaaggagtacttcgcctgcgtgagcagcggcaacagcaacgccaacagccggggccccagcttctctagcggcctggtgccactgtccctgagagggagccacatgggccccatggagatctacaaaaccgtgagcgcctggaagcggcagcctgtgcgcgtgctgagcctgtttcggaatatcgataaagtcctgaaaagcctgggattcctggagagcggctctggctccggcggtggcaccctgaagtacgtggaggatgtgacaaacgtggtcagacgggatgtggagaagtggggccccttcgatctggtgtacggcagcacccaacccctgggcagctcttgtgaccggtgccctggctggtacatgtttcagttccaccggatcctgcagtacgccctgccgagacaggagtcccagcggccattcttttggattttcatggacaacttgctgctgaccgaggatgaccaggaaactaccactcggttcctgcagaccgaagccgtgaccctgcaggacgtgagaggccgggactaccagaacgccatgcgggtgtggtccaacatccctggactgaaaagcaagcacgcacctctgacccctaaagaagaggagtacctgcaggcccaggtgcggagcagaagcaagctggacgcccctaaggtggatctgctggtgaagaattgcctcctgcccctgagagagtacttcaagtatttcagccagaatagtctgcccctgggaggcagcggcggcggcgccctggtgacatttgaggacgtcgccgtgcggttcacccaggaggaatgggctctgctggatccttctcagaaaatcctgtaccgggacgtgatgagagagacataccggaatctgacctccgtgggcatcaactgggaatgttgggaccttgaagcctgcttcagaagcctgggaagaaacctgagagtgcaggtggtgaagagaaagtgcgagctgaccaacagcggcccctgcgccgagggcggcccaagcagcggcgcccctcctcccagcggcggcagcccagccggctccccaacctctaccgaggagggcacctctgagtccgccacccccgagagcggccctggcacctccaccgagcccagcgagggcagcgcacccggcagccctgccggcagccccacctccacagaggagggaaccagcaccgagcccagcgaaggcagcgccccaggcaccagcaccgagcctagtgagcaggagattaaacggatcaacaagatcagaagaagacttgtgaaagacagcaacaccaagaaggccggcaagacaggccccatgaaaaccctgctggttagagtgatgacacccgatctgagagagcggctggaaaacctgagaaagaagcctgaaaatatcccccagcccatcagcaatacatctagagccaacctgaataagctgctgaccgattacaccgaaatgaagaaggcgatcctgcatgtgtactgggaagagttccagaaggaccctgtgggcctgatgagccgggtggcccagcctgccagcaagaagatcgatcagaacaagctgaaacctgagatggacgagaagggcaacctgaccaccgccggctttgcctgctctcagtgtggccagcccctgttcgtgtacaagctggagcaggtgtctgagaagggcaaggcttacaccaactacttcggacggtgcaatgtggccgagcacgaaaagctgatcctgctggcccagctgaagcccgagaaggatagcgacgaagccgtgacatatagcctgggaaagtttgggcagagggccctggatttctacagcattcatgtgaccaaggagtccacccaccccgtgaagcccctggcccagatcgccggaaacagatacgcctccggacctgtgggaaaggccctgagcgacgcatgtatgggcacaatcgcctccttcctgtctaagtaccaggacatcatcatcgaacaccagaaggtggtgaagggcaaccagaagagactggagagcctgcgggagctggccggcaaggaaaacctggaataccctagcgtgaccctgccacctcagcctcacaccaaggagggcgttgatgcctacaacgaagtgatcgcccgggtgcgaatgtgggtgaacctgaacctgtggcagaagctgaagctaagcagagatgatgccaagcctctgctgagactgaagggattcccttcctttcctctggtcgagagacaggccaacgaagtggactggtgggacatggtgtgtaacgtgaagaagctgatcaacgagaaaaaggaggatggcaaggtgttttggcagaatctggctggctacaagagacaggaagccctgagaccatacctgagcagcgaggaagatcggaagaagggaaagaaattcgctcggtaccagctgggcgacctgctgctgcacctggaaaagaagcacggcgaggactggggaaaggtgtacgacgaggcctgggagcggattgacaagaaagtggaaggcctgagcaagcacatcaagctggaagaggaacggagaagcgaggacgcccagagcaaggccgccctgaccgactggctgcgggctaaggccagcttcgtgatcgagggcctgaaggaggccgacaaggacgagttctgcagatgcgagctgaagctgcagaagtggtacggggacctgcggggaaagcccttcgccatcgaagccgagaacagcatcctggacatcagcggcttcagcaagcagtacaactgtgccttcatctggcagaaggacggcgtgaagaagctgaacctgtacctgatcatcaactacttcaagggcggcaagctgcggttcaagaagatcaaacctgaagccttcgaagccaacagattctacaccgtgatcaacaaaaagagcggcgagatcgtgcccatggaggtgaacttcaacttcgacgaccccaacctgatcatcctgcctctggcctttggcaagagacagggcagagaattcatctggaacgacctgctgtccctggaaaccggcagcctgaagctggccaacggaagagtgatcgagaagacactgtacaacagaagaacccggcaggatgagcctgccctgttcgtggccctgaccttcgagcggcgggaggtcctggactcctccaatatcaaaccaatgaacctgatcggcgtggcaagaggcgaaaacatccccgccgtgatcgccctgaccgaccccgagggctgcccactgagccggtttaaggatagcctgggaaacccaacccacatcctgagaatcggcgagagctataaggagaagcagcggaccatccaggccaagaaggaggtggagcagcggagagccggcggctacagccggaagtacgccagcaaagccaagaatctggcagacgatatggtgagaaacaccgctagagatctgctgtactacgccgtgacccaggatgccatgctgatcttcgccaacctgagccggggcttcggccggcagggcaagcggaccttcatggccgagagacagtacacacggatggaggactggctgaccgccaagctggcctacgagggcctgagcaagacctacctgtccaagacactggcccagtacacctccaagacatgcagcaactgtgggtttaccatcaccagcgccgactacgacagggtgctggagaagctgaagaagacagcaacaggctggatgaccacaattaacggcaaggagctgaaggtggagggccagattacctactacaacagatacaagagacagaacgtagtcaaggacctgtccgtcgagctggatagactgagcgaagaatctgtgaacaacgacatctcctcctggacaaagggcagaagcggagaagctctgagcctcctgaagaaaagattctcccatagacccgtgcaggagaagttcgtgtgcctgaactgcggcttcgagacacacgcagccgagcaagccgccctgaacatcgccagatcctggctgttcctgcggagccaggagtacaagaaataccagacaaacaagacaaccggcaacaccgataagagagccttcgtcgagacctggcagtccttttaccggaagaagcttaaggaggtgtggaaacctgccgtgcggtctggcggatctggcggaggctccccccagaagagcgtgaccttcgaggacgtggccgtgtacttcacccccaccgagtgggacggcctgagccccgcccagagggccctgtacagggacgtgatgctggagaactacggcaacgtggccagcctgggcttccccctgatcaagcccgccgtgatcctgcagctggagggcggcggcgagctgggcggccccagccccctggccgccgagaccggcaccgacccccccggcctgtggggcggcccaagcagcggcgcccctcctcccagcggcggcagcccagccggctccccaacctctaccgaggagggcacctctgagtccgccacccccgagagcggccctggcacctccaccgagcccagcgagggcagcgcacccggcagccctgccggcagccccacctccacagaggagggaaccagcaccgagcccagcgaaggcagcgccccaggcaccagcaccgagcctagtgagcaggagattaaacggatcaacaagatcagaagaagacttgtgaaagacagcaacaccaagaaggccggcaagacaggccccatgaaaaccctgctggttagagtgatgacacccgatctgagagagcggctggaaaacctgagaaagaagcctgaaaatatcccccagcccatcagcaatacatctagagccaacctgaataagctgctgaccgattacaccgaaatgaagaaggcgatcctgcatgtgtactgggaagagttccagaaggaccctgtgggcctgatgagccgggtggcccagcctgccagcaagaagatcgatcagaacaagctgaaacctgagatggacgagaagggcaacctgaccaccgccggctttgcctgctctcagtgtggccagcccctgttcgtgtacaagctggagcaggtgtctgagaagggcaaggcttacaccaactacttcggacggtgcaatgtggccgagcacgaaaagctgatcctgctggcccagctgaagcccgagaaggatagcgacgaagccgtgacatatagcctgggaaagtttgggcagagggccctggatttctacagcattcatgtgaccaaggagtccacccaccccgtgaagcccctggcccagatcgccggaaacagatacgcctccggacctgtgggaaaggccctgagcgacgcatgtatgggcacaatcgcctccttcctgtctaagtaccaggacatcatcatcgaacaccagaaggtggtgaagggcaaccagaagagactggagagcctgcgggagctggccggcaaggaaaacctggaataccctagcgtgaccctgccacctcagcctcacaccaaggagggcgttgatgcctacaacgaagtgatcgcccgggtgcgaatgtgggtgaacctgaacctgtggcagaagctgaagctaagcagagatgatgccaagcctctgctgagactgaagggattcccttcctttcctctggtcgagagacaggccaacgaagtggactggtgggacatggtgtgtaacgtgaagaagctgatcaacgagaaaaaggaggatggcaaggtgttttggcagaatctggctggctacaagagacaggaagccctgagaccatacctgagcagcgaggaagatcggaagaagggaaagaaattcgctcggtaccagctgggcgacctgctgctgcacctggaaaagaagcacggcgaggactggggaaaggtgtacgacgaggcctgggagcggattgacaagaaagtggaaggcctgagcaagcacatcaagctggaagaggaacggagaagcgaggacgcccagagcaaggccgccctgaccgactggctgcgggctaaggccagcttcgtgatcgagggcctgaaggaggccgacaaggacgagttctgcagatgcgagctgaagctgcagaagtggtacggggacctgcggggaaagcccttcgccatcgaagccgagaacagcatcctggacatcagcggcttcagcaagcagtacaactgtgccttcatctggcagaaggacggcgtgaagaagctgaacctgtacctgatcatcaactacttcaagggcggcaagctgcggttcaagaagatcaaacctgaagccttcgaagccaacagattctacaccgtgatcaacaaaaagagcggcgagatcgtgcccatggaggtgaacttcaacttcgacgaccccaacctgatcatcctgcctctggcctttggcaagagacagggcagagaattcatctggaacgacctgctgtccctggaaaccggcagcctgaagctggccaacggaagagtgatcgagaagacactgtacaacagaagaacccggcaggatgagcctgccctgttcgtggccctgaccttcgagcggcgggaggtcctggactcctccaatatcaaaccaatgaacctgatcggcgtggcaagaggcgaaaacatccccgccgtgatcgccctgaccgaccccgagggctgcccactgagccggtttaaggatagcctgggaaacccaacccacatcctgagaatcggcgagagctataaggagaagcagcggaccatccaggccaagaaggaggtggagcagcggagagccggcggctacagccggaagtacgccagcaaagccaagaatctggcagacgatatggtgagaaacaccgctagagatctgctgtactacgccgtgacccaggatgccatgctgatcttcgccaacctgagccggggcttcggccggcagggcaagcggaccttcatggccgagagacagtacacacggatggaggactggctgaccgccaagctggcctacgagggcctgagcaagacctacctgtccaagacactggcccagtacacctccaagacatgcagcaactgtgggtttaccatcaccagcgccgactacgacagggtgctggagaagctgaagaagacagcaacaggctggatgaccacaattaacggcaaggagctgaaggtggagggccagattacctactacaacagatacaagagacagaacgtagtcaaggacctgtccgtcgagctggatagactgagcgaagaatctgtgaacaacgacatctcctcctggacaaagggcagaagcggagaagctctgagcctcctgaagaaaagattctcccatagacccgtgcaggagaagttcgtgtgcctgaactgcggcttcgagacacacgcagccgagcaagccgccctgaacatcgccagatcctggctgttcctgcggagccaggagtacaagaaataccagacaaacaagacaaccggcaacaccgataagagagccttcgtcgagacctggcagtccttttaccggaagaagcttaaggaggtgtggaaacctgccgtgcggtctggcggatctggcggaggctcctccccagaagagcgtgaccttcgaggacgtggccgtgtacttcacccccaccgagtgggacggcctgagccccgcccagagggccctgtacagggacgtgatgctggagaactacggcaacgtggccagcctgggcttccccctgatcaagcccgccgtgatcctgcagctggagggcggcggcgagctgggcggccccagccccctggccgccgagaccggcaccgacccccccggcctgtggggatctggctccggcagcggccccaagaaaaagagaaaagtctaagctgccttctgcggggcttgccttctggccatgcccttcttctctcccttgcacctgtacctcttggtctttgaataaagcctgagtaggaaggctagcaaaaaaaaaaaaaaaaaaaaaaaaaaaaaaaaaaaaaaaaaaaaaaaaaaaaaaaaaaaaaaaaaaaaaaaaaaaaaaaa

SEQ ID NO: 15807 - RNA, 9485 nt, synthetic construct
  source 1..9485: mol_type = other RNA
aggaaataagagagaaaagaagagtaagaagaaatataagagccaccatggcccctaagaagaagcgtaaagtgagccggatggaacgcctcgtctacgaggtgcggcagaagtgcagaaacatcgaggacatctgcatctcctgcggatctctgaacgtgaccctggagcacccactgttcatcggcggcatgtgccagaactgtaaaaactgttttctggagtgtgcctatcaatacgacgatgacggctaccagagctactgcaccatctgttgcggcggaagagaggtgctgatgtgtggaaataacaactgctgccggtgcttctgcgtggaatgcgtggacctgctggtgggccccggcgccgcccaggccgctattaaggaagatccttggaactgctacatgtgcggccacaagggcacatacggcctgctgagacggagagaggactggcctagcagactgcagatgttcttcgccaataaccacgaccaggagttcgacccccctaaggtgtaccctcccgtccccgccgagaagagaaagcccatccgggtcctgagcctgttcgatggcatcgccaccggtctgctggtgctgaaggacctgggcatccaggtggataggtacattgcctccgaggtgtgcgaggactccatcaccgtgggaatggtgcgtcatcagggcaagatcatgtacgtgggcgacgtgcggagcgtgacacagaagcatatccaggagtggggccctttcgacctggtgatcggcggcagcccttgcaatgacctgagcatcgtgaacccagcccggaagggcctgtacgagggaaccggcagactgttcttcgagttttacagactgctgcacgacgcccggcctaaggaaggcgacgaccggcccttcttttggctgttcgagaatgtggtggccatgggagtcagcgacaagcgggatattagccggttcctggagagcaaccccgtgatgatcgatgccaaggaagtgagcgccgcccaccgggccagatacttctggggcaatctgcctggcatgaacagacccctggccagcaccgtgaacgacaagctggagctgcaggagtgcctggagcacggccggatcgccaagttcagcaaggtgagaaccatcaccacccgaagcaacagcatcaaacaaggcaaggaccagcactttcctgtgttcatgaacgagaaggaggacatcctgtggtgtaccgagatggagagagtgttcgggttcccagtccactacacagatgtcagcaacatgtctagactggccagacagagactgctgggaagaagctggtccgtccctgtgatcagacacctgttcgcccctctgaaggagtacttcgcctgcgtgagcagcggcaacagcaacgccaacagccggggccccagcttctctagcggcctggtgccactgtccctgagagggagccacatgggccccatggagatctacaaaaccgtgagcgcctggaagcggcagcctgtgcgcgtgctgagcctgtttcggaatatcgataaagtcctgaaaagcctgggattcctggagagcggctctggctccggcggtggcaccctgaagtacgtggaggatgtgacaaacgtggtcagacgggatgtggagaagtggggccccttcgatctggtgtacggcagcacccaacccctgggcagctcttgtgaccggtgccctggctggtacatgtttcagttccaccggatcctgcagtacgccctgccgagacaggagtcccagcggccattcttttggattttcatggacaacttgctgctgaccgaggatgaccaggaaactaccactcggttcctgcagaccgaagccgtgaccctgcaggacgtgagaggccgggactaccagaacgccatgcgggtgtggtccaacatccctggactgaaaagcaagcacgcacctctgacccctaaagaagaggagtacctgcaggcccaggtgcggagcagaagcaagctggacgcccctaaggtggatctgctggtgaagaattgcctcctgcccctgagagagtacttcaagtatttcagccagaatagtctgcccctgggaggcagcggcggcggcgccctggtgacatttgaggacgtcgccgtgcggttcacccaggaggaatgggctctgctggatccttctcagaaaatcctgtaccgggacgtgatgagagagacataccggaatctgacctccgtgggcatcaactgggaatgttgggaccttgaagcctgcttcagaagcctgggaagaaacctgagagtgcaggtggtgaagagaaagtgcgagctgaccaacagcggcccctgcgccgagggcggcccaagcagcggcgcccctcctcccagcggcggcagcccagccggctccccaacctctaccgaggagggcacctctgagtccgccacccccgagagcggccctggcacctccaccgagcccagcgagggcagcgcacccggcagccctgccggcagccccacctccacagaggagggaaccagcaccgagcccagcgaaggcagcgccccaggcaccagcaccgagcctagtgagcaggagattaaacggatcaacaagatcagaagaagacttgtgaaagacagcaacaccaagaaggccggcaagacaggccccatgaaaaccctgctggttagagtgatgacacccgatctgagagagcggctggaaaacctgagaaagaagcctgaaaatatcccccagcccatcagcaatacatctagagccaacctgaataagctgctgaccgattacaccgaaatgaagaaggcgatcctgcatgtgtactgggaagagttccagaaggaccctgtgggcctgatgagccgggtggcccagcctgccagcaagaagatcgatcagaacaagctgaaacctgagatggacgagaagggcaacctgaccaccgccggctttgcctgctctcagtgtggccagcccctgttcgtgtacaagctggagcaggtgtctgagaagggcaaggcttacaccaactacttcggacggtgcaatgtggccgagcacgaaaagctgatcctgctggcccagctgaagcccgagaaggatagcgacgaagccgtgacatatagcctgggaaagtttgggcagagggccctggatttctacagcattcatgtgaccaaggagtccacccaccccgtgaagcccctggcccagatcgccggaaacagatacgcctccggacctgtgggaaaggccctgagcgacgcatgtatgggcacaatcgcctccttcctgtctaagtaccaggacatcatcatcgaacaccagaaggtggtgaagggcaaccagaagagactggagagcctgcgggagctggccggcaaggaaaacctggaataccctagcgtgaccctgccacctcagcctcacaccaaggagggcgttgatgcctacaacgaagtgatcgcccgggtgcgaatgtgggtgaacctgaacctgtggcagaagctgaagctaagcagagatgatgccaagcctctgctgagactgaagggattcccttcctttcctctggtcgagagacaggccaacgaagtggactggtgggacatggtgtgtaacgtgaagaagctgatcaacgagaaaaaggaggatggcaaggtgttttggcagaatctggctggctacaagagacaggaagccctgagaccatacctgagcagcgaggaagatcggaagaagggaaagaaattcgctcggtaccagctgggcgacctgctgctgcacctggaaaagaagcacggcgaggactggggaaaggtgtacgacgaggcctgggagcggattgacaagaaagtggaaggcctgagcaagcacatcaagctggaagaggaacggagaagcgaggacgcccagagcaaggccgccctgaccgactggctgcgggctaaggccagcttcgtgatcgagggcctgaaggaggccgacaaggacgagttctgcagatgcgagctgaagctgcagaagtggtacggggacctgcggggaaagcccttcgccatcgaagccgagaacagcatcctggacatcagcggcttcagcaagcagtacaactgtgccttcatctggcagaaggacggcgtgaagaagctgaacctgtacctgatcatcaactacttcaagggcggcaagctgcggttcaagaagatcaaacctgaagccttcgaagccaacagattctacaccgtgatcaacaaaaagagcggcgagatcgtgcccatggaggtgaacttcaacttcgacgaccccaacctgatcatcctgcctctggcctttggcaagagacagggcagagaattcatctggaacgacctgctgtccctggaaaccggcagcctgaagctggccaacggaagagtgatcgagaagacactgtacaacagaagaacccggcaggatgagcctgccctgttcgtggccctgaccttcgagcggcgggaggtcctggactcctccaatatcaaaccaatgaacctgatcggcgtggcaagaggcgaaaacatccccgccgtgatcgccctgaccgaccccgagggctgcccactgagccggtttaaggatagcctgggaaacccaacccacatcctgagaatcggcgagagctataaggagaagcagcggaccatccaggccaagaaggaggtggagcagcggagagccggcggctacagccggaagtacgccagcaaagccaagaatctggcagacgatatggtgagaaacaccgctagagatctgctgtactacgccgtgacccaggatgccatgctgatcttcgccaacctgagccggggcttcggccggcagggcaagcggaccttcatggccgagagacagtacacacggatggaggactggctgaccgccaagctggcctacgagggcctgagcaagacctacctgtccaagacactggcccagtacacctccaagacatgcagcaactgtgggtttaccatcaccagcgccgactacgacagggtgctggagaagctgaagaagacagcaacaggctggatgaccacaattaacggcaaggagctgaaggtggagggccagattacctactacaacagatacaagagacagaacgtagtcaaggacctgtccgtcgagctggatagactgagcgaagaatctgtgaacaacgacatctcctcctggacaaagggcagaagcggagaagctctgagcctcctgaagaaaagattctcccatagacccgtgcaggagaagttcgtgtgcctgaactgcggcttcgagacacacgcagccgagcaagccgccctgaacatcgccagatcctggctgttcctgcggagccaggagtacaagaaataccagacaaacaagacaaccggcaacaccgataagagagccttcgtcgagacctggcagtccttttaccggaagaagcttaaggaggtgtggaaacctgccgtgcggtctggcggatctggcggaggctccagcaaggcccccgtgaccttcggcgacctggccatctacttcagccaggaggagtgggagtggctgagccccatccagaaggacctgtacgaggacgtgatgctggagaactacaccaacctggtgagcctgggcctgagcagcaggaggcccaacgtgatcgccctgctggagaagggcaaggccccctggatggtggagccccccaggaggaggcagggccccgacagcaggagcaagtgcggcggcccaagcagcggcgcccctcctcccagcggcggcagcccagccggctccccaacctctaccgaggagggcacctctgagtccgccacccccgagagcggccctggcacctccaccgagcccagcgagggcagcgcacccggcagccctgccggcagccccacctccacagaggagggaaccagcaccgagcccagcgaaggcagcgccccaggcaccagcaccgagcctagtgagcaggagattaaacggatcaacaagatcagaagaagacttgtgaaagacagcaacaccaagaaggccggcaagacaggccccatgaaaaccctgctggttagagtgatgacacccgatctgagagagcggctggaaaacctgagaaagaagcctgaaaatatcccccagcccatcagcaatacatctagagccaacctgaataagctgctgaccgattacaccgaaatgaagaaggcgatcctgcatgtgtactgggaagagttccagaaggaccctgtgggcctgatgagccgggtggcccagcctgccagcaagaagatcgatcagaacaagctgaaacctgagatggacgagaagggcaacctgaccaccgccggctttgcctgctctcagtgtggccagcccctgttcgtgtacaagctggagcaggtgtctgagaagggcaaggcttacaccaactacttcggacggtgcaatgtggccgagcacgaaaagctgatcctgctggcccagctgaagcccgagaaggatagcgacgaagccgtgacatatagcctgggaaagtttgggcagagggccctggatttctacagcattcatgtgaccaaggagtccacccaccccgtgaagcccctggcccagatcgccggaaacagatacgcctccggacctgtgggaaaggccctgagcgacgcatgtatgggcacaatcgcctccttcctgtctaagtaccaggacatcatcatcgaacaccagaaggtggtgaagggcaaccagaagagactggagagcctgcgggagctggccggcaaggaaaacctggaataccctagcgtgaccctgccacctcagcctcacaccaaggagggcgttgatgcctacaacgaagtgatcgcccgggtgcgaatgtgggtgaacctgaacctgtggcagaagctgaagctaagcagagatgatgccaagcctctgctgagactgaagggattcccttcctttcctctggtcgagagacaggccaacgaagtggactggtgggacatggtgtgtaacgtgaagaagctgatcaacgagaaaaaggaggatggcaaggtgttttggcagaatctggctggctacaagagacaggaagccctgagaccatacctgagcagcgaggaagatcggaagaagggaaagaaattcgctcggtaccagctgggcgacctgctgctgcacctggaaaagaagcacggcgaggactggggaaaggtgtacgacgaggcctgggagcggattgacaagaaagtggaaggcctgagcaagcacatcaagctggaagaggaacggagaagcgaggacgcccagagcaaggccgccctgaccgactggctgcgggctaaggccagcttcgtgatcgagggcctgaaggaggccgacaaggacgagttctgcagatgcgagctgaagctgcagaagtggtacggggacctgcggggaaagcccttcgccatcgaagccgagaacagcatcctggacatcagcggcttcagcaagcagtacaactgtgccttcatctggcagaaggacggcgtgaagaagctgaacctgtacctgatcatcaactacttcaagggcggcaagctgcggttcaagaagatcaaacctgaagccttcgaagccaacagattctacaccgtgatcaacaaaaagagcggcgagatcgtgcccatggaggtgaacttcaacttcgacgaccccaacctgatcatcctgcctctggcctttggcaagagacagggcagagaattcatctggaacgacctgctgtccctggaaaccggcagcctgaagctggccaacggaagagtgatcgagaagacactgtacaacagaagaacccggcaggatgagcctgccctgttcgtggccctgaccttcgagcggcgggaggtcctggactcctccaatatcaaaccaatgaacctgatcggcgtggcaagaggcgaaaacatccccgccgtgatcgccctgaccgaccccgagggctgcccactgagccggtttaaggatagcctgggaaacccaacccacatcctgagaatcggcgagagctataaggagaagcagcggaccatccaggccaagaaggaggtggagcagcggagagccggcggctacagccggaagtacgccagcaaagccaagaatctggcagacgatatggtgagaaacaccgctagagatctgctgtactacgccgtgacccaggatgccatgctgatcttcgccaacctgagccggggcttcggccggcagggcaagcggaccttcatggccgagagacagtacacacggatggaggactggctgaccgccaagctggcctacgagggcctgagcaagacctacctgtccaagacactggcccagtacacctccaagacatgcagcaactgtgggtttaccatcaccagcgccgactacgacagggtgctggagaagctgaagaagacagcaacaggctggatgaccacaattaacggcaaggagctgaaggtggagggccagattacctactacaacagatacaagagacagaacgtagtcaaggacctgtccgtcgagctggatagactgagcgaagaatctgtgaacaacgacatctcctcctggacaaagggcagaagcggagaagctctgagcctcctgaagaaaagattctcccatagacccgtgcaggagaagttcgtgtgcctgaactgcggcttcgagacacacgcagccgagcaagccgccctgaacatcgccagatcctggctgttcctgcggagccaggagtacaagaaataccagacaaacaagacaaccggcaacaccgataagagagccttcgtcgagacctggcagtccttttaccggaagaagcttaaggaggtgtggaaacctgccgtgcggtctggcggatctggcggaggctcctagcaaggcccccgtgaccttcggcgacctggccatctacttcagccaggaggagtgggagtggctgagccccatccagaaggacctgtacgaggacgtgatgctggagaactacaccaacctggtgagcctgggcctgagcagcaggaggcccaacgtgatcgccctgctggagaagggcaaggccccctggatggtggagccccccaggaggaggcagggccccgacagcaggagcaagtgcggatctggctccggcagcggccccaagaaaaagagaaaagtctaagctgccttctgcggggcttgccttctggccatgcccttcttctctcccttgcacctgtacctcttggtctttgaataaagcctgagtaggaaggctagcaaaaaaaaaaaaaaaaaaaaaaaaaaaaaaaaaaaaaaaaaaaaaaaaaaaaaaaaaaaaaaaaaaaaaaaaaaaaaaaa

SEQ ID NO: 15808 - RNA, 9485 nt, synthetic construct
  source 1..9485: mol_type = other RNA
aggaaataagagagaaaagaagagtaagaagaaatataagagccaccatggcccctaagaagaagcgtaaagtgagccggatggaacgcctcgtctacgaggtgcggcagaagtgcagaaacatcgaggacatctgcatctcctgcggatctctgaacgtgaccctggagcacccactgttcatcggcggcatgtgccagaactgtaaaaactgttttctggagtgtgcctatcaatacgacgatgacggctaccagagctactgcaccatctgttgcggcggaagagaggtgctgatgtgtggaaataacaactgctgccggtgcttctgcgtggaatgcgtggacctgctggtgggccccggcgccgcccaggccgctattaaggaagatccttggaactgctacatgtgcggccacaagggcacatacggcctgctgagacggagagaggactggcctagcagactgcagatgttcttcgccaataaccacgaccaggagttcgacccccctaaggtgtaccctcccgtccccgccgagaagagaaagcccatccgggtcctgagcctgttcgatggcatcgccaccggtctgctggtgctgaaggacctgggcatccaggtggataggtacattgcctccgaggtgtgcgaggactccatcaccgtgggaatggtgcgtcatcagggcaagatcatgtacgtgggcgacgtgcggagcgtgacacagaagcatatccaggagtggggccctttcgacctggtgatcggcggcagcccttgcaatgacctgagcatcgtgaacccagcccggaagggcctgtacgagggaaccggcagactgttcttcgagttttacagactgctgcacgacgcccggcctaaggaaggcgacgaccggcccttcttttggctgttcgagaatgtggtggccatgggagtcagcgacaagcgggatattagccggttcctggagagcaaccccgtgatgatcgatgccaaggaagtgagcgccgcccaccgggccagatacttctggggcaatctgcctggcatgaacagacccctggccagcaccgtgaacgacaagctggagctgcaggagtgcctggagcacggccggatcgccaagttcagcaaggtgagaaccatcaccacccgaagcaacagcatcaaacaaggcaaggaccagcactttcctgtgttcatgaacgagaaggaggacatcctgtggtgtaccgagatggagagagtgttcgggttcccagtccactacacagatgtcagcaacatgtctagactggccagacagagactgctgggaagaagctggtccgtccctgtgatcagacacctgttcgcccctctgaaggagtacttcgcctgcgtgagcagcggcaacagcaacgccaacagccggggccccagcttctctagcggcctggtgccactgtccctgagagggagccacatgggccccatggagatctacaaaaccgtgagcgcctggaagcggcagcctgtgcgcgtgctgagcctgtttcggaatatcgataaagtcctgaaaagcctgggattcctggagagcggctctggctccggcggtggcaccctgaagtacgtggaggatgtgacaaacgtggtcagacgggatgtggagaagtggggccccttcgatctggtgtacggcagcacccaacccctgggcagctcttgtgaccggtgccctggctggtacatgtttcagttccaccggatcctgcagtacgccctgccgagacaggagtcccagcggccattcttttggattttcatggacaacttgctgctgaccgaggatgaccaggaaactaccactcggttcctgcagaccgaagccgtgaccctgcaggacgtgagaggccgggactaccagaacgccatgcgggtgtggtccaacatccctggactgaaaagcaagcacgcacctctgacccctaaagaagaggagtacctgcaggcccaggtgcggagcagaagcaagctggacgcccctaaggtggatctgctggtgaagaattgcctcctgcccctgagagagtacttcaagtatttcagccagaatagtctgcccctgggaggcagcggcggcggcgccctggtgacatttgaggacgtcgccgtgcggttcacccaggaggaatgggctctgctggatccttctcagaaaatcctgtaccgggacgtgatgagagagacataccggaatctgacctccgtgggcatcaactgggaatgttgggaccttgaagcctgcttcagaagcctgggaagaaacctgagagtgcaggtggtgaagagaaagtgcgagctgaccaacagcggcccctgcgccgagggcggcccaagcagcggcgcccctcctcccagcggcggcagcccagccggctccccaacctctaccgaggagggcacctctgagtccgccacccccgagagcggccctggcacctccaccgagcccagcgagggcagcgcacccggcagccctgccggcagccccacctccacagaggagggaaccagcaccgagcccagcgaaggcagcgccccaggcaccagcaccgagcctagtgagcaggagattaaacggatcaacaagatcagaagaagacttgtgaaagacagcaacaccaagaaggccggcaagacaggccccatgaaaaccctgctggttagagtgatgacacccgatctgagagagcggctggaaaacctgagaaagaagcctgaaaatatcccccagcccatcagcaatacatctagagccaacctgaataagctgctgaccgattacaccgaaatgaagaaggcgatcctgcatgtgtactgggaagagttccagaaggaccctgtgggcctgatgagccgggtggcccagcctgccagcaagaagatcgatcagaacaagctgaaacctgagatggacgagaagggcaacctgaccaccgccggctttgcctgctctcagtgtggccagcccctgttcgtgtacaagctggagcaggtgtctgagaagggcaaggcttacaccaactacttcggacggtgcaatgtggccgagcacgaaaagctgatcctgctggcccagctgaagcccgagaaggatagcgacgaagccgtgacatatagcctgggaaagtttgggcagagggccctggatttctacagcattcatgtgaccaaggagtccacccaccccgtgaagcccctggcccagatcgccggaaacagatacgcctccggacctgtgggaaaggccctgagcgacgcatgtatgggcacaatcgcctccttcctgtctaagtaccaggacatcatcatcgaacaccagaaggtggtgaagggcaaccagaagagactggagagcctgcgggagctggccggcaaggaaaacctggaataccctagcgtgaccctgccacctcagcctcacaccaaggagggcgttgatgcctacaacgaagtgatcgcccgggtgcgaatgtgggtgaacctgaacctgtggcagaagctgaagctaagcagagatgatgccaagcctctgctgagactgaagggattcccttcctttcctctggtcgagagacaggccaacgaagtggactggtgggacatggtgtgtaacgtgaagaagctgatcaacgagaaaaaggaggatggcaaggtgttttggcagaatctggctggctacaagagacaggaagccctgagaccatacctgagcagcgaggaagatcggaagaagggaaagaaattcgctcggtaccagctgggcgacctgctgctgcacctggaaaagaagcacggcgaggactggggaaaggtgtacgacgaggcctgggagcggattgacaagaaagtggaaggcctgagcaagcacatcaagctggaagaggaacggagaagcgaggacgcccagagcaaggccgccctgaccgactggctgcgggctaaggccagcttcgtgatcgagggcctgaaggaggccgacaaggacgagttctgcagatgcgagctgaagctgcagaagtggtacggggacctgcggggaaagcccttcgccatcgaagccgagaacagcatcctggacatcagcggcttcagcaagcagtacaactgtgccttcatctggcagaaggacggcgtgaagaagctgaacctgtacctgatcatcaactacttcaagggcggcaagctgcggttcaagaagatcaaacctgaagccttcgaagccaacagattctacaccgtgatcaacaaaaagagcggcgagatcgtgcccatggaggtgaacttcaacttcgacgaccccaacctgatcatcctgcctctggcctttggcaagagacagggcagagaattcatctggaacgacctgctgtccctggaaaccggcagcctgaagctggccaacggaagagtgatcgagaagacactgtacaacagaagaacccggcaggatgagcctgccctgttcgtggccctgaccttcgagcggcgggaggtcctggactcctccaatatcaaaccaatgaacctgatcggcgtggcaagaggcgaaaacatccccgccgtgatcgccctgaccgaccccgagggctgcccactgagccggtttaaggatagcctgggaaacccaacccacatcctgagaatcggcgagagctataaggagaagcagcggaccatccaggccaagaaggaggtggagcagcggagagccggcggctacagccggaagtacgccagcaaagccaagaatctggcagacgatatggtgagaaacaccgctagagatctgctgtactacgccgtgacccaggatgccatgctgatcttcgccaacctgagccggggcttcggccggcagggcaagcggaccttcatggccgagagacagtacacacggatggaggactggctgaccgccaagctggcctacgagggcctgagcaagacctacctgtccaagacactggcccagtacacctccaagacatgcagcaactgtgggtttaccatcaccagcgccgactacgacagggtgctggagaagctgaagaagacagcaacaggctggatgaccacaattaacggcaaggagctgaaggtggagggccagattacctactacaacagatacaagagacagaacgtagtcaaggacctgtccgtcgagctggatagactgagcgaagaatctgtgaacaacgacatctcctcctggacaaagggcagaagcggagaagctctgagcctcctgaagaaaagattctcccatagacccgtgcaggagaagttcgtgtgcctgaactgcggcttcgagacacacgcagccgagcaagccgccctgaacatcgccagatcctggctgttcctgcggagccaggagtacaagaaataccagacaaacaagacaaccggcaacaccgataagagagccttcgtcgagacctggcagtccttttaccggaagaagcttaaggaggtgtggaaacctgccgtgcggtctggcggatctggcggaggctccttccagggcagcgtgagcttcaaggacgtgaccgtggacttcagcagggaggagtggcagcagctggacctggcccagaagagcctgtacagggacgtgatgctggagaactacttcaacctgatcagcgtgggctgccaggtgcccaagcccgaggtgatcttcaacctggagaggggcgagcagccctgcatgctggacggcgagatcagcagccagagctacctggaccagggcatcggcggcggcccaagcagcggcgcccctcctcccagcggcggcagcccagccggctccccaacctctaccgaggagggcacctctgagtccgccacccccgagagcggccctggcacctccaccgagcccagcgagggcagcgcacccggcagccctgccggcagccccacctccacagaggagggaaccagcaccgagcccagcgaaggcagcgccccaggcaccagcaccgagcctagtgagcaggagattaaacggatcaacaagatcagaagaagacttgtgaaagacagcaacaccaagaaggccggcaagacaggccccatgaaaaccctgctggttagagtgatgacacccgatctgagagagcggctggaaaacctgagaaagaagcctgaaaatatcccccagcccatcagcaatacatctagagccaacctgaataagctgctgaccgattacaccgaaatgaagaaggcgatcctgcatgtgtactgggaagagttccagaaggaccctgtgggcctgatgagccgggtggcccagcctgccagcaagaagatcgatcagaacaagctgaaacctgagatggacgagaagggcaacctgaccaccgccggctttgcctgctctcagtgtggccagcccctgttcgtgtacaagctggagcaggtgtctgagaagggcaaggcttacaccaactacttcggacggtgcaatgtggccgagcacgaaaagctgatcctgctggcccagctgaagcccgagaaggatagcgacgaagccgtgacatatagcctgggaaagtttgggcagagggccctggatttctacagcattcatgtgaccaaggagtccacccaccccgtgaagcccctggcccagatcgccggaaacagatacgcctccggacctgtgggaaaggccctgagcgacgcatgtatgggcacaatcgcctccttcctgtctaagtaccaggacatcatcatcgaacaccagaaggtggtgaagggcaaccagaagagactggagagcctgcgggagctggccggcaaggaaaacctggaataccctagcgtgaccctgccacctcagcctcacaccaaggagggcgttgatgcctacaacgaagtgatcgcccgggtgcgaatgtgggtgaacctgaacctgtggcagaagctgaagctaagcagagatgatgccaagcctctgctgagactgaagggattcccttcctttcctctggtcgagagacaggccaacgaagtggactggtgggacatggtgtgtaacgtgaagaagctgatcaacgagaaaaaggaggatggcaaggtgttttggcagaatctggctggctacaagagacaggaagccctgagaccatacctgagcagcgaggaagatcggaagaagggaaagaaattcgctcggtaccagctgggcgacctgctgctgcacctggaaaagaagcacggcgaggactggggaaaggtgtacgacgaggcctgggagcggattgacaagaaagtggaaggcctgagcaagcacatcaagctggaagaggaacggagaagcgaggacgcccagagcaaggccgccctgaccgactggctgcgggctaaggccagcttcgtgatcgagggcctgaaggaggccgacaaggacgagttctgcagatgcgagctgaagctgcagaagtggtacggggacctgcggggaaagcccttcgccatcgaagccgagaacagcatcctggacatcagcggcttcagcaagcagtacaactgtgccttcatctggcagaaggacggcgtgaagaagctgaacctgtacctgatcatcaactacttcaagggcggcaagctgcggttcaagaagatcaaacctgaagccttcgaagccaacagattctacaccgtgatcaacaaaaagagcggcgagatcgtgcccatggaggtgaacttcaacttcgacgaccccaacctgatcatcctgcctctggcctttggcaagagacagggcagagaattcatctggaacgacctgctgtccctggaaaccggcagcctgaagctggccaacggaagagtgatcgagaagacactgtacaacagaagaacccggcaggatgagcctgccctgttcgtggccctgaccttcgagcggcgggaggtcctggactcctccaatatcaaaccaatgaacctgatcggcgtggcaagaggcgaaaacatccccgccgtgatcgccctgaccgaccccgagggctgcccactgagccggtttaaggatagcctgggaaacccaacccacatcctgagaatcggcgagagctataaggagaagcagcggaccatccaggccaagaaggaggtggagcagcggagagccggcggctacagccggaagtacgccagcaaagccaagaatctggcagacgatatggtgagaaacaccgctagagatctgctgtactacgccgtgacccaggatgccatgctgatcttcgccaacctgagccggggcttcggccggcagggcaagcggaccttcatggccgagagacagtacacacggatggaggactggctgaccgccaagctggcctacgagggcctgagcaagacctacctgtccaagacactggcccagtacacctccaagacatgcagcaactgtgggtttaccatcaccagcgccgactacgacagggtgctggagaagctgaagaagacagcaacaggctggatgaccacaattaacggcaaggagctgaaggtggagggccagattacctactacaacagatacaagagacagaacgtagtcaaggacctgtccgtcgagctggatagactgagcgaagaatctgtgaacaacgacatctcctcctggacaaagggcagaagcggagaagctctgagcctcctgaagaaaagattctcccatagacccgtgcaggagaagttcgtgtgcctgaactgcggcttcgagacacacgcagccgagcaagccgccctgaacatcgccagatcctggctgttcctgcggagccaggagtacaagaaataccagacaaacaagacaaccggcaacaccgataagagagccttcgtcgagacctggcagtccttttaccggaagaagcttaaggaggtgtggaaacctgccgtgcggtctggcggatctggcggaggctcctttccagggcagcgtgagcttcaaggacgtgaccgtggacttcagcagggaggagtggcagcagctggacctggcccagaagagcctgtacagggacgtgatgctggagaactacttcaacctgatcagcgtgggctgccaggtgcccaagcccgaggtgatcttcaacctggagaggggcgagcagccctgcatgctggacggcgagatcagcagccagagctacctggaccagggcatcggcggatctggctccggcagcggccccaagaaaaagagaaaagtctaagctgccttctgcggggcttgccttctggccatgcccttcttctctcccttgcacctgtacctcttggtctttgaataaagcctgagtaggaaggctagcaaaaaaaaaaaaaaaaaaaaaaaaaaaaaaaaaaaaaaaaaaaaaaaaaaaaaaaaaaaaaaaaaaaaaaaaaaaaaaaa

SEQ ID NO: 15809 - RNA, 9485 nt, synthetic construct
  source 1..9485: mol_type = other RNA
aggaaataagagagaaaagaagagtaagaagaaatataagagccaccatggcccctaagaagaagcgtaaagtgagccggatggaacgcctcgtctacgaggtgcggcagaagtgcagaaacatcgaggacatctgcatctcctgcggatctctgaacgtgaccctggagcacccactgttcatcggcggcatgtgccagaactgtaaaaactgttttctggagtgtgcctatcaatacgacgatgacggctaccagagctactgcaccatctgttgcggcggaagagaggtgctgatgtgtggaaataacaactgctgccggtgcttctgcgtggaatgcgtggacctgctggtgggccccggcgccgcccaggccgctattaaggaagatccttggaactgctacatgtgcggccacaagggcacatacggcctgctgagacggagagaggactggcctagcagactgcagatgttcttcgccaataaccacgaccaggagttcgacccccctaaggtgtaccctcccgtccccgccgagaagagaaagcccatccgggtcctgagcctgttcgatggcatcgccaccggtctgctggtgctgaaggacctgggcatccaggtggataggtacattgcctccgaggtgtgcgaggactccatcaccgtgggaatggtgcgtcatcagggcaagatcatgtacgtgggcgacgtgcggagcgtgacacagaagcatatccaggagtggggccctttcgacctggtgatcggcggcagcccttgcaatgacctgagcatcgtgaacccagcccggaagggcctgtacgagggaaccggcagactgttcttcgagttttacagactgctgcacgacgcccggcctaaggaaggcgacgaccggcccttcttttggctgttcgagaatgtggtggccatgggagtcagcgacaagcgggatattagccggttcctggagagcaaccccgtgatgatcgatgccaaggaagtgagcgccgcccaccgggccagatacttctggggcaatctgcctggcatgaacagacccctggccagcaccgtgaacgacaagctggagctgcaggagtgcctggagcacggccggatcgccaagttcagcaaggtgagaaccatcaccacccgaagcaacagcatcaaacaaggcaaggaccagcactttcctgtgttcatgaacgagaaggaggacatcctgtggtgtaccgagatggagagagtgttcgggttcccagtccactacacagatgtcagcaacatgtctagactggccagacagagactgctgggaagaagctggtccgtccctgtgatcagacacctgttcgcccctctgaaggagtacttcgcctgcgtgagcagcggcaacagcaacgccaacagccggggccccagcttctctagcggcctggtgccactgtccctgagagggagccacatgggccccatggagatctacaaaaccgtgagcgcctggaagcggcagcctgtgcgcgtgctgagcctgtttcggaatatcgataaagtcctgaaaagcctgggattcctggagagcggctctggctccggcggtggcaccctgaagtacgtggaggatgtgacaaacgtggtcagacgggatgtggagaagtggggccccttcgatctggtgtacggcagcacccaacccctgggcagctcttgtgaccggtgccctggctggtacatgtttcagttccaccggatcctgcagtacgccctgccgagacaggagtcccagcggccattcttttggattttcatggacaacttgctgctgaccgaggatgaccaggaaactaccactcggttcctgcagaccgaagccgtgaccctgcaggacgtgagaggccgggactaccagaacgccatgcgggtgtggtccaacatccctggactgaaaagcaagcacgcacctctgacccctaaagaagaggagtacctgcaggcccaggtgcggagcagaagcaagctggacgcccctaaggtggatctgctggtgaagaattgcctcctgcccctgagagagtacttcaagtatttcagccagaatagtctgcccctgggaggcagcggcggcggcgccctggtgacatttgaggacgtcgccgtgcggttcacccaggaggaatgggctctgctggatccttctcagaaaatcctgtaccgggacgtgatgagagagacataccggaatctgacctccgtgggcatcaactgggaatgttgggaccttgaagcctgcttcagaagcctgggaagaaacctgagagtgcaggtggtgaagagaaagtgcgagctgaccaacagcggcccctgcgccgagggcggcccaagcagcggcgcccctcctcccagcggcggcagcccagccggctccccaacctctaccgaggagggcacctctgagtccgccacccccgagagcggccctggcacctccaccgagcccagcgagggcagcgcacccggcagccctgccggcagccccacctccacagaggagggaaccagcaccgagcccagcgaaggcagcgccccaggcaccagcaccgagcctagtgagcaggagattaaacggatcaacaagatcagaagaagacttgtgaaagacagcaacaccaagaaggccggcaagacaggccccatgaaaaccctgctggttagagtgatgacacccgatctgagagagcggctggaaaacctgagaaagaagcctgaaaatatcccccagcccatcagcaatacatctagagccaacctgaataagctgctgaccgattacaccgaaatgaagaaggcgatcctgcatgtgtactgggaagagttccagaaggaccctgtgggcctgatgagccgggtggcccagcctgccagcaagaagatcgatcagaacaagctgaaacctgagatggacgagaagggcaacctgaccaccgccggctttgcctgctctcagtgtggccagcccctgttcgtgtacaagctggagcaggtgtctgagaagggcaaggcttacaccaactacttcggacggtgcaatgtggccgagcacgaaaagctgatcctgctggcccagctgaagcccgagaaggatagcgacgaagccgtgacatatagcctgggaaagtttgggcagagggccctggatttctacagcattcatgtgaccaaggagtccacccaccccgtgaagcccctggcccagatcgccggaaacagatacgcctccggacctgtgggaaaggccctgagcgacgcatgtatgggcacaatcgcctccttcctgtctaagtaccaggacatcatcatcgaacaccagaaggtggtgaagggcaaccagaagagactggagagcctgcgggagctggccggcaaggaaaacctggaataccctagcgtgaccctgccacctcagcctcacaccaaggagggcgttgatgcctacaacgaagtgatcgcccgggtgcgaatgtgggtgaacctgaacctgtggcagaagctgaagctaagcagagatgatgccaagcctctgctgagactgaagggattcccttcctttcctctggtcgagagacaggccaacgaagtggactggtgggacatggtgtgtaacgtgaagaagctgatcaacgagaaaaaggaggatggcaaggtgttttggcagaatctggctggctacaagagacaggaagccctgagaccatacctgagcagcgaggaagatcggaagaagggaaagaaattcgctcggtaccagctgggcgacctgctgctgcacctggaaaagaagcacggcgaggactggggaaaggtgtacgacgaggcctgggagcggattgacaagaaagtggaaggcctgagcaagcacatcaagctggaagaggaacggagaagcgaggacgcccagagcaaggccgccctgaccgactggctgcgggctaaggccagcttcgtgatcgagggcctgaaggaggccgacaaggacgagttctgcagatgcgagctgaagctgcagaagtggtacggggacctgcggggaaagcccttcgccatcgaagccgagaacagcatcctggacatcagcggcttcagcaagcagtacaactgtgccttcatctggcagaaggacggcgtgaagaagctgaacctgtacctgatcatcaactacttcaagggcggcaagctgcggttcaagaagatcaaacctgaagccttcgaagccaacagattctacaccgtgatcaacaaaaagagcggcgagatcgtgcccatggaggtgaacttcaacttcgacgaccccaacctgatcatcctgcctctggcctttggcaagagacagggcagagaattcatctggaacgacctgctgtccctggaaaccggcagcctgaagctggccaacggaagagtgatcgagaagacactgtacaacagaagaacccggcaggatgagcctgccctgttcgtggccctgaccttcgagcggcgggaggtcctggactcctccaatatcaaaccaatgaacctgatcggcgtggcaagaggcgaaaacatccccgccgtgatcgccctgaccgaccccgagggctgcccactgagccggtttaaggatagcctgggaaacccaacccacatcctgagaatcggcgagagctataaggagaagcagcggaccatccaggccaagaaggaggtggagcagcggagagccggcggctacagccggaagtacgccagcaaagccaagaatctggcagacgatatggtgagaaacaccgctagagatctgctgtactacgccgtgacccaggatgccatgctgatcttcgccaacctgagccggggcttcggccggcagggcaagcggaccttcatggccgagagacagtacacacggatggaggactggctgaccgccaagctggcctacgagggcctgagcaagacctacctgtccaagacactggcccagtacacctccaagacatgcagcaactgtgggtttaccatcaccagcgccgactacgacagggtgctggagaagctgaagaagacagcaacaggctggatgaccacaattaacggcaaggagctgaaggtggagggccagattacctactacaacagatacaagagacagaacgtagtcaaggacctgtccgtcgagctggatagactgagcgaagaatctgtgaacaacgacatctcctcctggacaaagggcagaagcggagaagctctgagcctcctgaagaaaagattctcccatagacccgtgcaggagaagttcgtgtgcctgaactgcggcttcgagacacacgcagccgagcaagccgccctgaacatcgccagatcctggctgttcctgcggagccaggagtacaagaaataccagacaaacaagacaaccggcaacaccgataagagagccttcgtcgagacctggcagtccttttaccggaagaagcttaaggaggtgtggaaacctgccgtgcggtctggcggatctggcggaggctccatgagcctgggcagcgagctgttcagggacgtggccatcgtgttcagccaggaggagtggcagtggctggcccccgcccagagggacctgtacagggacgtgatgctggagacctacagcaacctggtgagcctgggcctggccatcagcaagcccgacgtgatcagcttcctggagcagggcaaggagccctggatggtggagagggtggtgagcaggggcctgtgccccgtgctggagagcggcggcccaagcagcggcgcccctcctcccagcggcggcagcccagccggctccccaacctctaccgaggagggcacctctgagtccgccacccccgagagcggccctggcacctccaccgagcccagcgagggcagcgcacccggcagccctgccggcagccccacctccacagaggagggaaccagcaccgagcccagcgaaggcagcgccccaggcaccagcaccgagcctagtgagcaggagattaaacggatcaacaagatcagaagaagacttgtgaaagacagcaacaccaagaaggccggcaagacaggccccatgaaaaccctgctggttagagtgatgacacccgatctgagagagcggctggaaaacctgagaaagaagcctgaaaatatcccccagcccatcagcaatacatctagagccaacctgaataagctgctgaccgattacaccgaaatgaagaaggcgatcctgcatgtgtactgggaagagttccagaaggaccctgtgggcctgatgagccgggtggcccagcctgccagcaagaagatcgatcagaacaagctgaaacctgagatggacgagaagggcaacctgaccaccgccggctttgcctgctctcagtgtggccagcccctgttcgtgtacaagctggagcaggtgtctgagaagggcaaggcttacaccaactacttcggacggtgcaatgtggccgagcacgaaaagctgatcctgctggcccagctgaagcccgagaaggatagcgacgaagccgtgacatatagcctgggaaagtttgggcagagggccctggatttctacagcattcatgtgaccaaggagtccacccaccccgtgaagcccctggcccagatcgccggaaacagatacgcctccggacctgtgggaaaggccctgagcgacgcatgtatgggcacaatcgcctccttcctgtctaagtaccaggacatcatcatcgaacaccagaaggtggtgaagggcaaccagaagagactggagagcctgcgggagctggccggcaaggaaaacctggaataccctagcgtgaccctgccacctcagcctcacaccaaggagggcgttgatgcctacaacgaagtgatcgcccgggtgcgaatgtgggtgaacctgaacctgtggcagaagctgaagctaagcagagatgatgccaagcctctgctgagactgaagggattcccttcctttcctctggtcgagagacaggccaacgaagtggactggtgggacatggtgtgtaacgtgaagaagctgatcaacgagaaaaaggaggatggcaaggtgttttggcagaatctggctggctacaagagacaggaagccctgagaccatacctgagcagcgaggaagatcggaagaagggaaagaaattcgctcggtaccagctgggcgacctgctgctgcacctggaaaagaagcacggcgaggactggggaaaggtgtacgacgaggcctgggagcggattgacaagaaagtggaaggcctgagcaagcacatcaagctggaagaggaacggagaagcgaggacgcccagagcaaggccgccctgaccgactggctgcgggctaaggccagcttcgtgatcgagggcctgaaggaggccgacaaggacgagttctgcagatgcgagctgaagctgcagaagtggtacggggacctgcggggaaagcccttcgccatcgaagccgagaacagcatcctggacatcagcggcttcagcaagcagtacaactgtgccttcatctggcagaaggacggcgtgaagaagctgaacctgtacctgatcatcaactacttcaagggcggcaagctgcggttcaagaagatcaaacctgaagccttcgaagccaacagattctacaccgtgatcaacaaaaagagcggcgagatcgtgcccatggaggtgaacttcaacttcgacgaccccaacctgatcatcctgcctctggcctttggcaagagacagggcagagaattcatctggaacgacctgctgtccctggaaaccggcagcctgaagctggccaacggaagagtgatcgagaagacactgtacaacagaagaacccggcaggatgagcctgccctgttcgtggccctgaccttcgagcggcgggaggtcctggactcctccaatatcaaaccaatgaacctgatcggcgtggcaagaggcgaaaacatccccgccgtgatcgccctgaccgaccccgagggctgcccactgagccggtttaaggatagcctgggaaacccaacccacatcctgagaatcggcgagagctataaggagaagcagcggaccatccaggccaagaaggaggtggagcagcggagagccggcggctacagccggaagtacgccagcaaagccaagaatctggcagacgatatggtgagaaacaccgctagagatctgctgtactacgccgtgacccaggatgccatgctgatcttcgccaacctgagccggggcttcggccggcagggcaagcggaccttcatggccgagagacagtacacacggatggaggactggctgaccgccaagctggcctacgagggcctgagcaagacctacctgtccaagacactggcccagtacacctccaagacatgcagcaactgtgggtttaccatcaccagcgccgactacgacagggtgctggagaagctgaagaagacagcaacaggctggatgaccacaattaacggcaaggagctgaaggtggagggccagattacctactacaacagatacaagagacagaacgtagtcaaggacctgtccgtcgagctggatagactgagcgaagaatctgtgaacaacgacatctcctcctggacaaagggcagaagcggagaagctctgagcctcctgaagaaaagattctcccatagacccgtgcaggagaagttcgtgtgcctgaactgcggcttcgagacacacgcagccgagcaagccgccctgaacatcgccagatcctggctgttcctgcggagccaggagtacaagaaataccagacaaacaagacaaccggcaacaccgataagagagccttcgtcgagacctggcagtccttttaccggaagaagcttaaggaggtgtggaaacctgccgtgcggtctggcggatctggcggaggctcctatgagcctgggcagcgagctgttcagggacgtggccatcgtgttcagccaggaggagtggcagtggctggcccccgcccagagggacctgtacagggacgtgatgctggagacctacagcaacctggtgagcctgggcctggccatcagcaagcccgacgtgatcagcttcctggagcagggcaaggagccctggatggtggagagggtggtgagcaggggcctgtgccccgtgctggagagcggatctggctccggcagcggccccaagaaaaagagaaaagtctaagctgccttctgcggggcttgccttctggccatgcccttcttctctcccttgcacctgtacctcttggtctttgaataaagcctgagtaggaaggctagcaaaaaaaaaaaaaaaaaaaaaaaaaaaaaaaaaaaaaaaaaaaaaaaaaaaaaaaaaaaaaaaaaaaaaaaaaaaaaaaa

SEQ ID NO: 15810 - RNA, 9485 nt, synthetic construct
  source 1..9485: mol_type = other RNA
aggaaataagagagaaaagaagagtaagaagaaatataagagccaccatggcccctaagaagaagcgtaaagtgagccggatggaacgcctcgtctacgaggtgcggcagaagtgcagaaacatcgaggacatctgcatctcctgcggatctctgaacgtgaccctggagcacccactgttcatcggcggcatgtgccagaactgtaaaaactgttttctggagtgtgcctatcaatacgacgatgacggctaccagagctactgcaccatctgttgcggcggaagagaggtgctgatgtgtggaaataacaactgctgccggtgcttctgcgtggaatgcgtggacctgctggtgggccccggcgccgcccaggccgctattaaggaagatccttggaactgctacatgtgcggccacaagggcacatacggcctgctgagacggagagaggactggcctagcagactgcagatgttcttcgccaataaccacgaccaggagttcgacccccctaaggtgtaccctcccgtccccgccgagaagagaaagcccatccgggtcctgagcctgttcgatggcatcgccaccggtctgctggtgctgaaggacctgggcatccaggtggataggtacattgcctccgaggtgtgcgaggactccatcaccgtgggaatggtgcgtcatcagggcaagatcatgtacgtgggcgacgtgcggagcgtgacacagaagcatatccaggagtggggccctttcgacctggtgatcggcggcagcccttgcaatgacctgagcatcgtgaacccagcccggaagggcctgtacgagggaaccggcagactgttcttcgagttttacagactgctgcacgacgcccggcctaaggaaggcgacgaccggcccttcttttggctgttcgagaatgtggtggccatgggagtcagcgacaagcgggatattagccggttcctggagagcaaccccgtgatgatcgatgccaaggaagtgagcgccgcccaccgggccagatacttctggggcaatctgcctggcatgaacagacccctggccagcaccgtgaacgacaagctggagctgcaggagtgcctggagcacggccggatcgccaagttcagcaaggtgagaaccatcaccacccgaagcaacagcatcaaacaaggcaaggaccagcactttcctgtgttcatgaacgagaaggaggacatcctgtggtgtaccgagatggagagagtgttcgggttcccagtccactacacagatgtcagcaacatgtctagactggccagacagagactgctgggaagaagctggtccgtccctgtgatcagacacctgttcgcccctctgaaggagtacttcgcctgcgtgagcagcggcaacagcaacgccaacagccggggccccagcttctctagcggcctggtgccactgtccctgagagggagccacatgggccccatggagatctacaaaaccgtgagcgcctggaagcggcagcctgtgcgcgtgctgagcctgtttcggaatatcgataaagtcctgaaaagcctgggattcctggagagcggctctggctccggcggtggcaccctgaagtacgtggaggatgtgacaaacgtggtcagacgggatgtggagaagtggggccccttcgatctggtgtacggcagcacccaacccctgggcagctcttgtgaccggtgccctggctggtacatgtttcagttccaccggatcctgcagtacgccctgccgagacaggagtcccagcggccattcttttggattttcatggacaacttgctgctgaccgaggatgaccaggaaactaccactcggttcctgcagaccgaagccgtgaccctgcaggacgtgagaggccgggactaccagaacgccatgcgggtgtggtccaacatccctggactgaaaagcaagcacgcacctctgacccctaaagaagaggagtacctgcaggcccaggtgcggagcagaagcaagctggacgcccctaaggtggatctgctggtgaagaattgcctcctgcccctgagagagtacttcaagtatttcagccagaatagtctgcccctgggaggcagcggcggcggcgccctggtgacatttgaggacgtcgccgtgcggttcacccaggaggaatgggctctgctggatccttctcagaaaatcctgtaccgggacgtgatgagagagacataccggaatctgacctccgtgggcatcaactgggaatgttgggaccttgaagcctgcttcagaagcctgggaagaaacctgagagtgcaggtggtgaagagaaagtgcgagctgaccaacagcggcccctgcgccgagggcggcccaagcagcggcgcccctcctcccagcggcggcagcccagccggctccccaacctctaccgaggagggcacctctgagtccgccacccccgagagcggccctggcacctccaccgagcccagcgagggcagcgcacccggcagccctgccggcagccccacctccacagaggagggaaccagcaccgagcccagcgaaggcagcgccccaggcaccagcaccgagcctagtgagcaggagattaaacggatcaacaagatcagaagaagacttgtgaaagacagcaacaccaagaaggccggcaagacaggccccatgaaaaccctgctggttagagtgatgacacccgatctgagagagcggctggaaaacctgagaaagaagcctgaaaatatcccccagcccatcagcaatacatctagagccaacctgaataagctgctgaccgattacaccgaaatgaagaaggcgatcctgcatgtgtactgggaagagttccagaaggaccctgtgggcctgatgagccgggtggcccagcctgccagcaagaagatcgatcagaacaagctgaaacctgagatggacgagaagggcaacctgaccaccgccggctttgcctgctctcagtgtggccagcccctgttcgtgtacaagctggagcaggtgtctgagaagggcaaggcttacaccaactacttcggacggtgcaatgtggccgagcacgaaaagctgatcctgctggcccagctgaagcccgagaaggatagcgacgaagccgtgacatatagcctgggaaagtttgggcagagggccctggatttctacagcattcatgtgaccaaggagtccacccaccccgtgaagcccctggcccagatcgccggaaacagatacgcctccggacctgtgggaaaggccctgagcgacgcatgtatgggcacaatcgcctccttcctgtctaagtaccaggacatcatcatcgaacaccagaaggtggtgaagggcaaccagaagagactggagagcctgcgggagctggccggcaaggaaaacctggaataccctagcgtgaccctgccacctcagcctcacaccaaggagggcgttgatgcctacaacgaagtgatcgcccgggtgcgaatgtgggtgaacctgaacctgtggcagaagctgaagctaagcagagatgatgccaagcctctgctgagactgaagggattcccttcctttcctctggtcgagagacaggccaacgaagtggactggtgggacatggtgtgtaacgtgaagaagctgatcaacgagaaaaaggaggatggcaaggtgttttggcagaatctggctggctacaagagacaggaagccctgagaccatacctgagcagcgaggaagatcggaagaagggaaagaaattcgctcggtaccagctgggcgacctgctgctgcacctggaaaagaagcacggcgaggactggggaaaggtgtacgacgaggcctgggagcggattgacaagaaagtggaaggcctgagcaagcacatcaagctggaagaggaacggagaagcgaggacgcccagagcaaggccgccctgaccgactggctgcgggctaaggccagcttcgtgatcgagggcctgaaggaggccgacaaggacgagttctgcagatgcgagctgaagctgcagaagtggtacggggacctgcggggaaagcccttcgccatcgaagccgagaacagcatcctggacatcagcggcttcagcaagcagtacaactgtgccttcatctggcagaaggacggcgtgaagaagctgaacctgtacctgatcatcaactacttcaagggcggcaagctgcggttcaagaagatcaaacctgaagccttcgaagccaacagattctacaccgtgatcaacaaaaagagcggcgagatcgtgcccatggaggtgaacttcaacttcgacgaccccaacctgatcatcctgcctctggcctttggcaagagacagggcagagaattcatctggaacgacctgctgtccctggaaaccggcagcctgaagctggccaacggaagagtgatcgagaagacactgtacaacagaagaacccggcaggatgagcctgccctgttcgtggccctgaccttcgagcggcgggaggtcctggactcctccaatatcaaaccaatgaacctgatcggcgtggcaagaggcgaaaacatccccgccgtgatcgccctgaccgaccccgagggctgcccactgagccggtttaaggatagcctgggaaacccaacccacatcctgagaatcggcgagagctataaggagaagcagcggaccatccaggccaagaaggaggtggagcagcggagagccggcggctacagccggaagtacgccagcaaagccaagaatctggcagacgatatggtgagaaacaccgctagagatctgctgtactacgccgtgacccaggatgccatgctgatcttcgccaacctgagccggggcttcggccggcagggcaagcggaccttcatggccgagagacagtacacacggatggaggactggctgaccgccaagctggcctacgagggcctgagcaagacctacctgtccaagacactggcccagtacacctccaagacatgcagcaactgtgggtttaccatcaccagcgccgactacgacagggtgctggagaagctgaagaagacagcaacaggctggatgaccacaattaacggcaaggagctgaaggtggagggccagattacctactacaacagatacaagagacagaacgtagtcaaggacctgtccgtcgagctggatagactgagcgaagaatctgtgaacaacgacatctcctcctggacaaagggcagaagcggagaagctctgagcctcctgaagaaaagattctcccatagacccgtgcaggagaagttcgtgtgcctgaactgcggcttcgagacacacgcagccgagcaagccgccctgaacatcgccagatcctggctgttcctgcggagccaggagtacaagaaataccagacaaacaagacaaccggcaacaccgataagagagccttcgtcgagacctggcagtccttttaccggaagaagcttaaggaggtgtggaaacctgccgtgcggtctggcggatctggcggaggctccgcccaggagagcgtgatgttcagcgacgtgagcatcgacttcagccaggaggagtgggagtgcctgaccgacgaccagaggcacctgtacagggacgtgatgctggagaactacagcaacctggtgagcatgggccacagcatcagcaagcccaacgtgatcagctacctggagcagggcaaggagccctggctggtggacaggggcaggaccaggggccagtggcccgtgctggagagcaccggcggcccaagcagcggcgcccctcctcccagcggcggcagcccagccggctccccaacctctaccgaggagggcacctctgagtccgccacccccgagagcggccctggcacctccaccgagcccagcgagggcagcgcacccggcagccctgccggcagccccacctccacagaggagggaaccagcaccgagcccagcgaaggcagcgccccaggcaccagcaccgagcctagtgagcaggagattaaacggatcaacaagatcagaagaagacttgtgaaagacagcaacaccaagaaggccggcaagacaggccccatgaaaaccctgctggttagagtgatgacacccgatctgagagagcggctggaaaacctgagaaagaagcctgaaaatatcccccagcccatcagcaatacatctagagccaacctgaataagctgctgaccgattacaccgaaatgaagaaggcgatcctgcatgtgtactgggaagagttccagaaggaccctgtgggcctgatgagccgggtggcccagcctgccagcaagaagatcgatcagaacaagctgaaacctgagatggacgagaagggcaacctgaccaccgccggctttgcctgctctcagtgtggccagcccctgttcgtgtacaagctggagcaggtgtctgagaagggcaaggcttacaccaactacttcggacggtgcaatgtggccgagcacgaaaagctgatcctgctggcccagctgaagcccgagaaggatagcgacgaagccgtgacatatagcctgggaaagtttgggcagagggccctggatttctacagcattcatgtgaccaaggagtccacccaccccgtgaagcccctggcccagatcgccggaaacagatacgcctccggacctgtgggaaaggccctgagcgacgcatgtatgggcacaatcgcctccttcctgtctaagtaccaggacatcatcatcgaacaccagaaggtggtgaagggcaaccagaagagactggagagcctgcgggagctggccggcaaggaaaacctggaataccctagcgtgaccctgccacctcagcctcacaccaaggagggcgttgatgcctacaacgaagtgatcgcccgggtgcgaatgtgggtgaacctgaacctgtggcagaagctgaagctaagcagagatgatgccaagcctctgctgagactgaagggattcccttcctttcctctggtcgagagacaggccaacgaagtggactggtgggacatggtgtgtaacgtgaagaagctgatcaacgagaaaaaggaggatggcaaggtgttttggcagaatctggctggctacaagagacaggaagccctgagaccatacctgagcagcgaggaagatcggaagaagggaaagaaattcgctcggtaccagctgggcgacctgctgctgcacctggaaaagaagcacggcgaggactggggaaaggtgtacgacgaggcctgggagcggattgacaagaaagtggaaggcctgagcaagcacatcaagctggaagaggaacggagaagcgaggacgcccagagcaaggccgccctgaccgactggctgcgggctaaggccagcttcgtgatcgagggcctgaaggaggccgacaaggacgagttctgcagatgcgagctgaagctgcagaagtggtacggggacctgcggggaaagcccttcgccatcgaagccgagaacagcatcctggacatcagcggcttcagcaagcagtacaactgtgccttcatctggcagaaggacggcgtgaagaagctgaacctgtacctgatcatcaactacttcaagggcggcaagctgcggttcaagaagatcaaacctgaagccttcgaagccaacagattctacaccgtgatcaacaaaaagagcggcgagatcgtgcccatggaggtgaacttcaacttcgacgaccccaacctgatcatcctgcctctggcctttggcaagagacagggcagagaattcatctggaacgacctgctgtccctggaaaccggcagcctgaagctggccaacggaagagtgatcgagaagacactgtacaacagaagaacccggcaggatgagcctgccctgttcgtggccctgaccttcgagcggcgggaggtcctggactcctccaatatcaaaccaatgaacctgatcggcgtggcaagaggcgaaaacatccccgccgtgatcgccctgaccgaccccgagggctgcccactgagccggtttaaggatagcctgggaaacccaacccacatcctgagaatcggcgagagctataaggagaagcagcggaccatccaggccaagaaggaggtggagcagcggagagccggcggctacagccggaagtacgccagcaaagccaagaatctggcagacgatatggtgagaaacaccgctagagatctgctgtactacgccgtgacccaggatgccatgctgatcttcgccaacctgagccggggcttcggccggcagggcaagcggaccttcatggccgagagacagtacacacggatggaggactggctgaccgccaagctggcctacgagggcctgagcaagacctacctgtccaagacactggcccagtacacctccaagacatgcagcaactgtgggtttaccatcaccagcgccgactacgacagggtgctggagaagctgaagaagacagcaacaggctggatgaccacaattaacggcaaggagctgaaggtggagggccagattacctactacaacagatacaagagacagaacgtagtcaaggacctgtccgtcgagctggatagactgagcgaagaatctgtgaacaacgacatctcctcctggacaaagggcagaagcggagaagctctgagcctcctgaagaaaagattctcccatagacccgtgcaggagaagttcgtgtgcctgaactgcggcttcgagacacacgcagccgagcaagccgccctgaacatcgccagatcctggctgttcctgcggagccaggagtacaagaaataccagacaaacaagacaaccggcaacaccgataagagagccttcgtcgagacctggcagtccttttaccggaagaagcttaaggaggtgtggaaacctgccgtgcggtctggcggatctggcggaggctcctgcccaggagagcgtgatgttcagcgacgtgagcatcgacttcagccaggaggagtgggagtgcctgaccgacgaccagaggcacctgtacagggacgtgatgctggagaactacagcaacctggtgagcatgggccacagcatcagcaagcccaacgtgatcagctacctggagcagggcaaggagccctggctggtggacaggggcaggaccaggggccagtggcccgtgctggagagcaccggatctggctccggcagcggccccaagaaaaagagaaaagtctaagctgccttctgcggggcttgccttctggccatgcccttcttctctcccttgcacctgtacctcttggtctttgaataaagcctgagtaggaaggctagcaaaaaaaaaaaaaaaaaaaaaaaaaaaaaaaaaaaaaaaaaaaaaaaaaaaaaaaaaaaaaaaaaaaaaaaaaaaaaaaa

SEQ ID NO: 15811 - RNA, 9485 nt, synthetic construct
  source 1..9485: mol_type = other RNA
aggaaataagagagaaaagaagagtaagaagaaatataagagccaccatggcccctaagaagaagcgtaaagtgagccggatggaacgcctcgtctacgaggtgcggcagaagtgcagaaacatcgaggacatctgcatctcctgcggatctctgaacgtgaccctggagcacccactgttcatcggcggcatgtgccagaactgtaaaaactgttttctggagtgtgcctatcaatacgacgatgacggctaccagagctactgcaccatctgttgcggcggaagagaggtgctgatgtgtggaaataacaactgctgccggtgcttctgcgtggaatgcgtggacctgctggtgggccccggcgccgcccaggccgctattaaggaagatccttggaactgctacatgtgcggccacaagggcacatacggcctgctgagacggagagaggactggcctagcagactgcagatgttcttcgccaataaccacgaccaggagttcgacccccctaaggtgtaccctcccgtccccgccgagaagagaaagcccatccgggtcctgagcctgttcgatggcatcgccaccggtctgctggtgctgaaggacctgggcatccaggtggataggtacattgcctccgaggtgtgcgaggactccatcaccgtgggaatggtgcgtcatcagggcaagatcatgtacgtgggcgacgtgcggagcgtgacacagaagcatatccaggagtggggccctttcgacctggtgatcggcggcagcccttgcaatgacctgagcatcgtgaacccagcccggaagggcctgtacgagggaaccggcagactgttcttcgagttttacagactgctgcacgacgcccggcctaaggaaggcgacgaccggcccttcttttggctgttcgagaatgtggtggccatgggagtcagcgacaagcgggatattagccggttcctggagagcaaccccgtgatgatcgatgccaaggaagtgagcgccgcccaccgggccagatacttctggggcaatctgcctggcatgaacagacccctggccagcaccgtgaacgacaagctggagctgcaggagtgcctggagcacggccggatcgccaagttcagcaaggtgagaaccatcaccacccgaagcaacagcatcaaacaaggcaaggaccagcactttcctgtgttcatgaacgagaaggaggacatcctgtggtgtaccgagatggagagagtgttcgggttcccagtccactacacagatgtcagcaacatgtctagactggccagacagagactgctgggaagaagctggtccgtccctgtgatcagacacctgttcgcccctctgaaggagtacttcgcctgcgtgagcagcggcaacagcaacgccaacagccggggccccagcttctctagcggcctggtgccactgtccctgagagggagccacatgggccccatggagatctacaaaaccgtgagcgcctggaagcggcagcctgtgcgcgtgctgagcctgtttcggaatatcgataaagtcctgaaaagcctgggattcctggagagcggctctggctccggcggtggcaccctgaagtacgtggaggatgtgacaaacgtggtcagacgggatgtggagaagtggggccccttcgatctggtgtacggcagcacccaacccctgggcagctcttgtgaccggtgccctggctggtacatgtttcagttccaccggatcctgcagtacgccctgccgagacaggagtcccagcggccattcttttggattttcatggacaacttgctgctgaccgaggatgaccaggaaactaccactcggttcctgcagaccgaagccgtgaccctgcaggacgtgagaggccgggactaccagaacgccatgcgggtgtggtccaacatccctggactgaaaagcaagcacgcacctctgacccctaaagaagaggagtacctgcaggcccaggtgcggagcagaagcaagctggacgcccctaaggtggatctgctggtgaagaattgcctcctgcccctgagagagtacttcaagtatttcagccagaatagtctgcccctgggaggcagcggcggcggcgccctggtgacatttgaggacgtcgccgtgcggttcacccaggaggaatgggctctgctggatccttctcagaaaatcctgtaccgggacgtgatgagagagacataccggaatctgacctccgtgggcatcaactgggaatgttgggaccttgaagcctgcttcagaagcctgggaagaaacctgagagtgcaggtggtgaagagaaagtgcgagctgaccaacagcggcccctgcgccgagggcggcccaagcagcggcgcccctcctcccagcggcggcagcccagccggctccccaacctctaccgaggagggcacctctgagtccgccacccccgagagcggccctggcacctccaccgagcccagcgagggcagcgcacccggcagccctgccggcagccccacctccacagaggagggaaccagcaccgagcccagcgaaggcagcgccccaggcaccagcaccgagcctagtgagcaggagattaaacggatcaacaagatcagaagaagacttgtgaaagacagcaacaccaagaaggccggcaagacaggccccatgaaaaccctgctggttagagtgatgacacccgatctgagagagcggctggaaaacctgagaaagaagcctgaaaatatcccccagcccatcagcaatacatctagagccaacctgaataagctgctgaccgattacaccgaaatgaagaaggcgatcctgcatgtgtactgggaagagttccagaaggaccctgtgggcctgatgagccgggtggcccagcctgccagcaagaagatcgatcagaacaagctgaaacctgagatggacgagaagggcaacctgaccaccgccggctttgcctgctctcagtgtggccagcccctgttcgtgtacaagctggagcaggtgtctgagaagggcaaggcttacaccaactacttcggacggtgcaatgtggccgagcacgaaaagctgatcctgctggcccagctgaagcccgagaaggatagcgacgaagccgtgacatatagcctgggaaagtttgggcagagggccctggatttctacagcattcatgtgaccaaggagtccacccaccccgtgaagcccctggcccagatcgccggaaacagatacgcctccggacctgtgggaaaggccctgagcgacgcatgtatgggcacaatcgcctccttcctgtctaagtaccaggacatcatcatcgaacaccagaaggtggtgaagggcaaccagaagagactggagagcctgcgggagctggccggcaaggaaaacctggaataccctagcgtgaccctgccacctcagcctcacaccaaggagggcgttgatgcctacaacgaagtgatcgcccgggtgcgaatgtgggtgaacctgaacctgtggcagaagctgaagctaagcagagatgatgccaagcctctgctgagactgaagggattcccttcctttcctctggtcgagagacaggccaacgaagtggactggtgggacatggtgtgtaacgtgaagaagctgatcaacgagaaaaaggaggatggcaaggtgttttggcagaatctggctggctacaagagacaggaagccctgagaccatacctgagcagcgaggaagatcggaagaagggaaagaaattcgctcggtaccagctgggcgacctgctgctgcacctggaaaagaagcacggcgaggactggggaaaggtgtacgacgaggcctgggagcggattgacaagaaagtggaaggcctgagcaagcacatcaagctggaagaggaacggagaagcgaggacgcccagagcaaggccgccctgaccgactggctgcgggctaaggccagcttcgtgatcgagggcctgaaggaggccgacaaggacgagttctgcagatgcgagctgaagctgcagaagtggtacggggacctgcggggaaagcccttcgccatcgaagccgagaacagcatcctggacatcagcggcttcagcaagcagtacaactgtgccttcatctggcagaaggacggcgtgaagaagctgaacctgtacctgatcatcaactacttcaagggcggcaagctgcggttcaagaagatcaaacctgaagccttcgaagccaacagattctacaccgtgatcaacaaaaagagcggcgagatcgtgcccatggaggtgaacttcaacttcgacgaccccaacctgatcatcctgcctctggcctttggcaagagacagggcagagaattcatctggaacgacctgctgtccctggaaaccggcagcctgaagctggccaacggaagagtgatcgagaagacactgtacaacagaagaacccggcaggatgagcctgccctgttcgtggccctgaccttcgagcggcgggaggtcctggactcctccaatatcaaaccaatgaacctgatcggcgtggcaagaggcgaaaacatccccgccgtgatcgccctgaccgaccccgagggctgcccactgagccggtttaaggatagcctgggaaacccaacccacatcctgagaatcggcgagagctataaggagaagcagcggaccatccaggccaagaaggaggtggagcagcggagagccggcggctacagccggaagtacgccagcaaagccaagaatctggcagacgatatggtgagaaacaccgctagagatctgctgtactacgccgtgacccaggatgccatgctgatcttcgccaacctgagccggggcttcggccggcagggcaagcggaccttcatggccgagagacagtacacacggatggaggactggctgaccgccaagctggcctacgagggcctgagcaagacctacctgtccaagacactggcccagtacacctccaagacatgcagcaactgtgggtttaccatcaccagcgccgactacgacagggtgctggagaagctgaagaagacagcaacaggctggatgaccacaattaacggcaaggagctgaaggtggagggccagattacctactacaacagatacaagagacagaacgtagtcaaggacctgtccgtcgagctggatagactgagcgaagaatctgtgaacaacgacatctcctcctggacaaagggcagaagcggagaagctctgagcctcctgaagaaaagattctcccatagacccgtgcaggagaagttcgtgtgcctgaactgcggcttcgagacacacgcagccgagcaagccgccctgaacatcgccagatcctggctgttcctgcggagccaggagtacaagaaataccagacaaacaagacaaccggcaacaccgataagagagccttcgtcgagacctggcagtccttttaccggaagaagcttaaggaggtgtggaaacctgccgtgcggtctggcggatctggcggaggctccctgcaggtgagcgtgagcttcgaggacgtgaccgtggacttcagcagggaggagtggcagcacctggaccccgcccagaggaggctgtacagggacgtgaccctggagaactacagccacctgcacagcgtgggctaccaggtgcccaagcccgaggtgatcttcaagctggagcagggcgagggcccctggaccctggagggcgagaccccccaccagggctgcagcgacgaggccatcggcggcggcccaagcagcggcgcccctcctcccagcggcggcagcccagccggctccccaacctctaccgaggagggcacctctgagtccgccacccccgagagcggccctggcacctccaccgagcccagcgagggcagcgcacccggcagccctgccggcagccccacctccacagaggagggaaccagcaccgagcccagcgaaggcagcgccccaggcaccagcaccgagcctagtgagcaggagattaaacggatcaacaagatcagaagaagacttgtgaaagacagcaacaccaagaaggccggcaagacaggccccatgaaaaccctgctggttagagtgatgacacccgatctgagagagcggctggaaaacctgagaaagaagcctgaaaatatcccccagcccatcagcaatacatctagagccaacctgaataagctgctgaccgattacaccgaaatgaagaaggcgatcctgcatgtgtactgggaagagttccagaaggaccctgtgggcctgatgagccgggtggcccagcctgccagcaagaagatcgatcagaacaagctgaaacctgagatggacgagaagggcaacctgaccaccgccggctttgcctgctctcagtgtggccagcccctgttcgtgtacaagctggagcaggtgtctgagaagggcaaggcttacaccaactacttcggacggtgcaatgtggccgagcacgaaaagctgatcctgctggcccagctgaagcccgagaaggatagcgacgaagccgtgacatatagcctgggaaagtttgggcagagggccctggatttctacagcattcatgtgaccaaggagtccacccaccccgtgaagcccctggcccagatcgccggaaacagatacgcctccggacctgtgggaaaggccctgagcgacgcatgtatgggcacaatcgcctccttcctgtctaagtaccaggacatcatcatcgaacaccagaaggtggtgaagggcaaccagaagagactggagagcctgcgggagctggccggcaaggaaaacctggaataccctagcgtgaccctgccacctcagcctcacaccaaggagggcgttgatgcctacaacgaagtgatcgcccgggtgcgaatgtgggtgaacctgaacctgtggcagaagctgaagctaagcagagatgatgccaagcctctgctgagactgaagggattcccttcctttcctctggtcgagagacaggccaacgaagtggactggtgggacatggtgtgtaacgtgaagaagctgatcaacgagaaaaaggaggatggcaaggtgttttggcagaatctggctggctacaagagacaggaagccctgagaccatacctgagcagcgaggaagatcggaagaagggaaagaaattcgctcggtaccagctgggcgacctgctgctgcacctggaaaagaagcacggcgaggactggggaaaggtgtacgacgaggcctgggagcggattgacaagaaagtggaaggcctgagcaagcacatcaagctggaagaggaacggagaagcgaggacgcccagagcaaggccgccctgaccgactggctgcgggctaaggccagcttcgtgatcgagggcctgaaggaggccgacaaggacgagttctgcagatgcgagctgaagctgcagaagtggtacggggacctgcggggaaagcccttcgccatcgaagccgagaacagcatcctggacatcagcggcttcagcaagcagtacaactgtgccttcatctggcagaaggacggcgtgaagaagctgaacctgtacctgatcatcaactacttcaagggcggcaagctgcggttcaagaagatcaaacctgaagccttcgaagccaacagattctacaccgtgatcaacaaaaagagcggcgagatcgtgcccatggaggtgaacttcaacttcgacgaccccaacctgatcatcctgcctctggcctttggcaagagacagggcagagaattcatctggaacgacctgctgtccctggaaaccggcagcctgaagctggccaacggaagagtgatcgagaagacactgtacaacagaagaacccggcaggatgagcctgccctgttcgtggccctgaccttcgagcggcgggaggtcctggactcctccaatatcaaaccaatgaacctgatcggcgtggcaagaggcgaaaacatccccgccgtgatcgccctgaccgaccccgagggctgcccactgagccggtttaaggatagcctgggaaacccaacccacatcctgagaatcggcgagagctataaggagaagcagcggaccatccaggccaagaaggaggtggagcagcggagagccggcggctacagccggaagtacgccagcaaagccaagaatctggcagacgatatggtgagaaacaccgctagagatctgctgtactacgccgtgacccaggatgccatgctgatcttcgccaacctgagccggggcttcggccggcagggcaagcggaccttcatggccgagagacagtacacacggatggaggactggctgaccgccaagctggcctacgagggcctgagcaagacctacctgtccaagacactggcccagtacacctccaagacatgcagcaactgtgggtttaccatcaccagcgccgactacgacagggtgctggagaagctgaagaagacagcaacaggctggatgaccacaattaacggcaaggagctgaaggtggagggccagattacctactacaacagatacaagagacagaacgtagtcaaggacctgtccgtcgagctggatagactgagcgaagaatctgtgaacaacgacatctcctcctggacaaagggcagaagcggagaagctctgagcctcctgaagaaaagattctcccatagacccgtgcaggagaagttcgtgtgcctgaactgcggcttcgagacacacgcagccgagcaagccgccctgaacatcgccagatcctggctgttcctgcggagccaggagtacaagaaataccagacaaacaagacaaccggcaacaccgataagagagccttcgtcgagacctggcagtccttttaccggaagaagcttaaggaggtgtggaaacctgccgtgcggtctggcggatctggcggaggctcctctgcaggtgagcgtgagcttcgaggacgtgaccgtggacttcagcagggaggagtggcagcacctggaccccgcccagaggaggctgtacagggacgtgaccctggagaactacagccacctgcacagcgtgggctaccaggtgcccaagcccgaggtgatcttcaagctggagcagggcgagggcccctggaccctggagggcgagaccccccaccagggctgcagcgacgaggccatcggcggatctggctccggcagcggccccaagaaaaagagaaaagtctaagctgccttctgcggggcttgccttctggccatgcccttcttctctcccttgcacctgtacctcttggtctttgaataaagcctgagtaggaaggctagcaaaaaaaaaaaaaaaaaaaaaaaaaaaaaaaaaaaaaaaaaaaaaaaaaaaaaaaaaaaaaaaaaaaaaaaaaaaaaaaa

SEQ ID NO: 15812 - RNA, 9485 nt, synthetic construct
  source 1..9485: mol_type = other RNA
aggaaataagagagaaaagaagagtaagaagaaatataagagccaccatggcccctaagaagaagcgtaaagtgagccggatggaacgcctcgtctacgaggtgcggcagaagtgcagaaacatcgaggacatctgcatctcctgcggatctctgaacgtgaccctggagcacccactgttcatcggcggcatgtgccagaactgtaaaaactgttttctggagtgtgcctatcaatacgacgatgacggctaccagagctactgcaccatctgttgcggcggaagagaggtgctgatgtgtggaaataacaactgctgccggtgcttctgcgtggaatgcgtggacctgctggtgggccccggcgccgcccaggccgctattaaggaagatccttggaactgctacatgtgcggccacaagggcacatacggcctgctgagacggagagaggactggcctagcagactgcagatgttcttcgccaataaccacgaccaggagttcgacccccctaaggtgtaccctcccgtccccgccgagaagagaaagcccatccgggtcctgagcctgttcgatggcatcgccaccggtctgctggtgctgaaggacctgggcatccaggtggataggtacattgcctccgaggtgtgcgaggactccatcaccgtgggaatggtgcgtcatcagggcaagatcatgtacgtgggcgacgtgcggagcgtgacacagaagcatatccaggagtggggccctttcgacctggtgatcggcggcagcccttgcaatgacctgagcatcgtgaacccagcccggaagggcctgtacgagggaaccggcagactgttcttcgagttttacagactgctgcacgacgcccggcctaaggaaggcgacgaccggcccttcttttggctgttcgagaatgtggtggccatgggagtcagcgacaagcgggatattagccggttcctggagagcaaccccgtgatgatcgatgccaaggaagtgagcgccgcccaccgggccagatacttctggggcaatctgcctggcatgaacagacccctggccagcaccgtgaacgacaagctggagctgcaggagtgcctggagcacggccggatcgccaagttcagcaaggtgagaaccatcaccacccgaagcaacagcatcaaacaaggcaaggaccagcactttcctgtgttcatgaacgagaaggaggacatcctgtggtgtaccgagatggagagagtgttcgggttcccagtccactacacagatgtcagcaacatgtctagactggccagacagagactgctgggaagaagctggtccgtccctgtgatcagacacctgttcgcccctctgaaggagtacttcgcctgcgtgagcagcggcaacagcaacgccaacagccggggccccagcttctctagcggcctggtgccactgtccctgagagggagccacatgggccccatggagatctacaaaaccgtgagcgcctggaagcggcagcctgtgcgcgtgctgagcctgtttcggaatatcgataaagtcctgaaaagcctgggattcctggagagcggctctggctccggcggtggcaccctgaagtacgtggaggatgtgacaaacgtggtcagacgggatgtggagaagtggggccccttcgatctggtgtacggcagcacccaacccctgggcagctcttgtgaccggtgccctggctggtacatgtttcagttccaccggatcctgcagtacgccctgccgagacaggagtcccagcggccattcttttggattttcatggacaacttgctgctgaccgaggatgaccaggaaactaccactcggttcctgcagaccgaagccgtgaccctgcaggacgtgagaggccgggactaccagaacgccatgcgggtgtggtccaacatccctggactgaaaagcaagcacgcacctctgacccctaaagaagaggagtacctgcaggcccaggtgcggagcagaagcaagctggacgcccctaaggtggatctgctggtgaagaattgcctcctgcccctgagagagtacttcaagtatttcagccagaatagtctgcccctgggaggcagcggcggcggcgccctggtgacatttgaggacgtcgccgtgcggttcacccaggaggaatgggctctgctggatccttctcagaaaatcctgtaccgggacgtgatgagagagacataccggaatctgacctccgtgggcatcaactgggaatgttgggaccttgaagcctgcttcagaagcctgggaagaaacctgagagtgcaggtggtgaagagaaagtgcgagctgaccaacagcggcccctgcgccgagggcggcccaagcagcggcgcccctcctcccagcggcggcagcccagccggctccccaacctctaccgaggagggcacctctgagtccgccacccccgagagcggccctggcacctccaccgagcccagcgagggcagcgcacccggcagccctgccggcagccccacctccacagaggagggaaccagcaccgagcccagcgaaggcagcgccccaggcaccagcaccgagcctagtgagcaggagattaaacggatcaacaagatcagaagaagacttgtgaaagacagcaacaccaagaaggccggcaagacaggccccatgaaaaccctgctggttagagtgatgacacccgatctgagagagcggctggaaaacctgagaaagaagcctgaaaatatcccccagcccatcagcaatacatctagagccaacctgaataagctgctgaccgattacaccgaaatgaagaaggcgatcctgcatgtgtactgggaagagttccagaaggaccctgtgggcctgatgagccgggtggcccagcctgccagcaagaagatcgatcagaacaagctgaaacctgagatggacgagaagggcaacctgaccaccgccggctttgcctgctctcagtgtggccagcccctgttcgtgtacaagctggagcaggtgtctgagaagggcaaggcttacaccaactacttcggacggtgcaatgtggccgagcacgaaaagctgatcctgctggcccagctgaagcccgagaaggatagcgacgaagccgtgacatatagcctgggaaagtttgggcagagggccctggatttctacagcattcatgtgaccaaggagtccacccaccccgtgaagcccctggcccagatcgccggaaacagatacgcctccggacctgtgggaaaggccctgagcgacgcatgtatgggcacaatcgcctccttcctgtctaagtaccaggacatcatcatcgaacaccagaaggtggtgaagggcaaccagaagagactggagagcctgcgggagctggccggcaaggaaaacctggaataccctagcgtgaccctgccacctcagcctcacaccaaggagggcgttgatgcctacaacgaagtgatcgcccgggtgcgaatgtgggtgaacctgaacctgtggcagaagctgaagctaagcagagatgatgccaagcctctgctgagactgaagggattcccttcctttcctctggtcgagagacaggccaacgaagtggactggtgggacatggtgtgtaacgtgaagaagctgatcaacgagaaaaaggaggatggcaaggtgttttggcagaatctggctggctacaagagacaggaagccctgagaccatacctgagcagcgaggaagatcggaagaagggaaagaaattcgctcggtaccagctgggcgacctgctgctgcacctggaaaagaagcacggcgaggactggggaaaggtgtacgacgaggcctgggagcggattgacaagaaagtggaaggcctgagcaagcacatcaagctggaagaggaacggagaagcgaggacgcccagagcaaggccgccctgaccgactggctgcgggctaaggccagcttcgtgatcgagggcctgaaggaggccgacaaggacgagttctgcagatgcgagctgaagctgcagaagtggtacggggacctgcggggaaagcccttcgccatcgaagccgagaacagcatcctggacatcagcggcttcagcaagcagtacaactgtgccttcatctggcagaaggacggcgtgaagaagctgaacctgtacctgatcatcaactacttcaagggcggcaagctgcggttcaagaagatcaaacctgaagccttcgaagccaacagattctacaccgtgatcaacaaaaagagcggcgagatcgtgcccatggaggtgaacttcaacttcgacgaccccaacctgatcatcctgcctctggcctttggcaagagacagggcagagaattcatctggaacgacctgctgtccctggaaaccggcagcctgaagctggccaacggaagagtgatcgagaagacactgtacaacagaagaacccggcaggatgagcctgccctgttcgtggccctgaccttcgagcggcgggaggtcctggactcctccaatatcaaaccaatgaacctgatcggcgtggcaagaggcgaaaacatccccgccgtgatcgccctgaccgaccccgagggctgcccactgagccggtttaaggatagcctgggaaacccaacccacatcctgagaatcggcgagagctataaggagaagcagcggaccatccaggccaagaaggaggtggagcagcggagagccggcggctacagccggaagtacgccagcaaagccaagaatctggcagacgatatggtgagaaacaccgctagagatctgctgtactacgccgtgacccaggatgccatgctgatcttcgccaacctgagccggggcttcggccggcagggcaagcggaccttcatggccgagagacagtacacacggatggaggactggctgaccgccaagctggcctacgagggcctgagcaagacctacctgtccaagacactggcccagtacacctccaagacatgcagcaactgtgggtttaccatcaccagcgccgactacgacagggtgctggagaagctgaagaagacagcaacaggctggatgaccacaattaacggcaaggagctgaaggtggagggccagattacctactacaacagatacaagagacagaacgtagtcaaggacctgtccgtcgagctggatagactgagcgaagaatctgtgaacaacgacatctcctcctggacaaagggcagaagcggagaagctctgagcctcctgaagaaaagattctcccatagacccgtgcaggagaagttcgtgtgcctgaactgcggcttcgagacacacgcagccgagcaagccgccctgaacatcgccagatcctggctgttcctgcggagccaggagtacaagaaataccagacaaacaagacaaccggcaacaccgataagagagccttcgtcgagacctggcagtccttttaccggaagaagcttaaggaggtgtggaaacctgccgtgcggtctggcggatctggcggaggctccagcctgggcagcgacctgttcagggacgtggccatcgtgttcagccaggaggagtgggagcagctggcccccacccagagggacctgtacagggacgtgatgctggagacctacagcaacctggtgagcctgggcctggccgtgagcaagcccgacgtgatcagcttcctggagcagggcaaggagccctggaccgtggaggaggtggccgccggcggcctgtgccccgtgctgaagagcaggggcggcccaagcagcggcgcccctcctcccagcggcggcagcccagccggctccccaacctctaccgaggagggcacctctgagtccgccacccccgagagcggccctggcacctccaccgagcccagcgagggcagcgcacccggcagccctgccggcagccccacctccacagaggagggaaccagcaccgagcccagcgaaggcagcgccccaggcaccagcaccgagcctagtgagcaggagattaaacggatcaacaagatcagaagaagacttgtgaaagacagcaacaccaagaaggccggcaagacaggccccatgaaaaccctgctggttagagtgatgacacccgatctgagagagcggctggaaaacctgagaaagaagcctgaaaatatcccccagcccatcagcaatacatctagagccaacctgaataagctgctgaccgattacaccgaaatgaagaaggcgatcctgcatgtgtactgggaagagttccagaaggaccctgtgggcctgatgagccgggtggcccagcctgccagcaagaagatcgatcagaacaagctgaaacctgagatggacgagaagggcaacctgaccaccgccggctttgcctgctctcagtgtggccagcccctgttcgtgtacaagctggagcaggtgtctgagaagggcaaggcttacaccaactacttcggacggtgcaatgtggccgagcacgaaaagctgatcctgctggcccagctgaagcccgagaaggatagcgacgaagccgtgacatatagcctgggaaagtttgggcagagggccctggatttctacagcattcatgtgaccaaggagtccacccaccccgtgaagcccctggcccagatcgccggaaacagatacgcctccggacctgtgggaaaggccctgagcgacgcatgtatgggcacaatcgcctccttcctgtctaagtaccaggacatcatcatcgaacaccagaaggtggtgaagggcaaccagaagagactggagagcctgcgggagctggccggcaaggaaaacctggaataccctagcgtgaccctgccacctcagcctcacaccaaggagggcgttgatgcctacaacgaagtgatcgcccgggtgcgaatgtgggtgaacctgaacctgtggcagaagctgaagctaagcagagatgatgccaagcctctgctgagactgaagggattcccttcctttcctctggtcgagagacaggccaacgaagtggactggtgggacatggtgtgtaacgtgaagaagctgatcaacgagaaaaaggaggatggcaaggtgttttggcagaatctggctggctacaagagacaggaagccctgagaccatacctgagcagcgaggaagatcggaagaagggaaagaaattcgctcggtaccagctgggcgacctgctgctgcacctggaaaagaagcacggcgaggactggggaaaggtgtacgacgaggcctgggagcggattgacaagaaagtggaaggcctgagcaagcacatcaagctggaagaggaacggagaagcgaggacgcccagagcaaggccgccctgaccgactggctgcgggctaaggccagcttcgtgatcgagggcctgaaggaggccgacaaggacgagttctgcagatgcgagctgaagctgcagaagtggtacggggacctgcggggaaagcccttcgccatcgaagccgagaacagcatcctggacatcagcggcttcagcaagcagtacaactgtgccttcatctggcagaaggacggcgtgaagaagctgaacctgtacctgatcatcaactacttcaagggcggcaagctgcggttcaagaagatcaaacctgaagccttcgaagccaacagattctacaccgtgatcaacaaaaagagcggcgagatcgtgcccatggaggtgaacttcaacttcgacgaccccaacctgatcatcctgcctctggcctttggcaagagacagggcagagaattcatctggaacgacctgctgtccctggaaaccggcagcctgaagctggccaacggaagagtgatcgagaagacactgtacaacagaagaacccggcaggatgagcctgccctgttcgtggccctgaccttcgagcggcgggaggtcctggactcctccaatatcaaaccaatgaacctgatcggcgtggcaagaggcgaaaacatccccgccgtgatcgccctgaccgaccccgagggctgcccactgagccggtttaaggatagcctgggaaacccaacccacatcctgagaatcggcgagagctataaggagaagcagcggaccatccaggccaagaaggaggtggagcagcggagagccggcggctacagccggaagtacgccagcaaagccaagaatctggcagacgatatggtgagaaacaccgctagagatctgctgtactacgccgtgacccaggatgccatgctgatcttcgccaacctgagccggggcttcggccggcagggcaagcggaccttcatggccgagagacagtacacacggatggaggactggctgaccgccaagctggcctacgagggcctgagcaagacctacctgtccaagacactggcccagtacacctccaagacatgcagcaactgtgggtttaccatcaccagcgccgactacgacagggtgctggagaagctgaagaagacagcaacaggctggatgaccacaattaacggcaaggagctgaaggtggagggccagattacctactacaacagatacaagagacagaacgtagtcaaggacctgtccgtcgagctggatagactgagcgaagaatctgtgaacaacgacatctcctcctggacaaagggcagaagcggagaagctctgagcctcctgaagaaaagattctcccatagacccgtgcaggagaagttcgtgtgcctgaactgcggcttcgagacacacgcagccgagcaagccgccctgaacatcgccagatcctggctgttcctgcggagccaggagtacaagaaataccagacaaacaagacaaccggcaacaccgataagagagccttcgtcgagacctggcagtccttttaccggaagaagcttaaggaggtgtggaaacctgccgtgcggtctggcggatctggcggaggctcctagcctgggcagcgacctgttcagggacgtggccatcgtgttcagccaggaggagtgggagcagctggcccccacccagagggacctgtacagggacgtgatgctggagacctacagcaacctggtgagcctgggcctggccgtgagcaagcccgacgtgatcagcttcctggagcagggcaaggagccctggaccgtggaggaggtggccgccggcggcctgtgccccgtgctgaagagcaggggatctggctccggcagcggccccaagaaaaagagaaaagtctaagctgccttctgcggggcttgccttctggccatgcccttcttctctcccttgcacctgtacctcttggtctttgaataaagcctgagtaggaaggctagcaaaaaaaaaaaaaaaaaaaaaaaaaaaaaaaaaaaaaaaaaaaaaaaaaaaaaaaaaaaaaaaaaaaaaaaaaaaaaaaa

SEQ ID NO: 15813 - RNA, 9485 nt, synthetic construct
  source 1..9485: mol_type = other RNA
aggaaataagagagaaaagaagagtaagaagaaatataagagccaccatggcccctaagaagaagcgtaaagtgagccggatggaacgcctcgtctacgaggtgcggcagaagtgcagaaacatcgaggacatctgcatctcctgcggatctctgaacgtgaccctggagcacccactgttcatcggcggcatgtgccagaactgtaaaaactgttttctggagtgtgcctatcaatacgacgatgacggctaccagagctactgcaccatctgttgcggcggaagagaggtgctgatgtgtggaaataacaactgctgccggtgcttctgcgtggaatgcgtggacctgctggtgggccccggcgccgcccaggccgctattaaggaagatccttggaactgctacatgtgcggccacaagggcacatacggcctgctgagacggagagaggactggcctagcagactgcagatgttcttcgccaataaccacgaccaggagttcgacccccctaaggtgtaccctcccgtccccgccgagaagagaaagcccatccgggtcctgagcctgttcgatggcatcgccaccggtctgctggtgctgaaggacctgggcatccaggtggataggtacattgcctccgaggtgtgcgaggactccatcaccgtgggaatggtgcgtcatcagggcaagatcatgtacgtgggcgacgtgcggagcgtgacacagaagcatatccaggagtggggccctttcgacctggtgatcggcggcagcccttgcaatgacctgagcatcgtgaacccagcccggaagggcctgtacgagggaaccggcagactgttcttcgagttttacagactgctgcacgacgcccggcctaaggaaggcgacgaccggcccttcttttggctgttcgagaatgtggtggccatgggagtcagcgacaagcgggatattagccggttcctggagagcaaccccgtgatgatcgatgccaaggaagtgagcgccgcccaccgggccagatacttctggggcaatctgcctggcatgaacagacccctggccagcaccgtgaacgacaagctggagctgcaggagtgcctggagcacggccggatcgccaagttcagcaaggtgagaaccatcaccacccgaagcaacagcatcaaacaaggcaaggaccagcactttcctgtgttcatgaacgagaaggaggacatcctgtggtgtaccgagatggagagagtgttcgggttcccagtccactacacagatgtcagcaacatgtctagactggccagacagagactgctgggaagaagctggtccgtccctgtgatcagacacctgttcgcccctctgaaggagtacttcgcctgcgtgagcagcggcaacagcaacgccaacagccggggccccagcttctctagcggcctggtgccactgtccctgagagggagccacatgggccccatggagatctacaaaaccgtgagcgcctggaagcggcagcctgtgcgcgtgctgagcctgtttcggaatatcgataaagtcctgaaaagcctgggattcctggagagcggctctggctccggcggtggcaccctgaagtacgtggaggatgtgacaaacgtggtcagacgggatgtggagaagtggggccccttcgatctggtgtacggcagcacccaacccctgggcagctcttgtgaccggtgccctggctggtacatgtttcagttccaccggatcctgcagtacgccctgccgagacaggagtcccagcggccattcttttggattttcatggacaacttgctgctgaccgaggatgaccaggaaactaccactcggttcctgcagaccgaagccgtgaccctgcaggacgtgagaggccgggactaccagaacgccatgcgggtgtggtccaacatccctggactgaaaagcaagcacgcacctctgacccctaaagaagaggagtacctgcaggcccaggtgcggagcagaagcaagctggacgcccctaaggtggatctgctggtgaagaattgcctcctgcccctgagagagtacttcaagtatttcagccagaatagtctgcccctgggaggcagcggcggcggcgccctggtgacatttgaggacgtcgccgtgcggttcacccaggaggaatgggctctgctggatccttctcagaaaatcctgtaccgggacgtgatgagagagacataccggaatctgacctccgtgggcatcaactgggaatgttgggaccttgaagcctgcttcagaagcctgggaagaaacctgagagtgcaggtggtgaagagaaagtgcgagctgaccaacagcggcccctgcgccgagggcggcccaagcagcggcgcccctcctcccagcggcggcagcccagccggctccccaacctctaccgaggagggcacctctgagtccgccacccccgagagcggccctggcacctccaccgagcccagcgagggcagcgcacccggcagccctgccggcagccccacctccacagaggagggaaccagcaccgagcccagcgaaggcagcgccccaggcaccagcaccgagcctagtgagcaggagattaaacggatcaacaagatcagaagaagacttgtgaaagacagcaacaccaagaaggccggcaagacaggccccatgaaaaccctgctggttagagtgatgacacccgatctgagagagcggctggaaaacctgagaaagaagcctgaaaatatcccccagcccatcagcaatacatctagagccaacctgaataagctgctgaccgattacaccgaaatgaagaaggcgatcctgcatgtgtactgggaagagttccagaaggaccctgtgggcctgatgagccgggtggcccagcctgccagcaagaagatcgatcagaacaagctgaaacctgagatggacgagaagggcaacctgaccaccgccggctttgcctgctctcagtgtggccagcccctgttcgtgtacaagctggagcaggtgtctgagaagggcaaggcttacaccaactacttcggacggtgcaatgtggccgagcacgaaaagctgatcctgctggcccagctgaagcccgagaaggatagcgacgaagccgtgacatatagcctgggaaagtttgggcagagggccctggatttctacagcattcatgtgaccaaggagtccacccaccccgtgaagcccctggcccagatcgccggaaacagatacgcctccggacctgtgggaaaggccctgagcgacgcatgtatgggcacaatcgcctccttcctgtctaagtaccaggacatcatcatcgaacaccagaaggtggtgaagggcaaccagaagagactggagagcctgcgggagctggccggcaaggaaaacctggaataccctagcgtgaccctgccacctcagcctcacaccaaggagggcgttgatgcctacaacgaagtgatcgcccgggtgcgaatgtgggtgaacctgaacctgtggcagaagctgaagctaagcagagatgatgccaagcctctgctgagactgaagggattcccttcctttcctctggtcgagagacaggccaacgaagtggactggtgggacatggtgtgtaacgtgaagaagctgatcaacgagaaaaaggaggatggcaaggtgttttggcagaatctggctggctacaagagacaggaagccctgagaccatacctgagcagcgaggaagatcggaagaagggaaagaaattcgctcggtaccagctgggcgacctgctgctgcacctggaaaagaagcacggcgaggactggggaaaggtgtacgacgaggcctgggagcggattgacaagaaagtggaaggcctgagcaagcacatcaagctggaagaggaacggagaagcgaggacgcccagagcaaggccgccctgaccgactggctgcgggctaaggccagcttcgtgatcgagggcctgaaggaggccgacaaggacgagttctgcagatgcgagctgaagctgcagaagtggtacggggacctgcggggaaagcccttcgccatcgaagccgagaacagcatcctggacatcagcggcttcagcaagcagtacaactgtgccttcatctggcagaaggacggcgtgaagaagctgaacctgtacctgatcatcaactacttcaagggcggcaagctgcggttcaagaagatcaaacctgaagccttcgaagccaacagattctacaccgtgatcaacaaaaagagcggcgagatcgtgcccatggaggtgaacttcaacttcgacgaccccaacctgatcatcctgcctctggcctttggcaagagacagggcagagaattcatctggaacgacctgctgtccctggaaaccggcagcctgaagctggccaacggaagagtgatcgagaagacactgtacaacagaagaacccggcaggatgagcctgccctgttcgtggccctgaccttcgagcggcgggaggtcctggactcctccaatatcaaaccaatgaacctgatcggcgtggcaagaggcgaaaacatccccgccgtgatcgccctgaccgaccccgagggctgcccactgagccggtttaaggatagcctgggaaacccaacccacatcctgagaatcggcgagagctataaggagaagcagcggaccatccaggccaagaaggaggtggagcagcggagagccggcggctacagccggaagtacgccagcaaagccaagaatctggcagacgatatggtgagaaacaccgctagagatctgctgtactacgccgtgacccaggatgccatgctgatcttcgccaacctgagccggggcttcggccggcagggcaagcggaccttcatggccgagagacagtacacacggatggaggactggctgaccgccaagctggcctacgagggcctgagcaagacctacctgtccaagacactggcccagtacacctccaagacatgcagcaactgtgggtttaccatcaccagcgccgactacgacagggtgctggagaagctgaagaagacagcaacaggctggatgaccacaattaacggcaaggagctgaaggtggagggccagattacctactacaacagatacaagagacagaacgtagtcaaggacctgtccgtcgagctggatagactgagcgaagaatctgtgaacaacgacatctcctcctggacaaagggcagaagcggagaagctctgagcctcctgaagaaaagattctcccatagacccgtgcaggagaagttcgtgtgcctgaactgcggcttcgagacacacgcagccgagcaagccgccctgaacatcgccagatcctggctgttcctgcggagccaggagtacaagaaataccagacaaacaagacaaccggcaacaccgataagagagccttcgtcgagacctggcagtccttttaccggaagaagcttaaggaggtgtggaaacctgccgtgcggtctggcggatctggcggaggctccgccagcgtgaccgtgaccttcgacgacgtggccctgtacttcagcgagcaggagtgggagatcctggagaagtggcagaagcagatgtacaagcaggagatgaagaccaactaccagaccctggacagcctgggctacgccttcagcaagcccgacctgatcacctggatggagcagggcaggatgctgttcatcagcgagcagggctgcctggacaagaccaggaggaccaccagcccccccggcggcccaagcagcggcgcccctcctcccagcggcggcagcccagccggctccccaacctctaccgaggagggcacctctgagtccgccacccccgagagcggccctggcacctccaccgagcccagcgagggcagcgcacccggcagccctgccggcagccccacctccacagaggagggaaccagcaccgagcccagcgaaggcagcgccccaggcaccagcaccgagcctagtgagcaggagattaaacggatcaacaagatcagaagaagacttgtgaaagacagcaacaccaagaaggccggcaagacaggccccatgaaaaccctgctggttagagtgatgacacccgatctgagagagcggctggaaaacctgagaaagaagcctgaaaatatcccccagcccatcagcaatacatctagagccaacctgaataagctgctgaccgattacaccgaaatgaagaaggcgatcctgcatgtgtactgggaagagttccagaaggaccctgtgggcctgatgagccgggtggcccagcctgccagcaagaagatcgatcagaacaagctgaaacctgagatggacgagaagggcaacctgaccaccgccggctttgcctgctctcagtgtggccagcccctgttcgtgtacaagctggagcaggtgtctgagaagggcaaggcttacaccaactacttcggacggtgcaatgtggccgagcacgaaaagctgatcctgctggcccagctgaagcccgagaaggatagcgacgaagccgtgacatatagcctgggaaagtttgggcagagggccctggatttctacagcattcatgtgaccaaggagtccacccaccccgtgaagcccctggcccagatcgccggaaacagatacgcctccggacctgtgggaaaggccctgagcgacgcatgtatgggcacaatcgcctccttcctgtctaagtaccaggacatcatcatcgaacaccagaaggtggtgaagggcaaccagaagagactggagagcctgcgggagctggccggcaaggaaaacctggaataccctagcgtgaccctgccacctcagcctcacaccaaggagggcgttgatgcctacaacgaagtgatcgcccgggtgcgaatgtgggtgaacctgaacctgtggcagaagctgaagctaagcagagatgatgccaagcctctgctgagactgaagggattcccttcctttcctctggtcgagagacaggccaacgaagtggactggtgggacatggtgtgtaacgtgaagaagctgatcaacgagaaaaaggaggatggcaaggtgttttggcagaatctggctggctacaagagacaggaagccctgagaccatacctgagcagcgaggaagatcggaagaagggaaagaaattcgctcggtaccagctgggcgacctgctgctgcacctggaaaagaagcacggcgaggactggggaaaggtgtacgacgaggcctgggagcggattgacaagaaagtggaaggcctgagcaagcacatcaagctggaagaggaacggagaagcgaggacgcccagagcaaggccgccctgaccgactggctgcgggctaaggccagcttcgtgatcgagggcctgaaggaggccgacaaggacgagttctgcagatgcgagctgaagctgcagaagtggtacggggacctgcggggaaagcccttcgccatcgaagccgagaacagcatcctggacatcagcggcttcagcaagcagtacaactgtgccttcatctggcagaaggacggcgtgaagaagctgaacctgtacctgatcatcaactacttcaagggcggcaagctgcggttcaagaagatcaaacctgaagccttcgaagccaacagattctacaccgtgatcaacaaaaagagcggcgagatcgtgcccatggaggtgaacttcaacttcgacgaccccaacctgatcatcctgcctctggcctttggcaagagacagggcagagaattcatctggaacgacctgctgtccctggaaaccggcagcctgaagctggccaacggaagagtgatcgagaagacactgtacaacagaagaacccggcaggatgagcctgccctgttcgtggccctgaccttcgagcggcgggaggtcctggactcctccaatatcaaaccaatgaacctgatcggcgtggcaagaggcgaaaacatccccgccgtgatcgccctgaccgaccccgagggctgcccactgagccggtttaaggatagcctgggaaacccaacccacatcctgagaatcggcgagagctataaggagaagcagcggaccatccaggccaagaaggaggtggagcagcggagagccggcggctacagccggaagtacgccagcaaagccaagaatctggcagacgatatggtgagaaacaccgctagagatctgctgtactacgccgtgacccaggatgccatgctgatcttcgccaacctgagccggggcttcggccggcagggcaagcggaccttcatggccgagagacagtacacacggatggaggactggctgaccgccaagctggcctacgagggcctgagcaagacctacctgtccaagacactggcccagtacacctccaagacatgcagcaactgtgggtttaccatcaccagcgccgactacgacagggtgctggagaagctgaagaagacagcaacaggctggatgaccacaattaacggcaaggagctgaaggtggagggccagattacctactacaacagatacaagagacagaacgtagtcaaggacctgtccgtcgagctggatagactgagcgaagaatctgtgaacaacgacatctcctcctggacaaagggcagaagcggagaagctctgagcctcctgaagaaaagattctcccatagacccgtgcaggagaagttcgtgtgcctgaactgcggcttcgagacacacgcagccgagcaagccgccctgaacatcgccagatcctggctgttcctgcggagccaggagtacaagaaataccagacaaacaagacaaccggcaacaccgataagagagccttcgtcgagacctggcagtccttttaccggaagaagcttaaggaggtgtggaaacctgccgtgcggtctggcggatctggcggaggctcctgccagcgtgaccgtgaccttcgacgacgtggccctgtacttcagcgagcaggagtgggagatcctggagaagtggcagaagcagatgtacaagcaggagatgaagaccaactaccagaccctggacagcctgggctacgccttcagcaagcccgacctgatcacctggatggagcagggcaggatgctgttcatcagcgagcagggctgcctggacaagaccaggaggaccaccagcccccccggatctggctccggcagcggccccaagaaaaagagaaaagtctaagctgccttctgcggggcttgccttctggccatgcccttcttctctcccttgcacctgtacctcttggtctttgaataaagcctgagtaggaaggctagcaaaaaaaaaaaaaaaaaaaaaaaaaaaaaaaaaaaaaaaaaaaaaaaaaaaaaaaaaaaaaaaaaaaaaaaaaaaaaaaa

SEQ ID NO: 15814 - RNA, 9485 nt, synthetic construct
  source 1..9485: mol_type = other RNA
aggaaataagagagaaaagaagagtaagaagaaatataagagccaccatggcccctaagaagaagcgtaaagtgagccggatggaacgcctcgtctacgaggtgcggcagaagtgcagaaacatcgaggacatctgcatctcctgcggatctctgaacgtgaccctggagcacccactgttcatcggcggcatgtgccagaactgtaaaaactgttttctggagtgtgcctatcaatacgacgatgacggctaccagagctactgcaccatctgttgcggcggaagagaggtgctgatgtgtggaaataacaactgctgccggtgcttctgcgtggaatgcgtggacctgctggtgggccccggcgccgcccaggccgctattaaggaagatccttggaactgctacatgtgcggccacaagggcacatacggcctgctgagacggagagaggactggcctagcagactgcagatgttcttcgccaataaccacgaccaggagttcgacccccctaaggtgtaccctcccgtccccgccgagaagagaaagcccatccgggtcctgagcctgttcgatggcatcgccaccggtctgctggtgctgaaggacctgggcatccaggtggataggtacattgcctccgaggtgtgcgaggactccatcaccgtgggaatggtgcgtcatcagggcaagatcatgtacgtgggcgacgtgcggagcgtgacacagaagcatatccaggagtggggccctttcgacctggtgatcggcggcagcccttgcaatgacctgagcatcgtgaacccagcccggaagggcctgtacgagggaaccggcagactgttcttcgagttttacagactgctgcacgacgcccggcctaaggaaggcgacgaccggcccttcttttggctgttcgagaatgtggtggccatgggagtcagcgacaagcgggatattagccggttcctggagagcaaccccgtgatgatcgatgccaaggaagtgagcgccgcccaccgggccagatacttctggggcaatctgcctggcatgaacagacccctggccagcaccgtgaacgacaagctggagctgcaggagtgcctggagcacggccggatcgccaagttcagcaaggtgagaaccatcaccacccgaagcaacagcatcaaacaaggcaaggaccagcactttcctgtgttcatgaacgagaaggaggacatcctgtggtgtaccgagatggagagagtgttcgggttcccagtccactacacagatgtcagcaacatgtctagactggccagacagagactgctgggaagaagctggtccgtccctgtgatcagacacctgttcgcccctctgaaggagtacttcgcctgcgtgagcagcggcaacagcaacgccaacagccggggccccagcttctctagcggcctggtgccactgtccctgagagggagccacatgggccccatggagatctacaaaaccgtgagcgcctggaagcggcagcctgtgcgcgtgctgagcctgtttcggaatatcgataaagtcctgaaaagcctgggattcctggagagcggctctggctccggcggtggcaccctgaagtacgtggaggatgtgacaaacgtggtcagacgggatgtggagaagtggggccccttcgatctggtgtacggcagcacccaacccctgggcagctcttgtgaccggtgccctggctggtacatgtttcagttccaccggatcctgcagtacgccctgccgagacaggagtcccagcggccattcttttggattttcatggacaacttgctgctgaccgaggatgaccaggaaactaccactcggttcctgcagaccgaagccgtgaccctgcaggacgtgagaggccgggactaccagaacgccatgcgggtgtggtccaacatccctggactgaaaagcaagcacgcacctctgacccctaaagaagaggagtacctgcaggcccaggtgcggagcagaagcaagctggacgcccctaaggtggatctgctggtgaagaattgcctcctgcccctgagagagtacttcaagtatttcagccagaatagtctgcccctgggaggcagcggcggcggcgccctggtgacatttgaggacgtcgccgtgcggttcacccaggaggaatgggctctgctggatccttctcagaaaatcctgtaccgggacgtgatgagagagacataccggaatctgacctccgtgggcatcaactgggaatgttgggaccttgaagcctgcttcagaagcctgggaagaaacctgagagtgcaggtggtgaagagaaagtgcgagctgaccaacagcggcccctgcgccgagggcggcccaagcagcggcgcccctcctcccagcggcggcagcccagccggctccccaacctctaccgaggagggcacctctgagtccgccacccccgagagcggccctggcacctccaccgagcccagcgagggcagcgcacccggcagccctgccggcagccccacctccacagaggagggaaccagcaccgagcccagcgaaggcagcgccccaggcaccagcaccgagcctagtgagcaggagattaaacggatcaacaagatcagaagaagacttgtgaaagacagcaacaccaagaaggccggcaagacaggccccatgaaaaccctgctggttagagtgatgacacccgatctgagagagcggctggaaaacctgagaaagaagcctgaaaatatcccccagcccatcagcaatacatctagagccaacctgaataagctgctgaccgattacaccgaaatgaagaaggcgatcctgcatgtgtactgggaagagttccagaaggaccctgtgggcctgatgagccgggtggcccagcctgccagcaagaagatcgatcagaacaagctgaaacctgagatggacgagaagggcaacctgaccaccgccggctttgcctgctctcagtgtggccagcccctgttcgtgtacaagctggagcaggtgtctgagaagggcaaggcttacaccaactacttcggacggtgcaatgtggccgagcacgaaaagctgatcctgctggcccagctgaagcccgagaaggatagcgacgaagccgtgacatatagcctgggaaagtttgggcagagggccctggatttctacagcattcatgtgaccaaggagtccacccaccccgtgaagcccctggcccagatcgccggaaacagatacgcctccggacctgtgggaaaggccctgagcgacgcatgtatgggcacaatcgcctccttcctgtctaagtaccaggacatcatcatcgaacaccagaaggtggtgaagggcaaccagaagagactggagagcctgcgggagctggccggcaaggaaaacctggaataccctagcgtgaccctgccacctcagcctcacaccaaggagggcgttgatgcctacaacgaagtgatcgcccgggtgcgaatgtgggtgaacctgaacctgtggcagaagctgaagctaagcagagatgatgccaagcctctgctgagactgaagggattcccttcctttcctctggtcgagagacaggccaacgaagtggactggtgggacatggtgtgtaacgtgaagaagctgatcaacgagaaaaaggaggatggcaaggtgttttggcagaatctggctggctacaagagacaggaagccctgagaccatacctgagcagcgaggaagatcggaagaagggaaagaaattcgctcggtaccagctgggcgacctgctgctgcacctggaaaagaagcacggcgaggactggggaaaggtgtacgacgaggcctgggagcggattgacaagaaagtggaaggcctgagcaagcacatcaagctggaagaggaacggagaagcgaggacgcccagagcaaggccgccctgaccgactggctgcgggctaaggccagcttcgtgatcgagggcctgaaggaggccgacaaggacgagttctgcagatgcgagctgaagctgcagaagtggtacggggacctgcggggaaagcccttcgccatcgaagccgagaacagcatcctggacatcagcggcttcagcaagcagtacaactgtgccttcatctggcagaaggacggcgtgaagaagctgaacctgtacctgatcatcaactacttcaagggcggcaagctgcggttcaagaagatcaaacctgaagccttcgaagccaacagattctacaccgtgatcaacaaaaagagcggcgagatcgtgcccatggaggtgaacttcaacttcgacgaccccaacctgatcatcctgcctctggcctttggcaagagacagggcagagaattcatctggaacgacctgctgtccctggaaaccggcagcctgaagctggccaacggaagagtgatcgagaagacactgtacaacagaagaacccggcaggatgagcctgccctgttcgtggccctgaccttcgagcggcgggaggtcctggactcctccaatatcaaaccaatgaacctgatcggcgtggcaagaggcgaaaacatccccgccgtgatcgccctgaccgaccccgagggctgcccactgagccggtttaaggatagcctgggaaacccaacccacatcctgagaatcggcgagagctataaggagaagcagcggaccatccaggccaagaaggaggtggagcagcggagagccggcggctacagccggaagtacgccagcaaagccaagaatctggcagacgatatggtgagaaacaccgctagagatctgctgtactacgccgtgacccaggatgccatgctgatcttcgccaacctgagccggggcttcggccggcagggcaagcggaccttcatggccgagagacagtacacacggatggaggactggctgaccgccaagctggcctacgagggcctgagcaagacctacctgtccaagacactggcccagtacacctccaagacatgcagcaactgtgggtttaccatcaccagcgccgactacgacagggtgctggagaagctgaagaagacagcaacaggctggatgaccacaattaacggcaaggagctgaaggtggagggccagattacctactacaacagatacaagagacagaacgtagtcaaggacctgtccgtcgagctggatagactgagcgaagaatctgtgaacaacgacatctcctcctggacaaagggcagaagcggagaagctctgagcctcctgaagaaaagattctcccatagacccgtgcaggagaagttcgtgtgcctgaactgcggcttcgagacacacgcagccgagcaagccgccctgaacatcgccagatcctggctgttcctgcggagccaggagtacaagaaataccagacaaacaagacaaccggcaacaccgataagagagccttcgtcgagacctggcagtccttttaccggaagaagcttaaggaggtgtggaaacctgccgtgcggtctggcggatctggcggaggctcccagccccaggaggccgtgaccttcaaggacgtggaggtgaccttcagccaggacgagtggggctggctggacgccagccagaggaacctgtacagggacgtgatgctggagaactacggcaacgtgaccagcctggtgggccccttcaccaagcccgccctgatcagctggctggaggccagggagccctggggcctgaacgtgcagggcgcccaccccaagaggagccccagcgccgcccccggcggcccaagcagcggcgcccctcctcccagcggcggcagcccagccggctccccaacctctaccgaggagggcacctctgagtccgccacccccgagagcggccctggcacctccaccgagcccagcgagggcagcgcacccggcagccctgccggcagccccacctccacagaggagggaaccagcaccgagcccagcgaaggcagcgccccaggcaccagcaccgagcctagtgagcaggagattaaacggatcaacaagatcagaagaagacttgtgaaagacagcaacaccaagaaggccggcaagacaggccccatgaaaaccctgctggttagagtgatgacacccgatctgagagagcggctggaaaacctgagaaagaagcctgaaaatatcccccagcccatcagcaatacatctagagccaacctgaataagctgctgaccgattacaccgaaatgaagaaggcgatcctgcatgtgtactgggaagagttccagaaggaccctgtgggcctgatgagccgggtggcccagcctgccagcaagaagatcgatcagaacaagctgaaacctgagatggacgagaagggcaacctgaccaccgccggctttgcctgctctcagtgtggccagcccctgttcgtgtacaagctggagcaggtgtctgagaagggcaaggcttacaccaactacttcggacggtgcaatgtggccgagcacgaaaagctgatcctgctggcccagctgaagcccgagaaggatagcgacgaagccgtgacatatagcctgggaaagtttgggcagagggccctggatttctacagcattcatgtgaccaaggagtccacccaccccgtgaagcccctggcccagatcgccggaaacagatacgcctccggacctgtgggaaaggccctgagcgacgcatgtatgggcacaatcgcctccttcctgtctaagtaccaggacatcatcatcgaacaccagaaggtggtgaagggcaaccagaagagactggagagcctgcgggagctggccggcaaggaaaacctggaataccctagcgtgaccctgccacctcagcctcacaccaaggagggcgttgatgcctacaacgaagtgatcgcccgggtgcgaatgtgggtgaacctgaacctgtggcagaagctgaagctaagcagagatgatgccaagcctctgctgagactgaagggattcccttcctttcctctggtcgagagacaggccaacgaagtggactggtgggacatggtgtgtaacgtgaagaagctgatcaacgagaaaaaggaggatggcaaggtgttttggcagaatctggctggctacaagagacaggaagccctgagaccatacctgagcagcgaggaagatcggaagaagggaaagaaattcgctcggtaccagctgggcgacctgctgctgcacctggaaaagaagcacggcgaggactggggaaaggtgtacgacgaggcctgggagcggattgacaagaaagtggaaggcctgagcaagcacatcaagctggaagaggaacggagaagcgaggacgcccagagcaaggccgccctgaccgactggctgcgggctaaggccagcttcgtgatcgagggcctgaaggaggccgacaaggacgagttctgcagatgcgagctgaagctgcagaagtggtacggggacctgcggggaaagcccttcgccatcgaagccgagaacagcatcctggacatcagcggcttcagcaagcagtacaactgtgccttcatctggcagaaggacggcgtgaagaagctgaacctgtacctgatcatcaactacttcaagggcggcaagctgcggttcaagaagatcaaacctgaagccttcgaagccaacagattctacaccgtgatcaacaaaaagagcggcgagatcgtgcccatggaggtgaacttcaacttcgacgaccccaacctgatcatcctgcctctggcctttggcaagagacagggcagagaattcatctggaacgacctgctgtccctggaaaccggcagcctgaagctggccaacggaagagtgatcgagaagacactgtacaacagaagaacccggcaggatgagcctgccctgttcgtggccctgaccttcgagcggcgggaggtcctggactcctccaatatcaaaccaatgaacctgatcggcgtggcaagaggcgaaaacatccccgccgtgatcgccctgaccgaccccgagggctgcccactgagccggtttaaggatagcctgggaaacccaacccacatcctgagaatcggcgagagctataaggagaagcagcggaccatccaggccaagaaggaggtggagcagcggagagccggcggctacagccggaagtacgccagcaaagccaagaatctggcagacgatatggtgagaaacaccgctagagatctgctgtactacgccgtgacccaggatgccatgctgatcttcgccaacctgagccggggcttcggccggcagggcaagcggaccttcatggccgagagacagtacacacggatggaggactggctgaccgccaagctggcctacgagggcctgagcaagacctacctgtccaagacactggcccagtacacctccaagacatgcagcaactgtgggtttaccatcaccagcgccgactacgacagggtgctggagaagctgaagaagacagcaacaggctggatgaccacaattaacggcaaggagctgaaggtggagggccagattacctactacaacagatacaagagacagaacgtagtcaaggacctgtccgtcgagctggatagactgagcgaagaatctgtgaacaacgacatctcctcctggacaaagggcagaagcggagaagctctgagcctcctgaagaaaagattctcccatagacccgtgcaggagaagttcgtgtgcctgaactgcggcttcgagacacacgcagccgagcaagccgccctgaacatcgccagatcctggctgttcctgcggagccaggagtacaagaaataccagacaaacaagacaaccggcaacaccgataagagagccttcgtcgagacctggcagtccttttaccggaagaagcttaaggaggtgtggaaacctgccgtgcggtctggcggatctggcggaggctcctcagccccaggaggccgtgaccttcaaggacgtggaggtgaccttcagccaggacgagtggggctggctggacgccagccagaggaacctgtacagggacgtgatgctggagaactacggcaacgtgaccagcctggtgggccccttcaccaagcccgccctgatcagctggctggaggccagggagccctggggcctgaacgtgcagggcgcccaccccaagaggagccccagcgccgcccccggatctggctccggcagcggccccaagaaaaagagaaaagtctaagctgccttctgcggggcttgccttctggccatgcccttcttctctcccttgcacctgtacctcttggtctttgaataaagcctgagtaggaaggctagcaaaaaaaaaaaaaaaaaaaaaaaaaaaaaaaaaaaaaaaaaaaaaaaaaaaaaaaaaaaaaaaaaaaaaaaaaaaaaaaa

SEQ ID NO: 15815 - RNA, 9485 nt, synthetic construct
  source 1..9485: mol_type = other RNA
aggaaataagagagaaaagaagagtaagaagaaatataagagccaccatggcccctaagaagaagcgtaaagtgagccggatggaacgcctcgtctacgaggtgcggcagaagtgcagaaacatcgaggacatctgcatctcctgcggatctctgaacgtgaccctggagcacccactgttcatcggcggcatgtgccagaactgtaaaaactgttttctggagtgtgcctatcaatacgacgatgacggctaccagagctactgcaccatctgttgcggcggaagagaggtgctgatgtgtggaaataacaactgctgccggtgcttctgcgtggaatgcgtggacctgctggtgggccccggcgccgcccaggccgctattaaggaagatccttggaactgctacatgtgcggccacaagggcacatacggcctgctgagacggagagaggactggcctagcagactgcagatgttcttcgccaataaccacgaccaggagttcgacccccctaaggtgtaccctcccgtccccgccgagaagagaaagcccatccgggtcctgagcctgttcgatggcatcgccaccggtctgctggtgctgaaggacctgggcatccaggtggataggtacattgcctccgaggtgtgcgaggactccatcaccgtgggaatggtgcgtcatcagggcaagatcatgtacgtgggcgacgtgcggagcgtgacacagaagcatatccaggagtggggccctttcgacctggtgatcggcggcagcccttgcaatgacctgagcatcgtgaacccagcccggaagggcctgtacgagggaaccggcagactgttcttcgagttttacagactgctgcacgacgcccggcctaaggaaggcgacgaccggcccttcttttggctgttcgagaatgtggtggccatgggagtcagcgacaagcgggatattagccggttcctggagagcaaccccgtgatgatcgatgccaaggaagtgagcgccgcccaccgggccagatacttctggggcaatctgcctggcatgaacagacccctggccagcaccgtgaacgacaagctggagctgcaggagtgcctggagcacggccggatcgccaagttcagcaaggtgagaaccatcaccacccgaagcaacagcatcaaacaaggcaaggaccagcactttcctgtgttcatgaacgagaaggaggacatcctgtggtgtaccgagatggagagagtgttcgggttcccagtccactacacagatgtcagcaacatgtctagactggccagacagagactgctgggaagaagctggtccgtccctgtgatcagacacctgttcgcccctctgaaggagtacttcgcctgcgtgagcagcggcaacagcaacgccaacagccggggccccagcttctctagcggcctggtgccactgtccctgagagggagccacatgggccccatggagatctacaaaaccgtgagcgcctggaagcggcagcctgtgcgcgtgctgagcctgtttcggaatatcgataaagtcctgaaaagcctgggattcctggagagcggctctggctccggcggtggcaccctgaagtacgtggaggatgtgacaaacgtggtcagacgggatgtggagaagtggggccccttcgatctggtgtacggcagcacccaacccctgggcagctcttgtgaccggtgccctggctggtacatgtttcagttccaccggatcctgcagtacgccctgccgagacaggagtcccagcggccattcttttggattttcatggacaacttgctgctgaccgaggatgaccaggaaactaccactcggttcctgcagaccgaagccgtgaccctgcaggacgtgagaggccgggactaccagaacgccatgcgggtgtggtccaacatccctggactgaaaagcaagcacgcacctctgacccctaaagaagaggagtacctgcaggcccaggtgcggagcagaagcaagctggacgcccctaaggtggatctgctggtgaagaattgcctcctgcccctgagagagtacttcaagtatttcagccagaatagtctgcccctgggaggcagcggcggcggcgccctggtgacatttgaggacgtcgccgtgcggttcacccaggaggaatgggctctgctggatccttctcagaaaatcctgtaccgggacgtgatgagagagacataccggaatctgacctccgtgggcatcaactgggaatgttgggaccttgaagcctgcttcagaagcctgggaagaaacctgagagtgcaggtggtgaagagaaagtgcgagctgaccaacagcggcccctgcgccgagggcggcccaagcagcggcgcccctcctcccagcggcggcagcccagccggctccccaacctctaccgaggagggcacctctgagtccgccacccccgagagcggccctggcacctccaccgagcccagcgagggcagcgcacccggcagccctgccggcagccccacctccacagaggagggaaccagcaccgagcccagcgaaggcagcgccccaggcaccagcaccgagcctagtgagcaggagattaaacggatcaacaagatcagaagaagacttgtgaaagacagcaacaccaagaaggccggcaagacaggccccatgaaaaccctgctggttagagtgatgacacccgatctgagagagcggctggaaaacctgagaaagaagcctgaaaatatcccccagcccatcagcaatacatctagagccaacctgaataagctgctgaccgattacaccgaaatgaagaaggcgatcctgcatgtgtactgggaagagttccagaaggaccctgtgggcctgatgagccgggtggcccagcctgccagcaagaagatcgatcagaacaagctgaaacctgagatggacgagaagggcaacctgaccaccgccggctttgcctgctctcagtgtggccagcccctgttcgtgtacaagctggagcaggtgtctgagaagggcaaggcttacaccaactacttcggacggtgcaatgtggccgagcacgaaaagctgatcctgctggcccagctgaagcccgagaaggatagcgacgaagccgtgacatatagcctgggaaagtttgggcagagggccctggatttctacagcattcatgtgaccaaggagtccacccaccccgtgaagcccctggcccagatcgccggaaacagatacgcctccggacctgtgggaaaggccctgagcgacgcatgtatgggcacaatcgcctccttcctgtctaagtaccaggacatcatcatcgaacaccagaaggtggtgaagggcaaccagaagagactggagagcctgcgggagctggccggcaaggaaaacctggaataccctagcgtgaccctgccacctcagcctcacaccaaggagggcgttgatgcctacaacgaagtgatcgcccgggtgcgaatgtgggtgaacctgaacctgtggcagaagctgaagctaagcagagatgatgccaagcctctgctgagactgaagggattcccttcctttcctctggtcgagagacaggccaacgaagtggactggtgggacatggtgtgtaacgtgaagaagctgatcaacgagaaaaaggaggatggcaaggtgttttggcagaatctggctggctacaagagacaggaagccctgagaccatacctgagcagcgaggaagatcggaagaagggaaagaaattcgctcggtaccagctgggcgacctgctgctgcacctggaaaagaagcacggcgaggactggggaaaggtgtacgacgaggcctgggagcggattgacaagaaagtggaaggcctgagcaagcacatcaagctggaagaggaacggagaagcgaggacgcccagagcaaggccgccctgaccgactggctgcgggctaaggccagcttcgtgatcgagggcctgaaggaggccgacaaggacgagttctgcagatgcgagctgaagctgcagaagtggtacggggacctgcggggaaagcccttcgccatcgaagccgagaacagcatcctggacatcagcggcttcagcaagcagtacaactgtgccttcatctggcagaaggacggcgtgaagaagctgaacctgtacctgatcatcaactacttcaagggcggcaagctgcggttcaagaagatcaaacctgaagccttcgaagccaacagattctacaccgtgatcaacaaaaagagcggcgagatcgtgcccatggaggtgaacttcaacttcgacgaccccaacctgatcatcctgcctctggcctttggcaagagacagggcagagaattcatctggaacgacctgctgtccctggaaaccggcagcctgaagctggccaacggaagagtgatcgagaagacactgtacaacagaagaacccggcaggatgagcctgccctgttcgtggccctgaccttcgagcggcgggaggtcctggactcctccaatatcaaaccaatgaacctgatcggcgtggcaagaggcgaaaacatccccgccgtgatcgccctgaccgaccccgagggctgcccactgagccggtttaaggatagcctgggaaacccaacccacatcctgagaatcggcgagagctataaggagaagcagcggaccatccaggccaagaaggaggtggagcagcggagagccggcggctacagccggaagtacgccagcaaagccaagaatctggcagacgatatggtgagaaacaccgctagagatctgctgtactacgccgtgacccaggatgccatgctgatcttcgccaacctgagccggggcttcggccggcagggcaagcggaccttcatggccgagagacagtacacacggatggaggactggctgaccgccaagctggcctacgagggcctgagcaagacctacctgtccaagacactggcccagtacacctccaagacatgcagcaactgtgggtttaccatcaccagcgccgactacgacagggtgctggagaagctgaagaagacagcaacaggctggatgaccacaattaacggcaaggagctgaaggtggagggccagattacctactacaacagatacaagagacagaacgtagtcaaggacctgtccgtcgagctggatagactgagcgaagaatctgtgaacaacgacatctcctcctggacaaagggcagaagcggagaagctctgagcctcctgaagaaaagattctcccatagacccgtgcaggagaagttcgtgtgcctgaactgcggcttcgagacacacgcagccgagcaagccgccctgaacatcgccagatcctggctgttcctgcggagccaggagtacaagaaataccagacaaacaagacaaccggcaacaccgataagagagccttcgtcgagacctggcagtccttttaccggaagaagcttaaggaggtgtggaaacctgccgtgcggtctggcggatctggcggaggctcccaggccgaggtgaccttcgaggacgtggccgtgttcctgagccaggaggagtggggcctgctgggccccgcccagaagggcctgtacagggaggtgatgctggagacctacaggaacctggtgagcctgggcgccggcctggccggccccaagcccgaggtgatcgcccagctggagcagggcgacgagctgtgggtgctggacatgcacggcgccgagcagcccagcgtggacggcagcgccggcggcccaagcagcggcgcccctcctcccagcggcggcagcccagccggctccccaacctctaccgaggagggcacctctgagtccgccacccccgagagcggccctggcacctccaccgagcccagcgagggcagcgcacccggcagccctgccggcagccccacctccacagaggagggaaccagcaccgagcccagcgaaggcagcgccccaggcaccagcaccgagcctagtgagcaggagattaaacggatcaacaagatcagaagaagacttgtgaaagacagcaacaccaagaaggccggcaagacaggccccatgaaaaccctgctggttagagtgatgacacccgatctgagagagcggctggaaaacctgagaaagaagcctgaaaatatcccccagcccatcagcaatacatctagagccaacctgaataagctgctgaccgattacaccgaaatgaagaaggcgatcctgcatgtgtactgggaagagttccagaaggaccctgtgggcctgatgagccgggtggcccagcctgccagcaagaagatcgatcagaacaagctgaaacctgagatggacgagaagggcaacctgaccaccgccggctttgcctgctctcagtgtggccagcccctgttcgtgtacaagctggagcaggtgtctgagaagggcaaggcttacaccaactacttcggacggtgcaatgtggccgagcacgaaaagctgatcctgctggcccagctgaagcccgagaaggatagcgacgaagccgtgacatatagcctgggaaagtttgggcagagggccctggatttctacagcattcatgtgaccaaggagtccacccaccccgtgaagcccctggcccagatcgccggaaacagatacgcctccggacctgtgggaaaggccctgagcgacgcatgtatgggcacaatcgcctccttcctgtctaagtaccaggacatcatcatcgaacaccagaaggtggtgaagggcaaccagaagagactggagagcctgcgggagctggccggcaaggaaaacctggaataccctagcgtgaccctgccacctcagcctcacaccaaggagggcgttgatgcctacaacgaagtgatcgcccgggtgcgaatgtgggtgaacctgaacctgtggcagaagctgaagctaagcagagatgatgccaagcctctgctgagactgaagggattcccttcctttcctctggtcgagagacaggccaacgaagtggactggtgggacatggtgtgtaacgtgaagaagctgatcaacgagaaaaaggaggatggcaaggtgttttggcagaatctggctggctacaagagacaggaagccctgagaccatacctgagcagcgaggaagatcggaagaagggaaagaaattcgctcggtaccagctgggcgacctgctgctgcacctggaaaagaagcacggcgaggactggggaaaggtgtacgacgaggcctgggagcggattgacaagaaagtggaaggcctgagcaagcacatcaagctggaagaggaacggagaagcgaggacgcccagagcaaggccgccctgaccgactggctgcgggctaaggccagcttcgtgatcgagggcctgaaggaggccgacaaggacgagttctgcagatgcgagctgaagctgcagaagtggtacggggacctgcggggaaagcccttcgccatcgaagccgagaacagcatcctggacatcagcggcttcagcaagcagtacaactgtgccttcatctggcagaaggacggcgtgaagaagctgaacctgtacctgatcatcaactacttcaagggcggcaagctgcggttcaagaagatcaaacctgaagccttcgaagccaacagattctacaccgtgatcaacaaaaagagcggcgagatcgtgcccatggaggtgaacttcaacttcgacgaccccaacctgatcatcctgcctctggcctttggcaagagacagggcagagaattcatctggaacgacctgctgtccctggaaaccggcagcctgaagctggccaacggaagagtgatcgagaagacactgtacaacagaagaacccggcaggatgagcctgccctgttcgtggccctgaccttcgagcggcgggaggtcctggactcctccaatatcaaaccaatgaacctgatcggcgtggcaagaggcgaaaacatccccgccgtgatcgccctgaccgaccccgagggctgcccactgagccggtttaaggatagcctgggaaacccaacccacatcctgagaatcggcgagagctataaggagaagcagcggaccatccaggccaagaaggaggtggagcagcggagagccggcggctacagccggaagtacgccagcaaagccaagaatctggcagacgatatggtgagaaacaccgctagagatctgctgtactacgccgtgacccaggatgccatgctgatcttcgccaacctgagccggggcttcggccggcagggcaagcggaccttcatggccgagagacagtacacacggatggaggactggctgaccgccaagctggcctacgagggcctgagcaagacctacctgtccaagacactggcccagtacacctccaagacatgcagcaactgtgggtttaccatcaccagcgccgactacgacagggtgctggagaagctgaagaagacagcaacaggctggatgaccacaattaacggcaaggagctgaaggtggagggccagattacctactacaacagatacaagagacagaacgtagtcaaggacctgtccgtcgagctggatagactgagcgaagaatctgtgaacaacgacatctcctcctggacaaagggcagaagcggagaagctctgagcctcctgaagaaaagattctcccatagacccgtgcaggagaagttcgtgtgcctgaactgcggcttcgagacacacgcagccgagcaagccgccctgaacatcgccagatcctggctgttcctgcggagccaggagtacaagaaataccagacaaacaagacaaccggcaacaccgataagagagccttcgtcgagacctggcagtccttttaccggaagaagcttaaggaggtgtggaaacctgccgtgcggtctggcggatctggcggaggctcctcaggccgaggtgaccttcgaggacgtggccgtgttcctgagccaggaggagtggggcctgctgggccccgcccagaagggcctgtacagggaggtgatgctggagacctacaggaacctggtgagcctgggcgccggcctggccggccccaagcccgaggtgatcgcccagctggagcagggcgacgagctgtgggtgctggacatgcacggcgccgagcagcccagcgtggacggcagcgccggatctggctccggcagcggccccaagaaaaagagaaaagtctaagctgccttctgcggggcttgccttctggccatgcccttcttctctcccttgcacctgtacctcttggtctttgaataaagcctgagtaggaaggctagcaaaaaaaaaaaaaaaaaaaaaaaaaaaaaaaaaaaaaaaaaaaaaaaaaaaaaaaaaaaaaaaaaaaaaaaaaaaaaaaa

SEQ ID NO: 15816 - RNA, 9479 nt, synthetic construct
  source 1..9479: mol_type = other RNA
aggaaataagagagaaaagaagagtaagaagaaatataagagccaccatggcccctaagaagaagcgtaaagtgagccggatggaacgcctcgtctacgaggtgcggcagaagtgcagaaacatcgaggacatctgcatctcctgcggatctctgaacgtgaccctggagcacccactgttcatcggcggcatgtgccagaactgtaaaaactgttttctggagtgtgcctatcaatacgacgatgacggctaccagagctactgcaccatctgttgcggcggaagagaggtgctgatgtgtggaaataacaactgctgccggtgcttctgcgtggaatgcgtggacctgctggtgggccccggcgccgcccaggccgctattaaggaagatccttggaactgctacatgtgcggccacaagggcacatacggcctgctgagacggagagaggactggcctagcagactgcagatgttcttcgccaataaccacgaccaggagttcgacccccctaaggtgtaccctcccgtccccgccgagaagagaaagcccatccgggtcctgagcctgttcgatggcatcgccaccggtctgctggtgctgaaggacctgggcatccaggtggataggtacattgcctccgaggtgtgcgaggactccatcaccgtgggaatggtgcgtcatcagggcaagatcatgtacgtgggcgacgtgcggagcgtgacacagaagcatatccaggagtggggccctttcgacctggtgatcggcggcagcccttgcaatgacctgagcatcgtgaacccagcccggaagggcctgtacgagggaaccggcagactgttcttcgagttttacagactgctgcacgacgcccggcctaaggaaggcgacgaccggcccttcttttggctgttcgagaatgtggtggccatgggagtcagcgacaagcgggatattagccggttcctggagagcaaccccgtgatgatcgatgccaaggaagtgagcgccgcccaccgggccagatacttctggggcaatctgcctggcatgaacagacccctggccagcaccgtgaacgacaagctggagctgcaggagtgcctggagcacggccggatcgccaagttcagcaaggtgagaaccatcaccacccgaagcaacagcatcaaacaaggcaaggaccagcactttcctgtgttcatgaacgagaaggaggacatcctgtggtgtaccgagatggagagagtgttcgggttcccagtccactacacagatgtcagcaacatgtctagactggccagacagagactgctgggaagaagctggtccgtccctgtgatcagacacctgttcgcccctctgaaggagtacttcgcctgcgtgagcagcggcaacagcaacgccaacagccggggccccagcttctctagcggcctggtgccactgtccctgagagggagccacatgggccccatggagatctacaaaaccgtgagcgcctggaagcggcagcctgtgcgcgtgctgagcctgtttcggaatatcgataaagtcctgaaaagcctgggattcctggagagcggctctggctccggcggtggcaccctgaagtacgtggaggatgtgacaaacgtggtcagacgggatgtggagaagtggggccccttcgatctggtgtacggcagcacccaacccctgggcagctcttgtgaccggtgccctggctggtacatgtttcagttccaccggatcctgcagtacgccctgccgagacaggagtcccagcggccattcttttggattttcatggacaacttgctgctgaccgaggatgaccaggaaactaccactcggttcctgcagaccgaagccgtgaccctgcaggacgtgagaggccgggactaccagaacgccatgcgggtgtggtccaacatccctggactgaaaagcaagcacgcacctctgacccctaaagaagaggagtacctgcaggcccaggtgcggagcagaagcaagctggacgcccctaaggtggatctgctggtgaagaattgcctcctgcccctgagagagtacttcaagtatttcagccagaatagtctgcccctgggaggcagcggcggcggcgccctggtgacatttgaggacgtcgccgtgcggttcacccaggaggaatgggctctgctggatccttctcagaaaatcctgtaccgggacgtgatgagagagacataccggaatctgacctccgtgggcatcaactgggaatgttgggaccttgaagcctgcttcagaagcctgggaagaaacctgagagtgcaggtggtgaagagaaagtgcgagctgaccaacagcggcccctgcgccgagggcggcccaagcagcggcgcccctcctcccagcggcggcagcccagccggctccccaacctctaccgaggagggcacctctgagtccgccacccccgagagcggccctggcacctccaccgagcccagcgagggcagcgcacccggcagccctgccggcagccccacctccacagaggagggaaccagcaccgagcccagcgaaggcagcgccccaggcaccagcaccgagcctagtgagcaggagattaaacggatcaacaagatcagaagaagacttgtgaaagacagcaacaccaagaaggccggcaagacaggccccatgaaaaccctgctggttagagtgatgacacccgatctgagagagcggctggaaaacctgagaaagaagcctgaaaatatcccccagcccatcagcaatacatctagagccaacctgaataagctgctgaccgattacaccgaaatgaagaaggcgatcctgcatgtgtactgggaagagttccagaaggaccctgtgggcctgatgagccgggtggcccagcctgccagcaagaagatcgatcagaacaagctgaaacctgagatggacgagaagggcaacctgaccaccgccggctttgcctgctctcagtgtggccagcccctgttcgtgtacaagctggagcaggtgtctgagaagggcaaggcttacaccaactacttcggacggtgcaatgtggccgagcacgaaaagctgatcctgctggcccagctgaagcccgagaaggatagcgacgaagccgtgacatatagcctgggaaagtttgggcagagggccctggatttctacagcattcatgtgaccaaggagtccacccaccccgtgaagcccctggcccagatcgccggaaacagatacgcctccggacctgtgggaaaggccctgagcgacgcatgtatgggcacaatcgcctccttcctgtctaagtaccaggacatcatcatcgaacaccagaaggtggtgaagggcaaccagaagagactggagagcctgcgggagctggccggcaaggaaaacctggaataccctagcgtgaccctgccacctcagcctcacaccaaggagggcgttgatgcctacaacgaagtgatcgcccgggtgcgaatgtgggtgaacctgaacctgtggcagaagctgaagctaagcagagatgatgccaagcctctgctgagactgaagggattcccttcctttcctctggtcgagagacaggccaacgaagtggactggtgggacatggtgtgtaacgtgaagaagctgatcaacgagaaaaaggaggatggcaaggtgttttggcagaatctggctggctacaagagacaggaagccctgagaccatacctgagcagcgaggaagatcggaagaagggaaagaaattcgctcggtaccagctgggcgacctgctgctgcacctggaaaagaagcacggcgaggactggggaaaggtgtacgacgaggcctgggagcggattgacaagaaagtggaaggcctgagcaagcacatcaagctggaagaggaacggagaagcgaggacgcccagagcaaggccgccctgaccgactggctgcgggctaaggccagcttcgtgatcgagggcctgaaggaggccgacaaggacgagttctgcagatgcgagctgaagctgcagaagtggtacggggacctgcggggaaagcccttcgccatcgaagccgagaacagcatcctggacatcagcggcttcagcaagcagtacaactgtgccttcatctggcagaaggacggcgtgaagaagctgaacctgtacctgatcatcaactacttcaagggcggcaagctgcggttcaagaagatcaaacctgaagccttcgaagccaacagattctacaccgtgatcaacaaaaagagcggcgagatcgtgcccatggaggtgaacttcaacttcgacgaccccaacctgatcatcctgcctctggcctttggcaagagacagggcagagaattcatctggaacgacctgctgtccctggaaaccggcagcctgaagctggccaacggaagagtgatcgagaagacactgtacaacagaagaacccggcaggatgagcctgccctgttcgtggccctgaccttcgagcggcgggaggtcctggactcctccaatatcaaaccaatgaacctgatcggcgtggcaagaggcgaaaacatccccgccgtgatcgccctgaccgaccccgagggctgcccactgagccggtttaaggatagcctgggaaacccaacccacatcctgagaatcggcgagagctataaggagaagcagcggaccatccaggccaagaaggaggtggagcagcggagagccggcggctacagccggaagtacgccagcaaagccaagaatctggcagacgatatggtgagaaacaccgctagagatctgctgtactacgccgtgacccaggatgccatgctgatcttcgccaacctgagccggggcttcggccggcagggcaagcggaccttcatggccgagagacagtacacacggatggaggactggctgaccgccaagctggcctacgagggcctgagcaagacctacctgtccaagacactggcccagtacacctccaagacatgcagcaactgtgggtttaccatcaccagcgccgactacgacagggtgctggagaagctgaagaagacagcaacaggctggatgaccacaattaacggcaaggagctgaaggtggagggccagattacctactacaacagatacaagagacagaacgtagtcaaggacctgtccgtcgagctggatagactgagcgaagaatctgtgaacaacgacatctcctcctggacaaagggcagaagcggagaagctctgagcctcctgaagaaaagattctcccatagacccgtgcaggagaagttcgtgtgcctgaactgcggcttcgagacacacgcagccgagcaagccgccctgaacatcgccagatcctggctgttcctgcggagccaggagtacaagaaataccagacaaacaagacaaccggcaacaccgataagagagccttcgtcgagacctggcagtccttttaccggaagaagcttaaggaggtgtggaaacctgccgtgcggtctggcggatctggcggaggctccaacatggagggcctggtgatgttccaggacctgagcatcgacttcagccaggaggagtgggagtgcctggacgccgcccagaaggacctgtacagagacgtgatgatggagaactacagcagcctggtgagcctgggcctgagcatccccaagcccgacgtgatcagcctgctggagcagggcaaggagccctggatggtgagcagagacgtgctgggcggctggtgcagagacagcgagggcggcccaagcagcggcgcccctcctcccagcggcggcagcccagccggctccccaacctctaccgaggagggcacctctgagtccgccacccccgagagcggccctggcacctccaccgagcccagcgagggcagcgcacccggcagccctgccggcagccccacctccacagaggagggaaccagcaccgagcccagcgaaggcagcgccccaggcaccagcaccgagcctagtgagcaggagattaaacggatcaacaagatcagaagaagacttgtgaaagacagcaacaccaagaaggccggcaagacaggccccatgaaaaccctgctggttagagtgatgacacccgatctgagagagcggctggaaaacctgagaaagaagcctgaaaatatcccccagcccatcagcaatacatctagagccaacctgaataagctgctgaccgattacaccgaaatgaagaaggcgatcctgcatgtgtactgggaagagttccagaaggaccctgtgggcctgatgagccgggtggcccagcctgccagcaagaagatcgatcagaacaagctgaaacctgagatggacgagaagggcaacctgaccaccgccggctttgcctgctctcagtgtggccagcccctgttcgtgtacaagctggagcaggtgtctgagaagggcaaggcttacaccaactacttcggacggtgcaatgtggccgagcacgaaaagctgatcctgctggcccagctgaagcccgagaaggatagcgacgaagccgtgacatatagcctgggaaagtttgggcagagggccctggatttctacagcattcatgtgaccaaggagtccacccaccccgtgaagcccctggcccagatcgccggaaacagatacgcctccggacctgtgggaaaggccctgagcgacgcatgtatgggcacaatcgcctccttcctgtctaagtaccaggacatcatcatcgaacaccagaaggtggtgaagggcaaccagaagagactggagagcctgcgggagctggccggcaaggaaaacctggaataccctagcgtgaccctgccacctcagcctcacaccaaggagggcgttgatgcctacaacgaagtgatcgcccgggtgcgaatgtgggtgaacctgaacctgtggcagaagctgaagctaagcagagatgatgccaagcctctgctgagactgaagggattcccttcctttcctctggtcgagagacaggccaacgaagtggactggtgggacatggtgtgtaacgtgaagaagctgatcaacgagaaaaaggaggatggcaaggtgttttggcagaatctggctggctacaagagacaggaagccctgagaccatacctgagcagcgaggaagatcggaagaagggaaagaaattcgctcggtaccagctgggcgacctgctgctgcacctggaaaagaagcacggcgaggactggggaaaggtgtacgacgaggcctgggagcggattgacaagaaagtggaaggcctgagcaagcacatcaagctggaagaggaacggagaagcgaggacgcccagagcaaggccgccctgaccgactggctgcgggctaaggccagcttcgtgatcgagggcctgaaggaggccgacaaggacgagttctgcagatgcgagctgaagctgcagaagtggtacggggacctgcggggaaagcccttcgccatcgaagccgagaacagcatcctggacatcagcggcttcagcaagcagtacaactgtgccttcatctggcagaaggacggcgtgaagaagctgaacctgtacctgatcatcaactacttcaagggcggcaagctgcggttcaagaagatcaaacctgaagccttcgaagccaacagattctacaccgtgatcaacaaaaagagcggcgagatcgtgcccatggaggtgaacttcaacttcgacgaccccaacctgatcatcctgcctctggcctttggcaagagacagggcagagaattcatctggaacgacctgctgtccctggaaaccggcagcctgaagctggccaacggaagagtgatcgagaagacactgtacaacagaagaacccggcaggatgagcctgccctgttcgtggccctgaccttcgagcggcgggaggtcctggactcctccaatatcaaaccaatgaacctgatcggcgtggcaagaggcgaaaacatccccgccgtgatcgccctgaccgaccccgagggctgcccactgagccggtttaaggatagcctgggaaacccaacccacatcctgagaatcggcgagagctataaggagaagcagcggaccatccaggccaagaaggaggtggagcagcggagagccggcggctacagccggaagtacgccagcaaagccaagaatctggcagacgatatggtgagaaacaccgctagagatctgctgtactacgccgtgacccaggatgccatgctgatcttcgccaacctgagccggggcttcggccggcagggcaagcggaccttcatggccgagagacagtacacacggatggaggactggctgaccgccaagctggcctacgagggcctgagcaagacctacctgtccaagacactggcccagtacacctccaagacatgcagcaactgtgggtttaccatcaccagcgccgactacgacagggtgctggagaagctgaagaagacagcaacaggctggatgaccacaattaacggcaaggagctgaaggtggagggccagattacctactacaacagatacaagagacagaacgtagtcaaggacctgtccgtcgagctggatagactgagcgaagaatctgtgaacaacgacatctcctcctggacaaagggcagaagcggagaagctctgagcctcctgaagaaaagattctcccatagacccgtgcaggagaagttcgtgtgcctgaactgcggcttcgagacacacgcagccgagcaagccgccctgaacatcgccagatcctggctgttcctgcggagccaggagtacaagaaataccagacaaacaagacaaccggcaacaccgataagagagccttcgtcgagacctggcagtccttttaccggaagaagcttaaggaggtgtggaaacctgccgtgcggtctggcggatctggcggaggctcctaacatggagggcctggtgatgttccaggacctgagcatcgacttcagccaggaggagtgggagtgcctggacgccgcccagaaggacctgtacagagacgtgatgatggagaactacagcagcctggtgagcctgggcctgagcatccccaagcccgacgtgatcagcctgctggagcagggcaaggagccctggatggtgagcagagacgtgctgggcggctggtgcagagacagcgagggatctggctccggcagcggccccaagaaaaagagaaaagtctaagctgccttctgcggggcttgccttctggccatgcccttcttctctcccttgcacctgtacctcttggtctttgaataaagcctgagtaggaaggctagcaaaaaaaaaaaaaaaaaaaaaaaaaaaaaaaaaaaaaaaaaaaaaaaaaaaaaaaaaaaaaaaaaaaaaaaaaaaaaaaa

SEQ ID NO: 15817 - RNA, 9485 nt, synthetic construct
  source 1..9485: mol_type = other RNA
aggaaataagagagaaaagaagagtaagaagaaatataagagccaccatggcccctaagaagaagcgtaaagtgagccggatggaacgcctcgtctacgaggtgcggcagaagtgcagaaacatcgaggacatctgcatctcctgcggatctctgaacgtgaccctggagcacccactgttcatcggcggcatgtgccagaactgtaaaaactgttttctggagtgtgcctatcaatacgacgatgacggctaccagagctactgcaccatctgttgcggcggaagagaggtgctgatgtgtggaaataacaactgctgccggtgcttctgcgtggaatgcgtggacctgctggtgggccccggcgccgcccaggccgctattaaggaagatccttggaactgctacatgtgcggccacaagggcacatacggcctgctgagacggagagaggactggcctagcagactgcagatgttcttcgccaataaccacgaccaggagttcgacccccctaaggtgtaccctcccgtccccgccgagaagagaaagcccatccgggtcctgagcctgttcgatggcatcgccaccggtctgctggtgctgaaggacctgggcatccaggtggataggtacattgcctccgaggtgtgcgaggactccatcaccgtgggaatggtgcgtcatcagggcaagatcatgtacgtgggcgacgtgcggagcgtgacacagaagcatatccaggagtggggccctttcgacctggtgatcggcggcagcccttgcaatgacctgagcatcgtgaacccagcccggaagggcctgtacgagggaaccggcagactgttcttcgagttttacagactgctgcacgacgcccggcctaaggaaggcgacgaccggcccttcttttggctgttcgagaatgtggtggccatgggagtcagcgacaagcgggatattagccggttcctggagagcaaccccgtgatgatcgatgccaaggaagtgagcgccgcccaccgggccagatacttctggggcaatctgcctggcatgaacagacccctggccagcaccgtgaacgacaagctggagctgcaggagtgcctggagcacggccggatcgccaagttcagcaaggtgagaaccatcaccacccgaagcaacagcatcaaacaaggcaaggaccagcactttcctgtgttcatgaacgagaaggaggacatcctgtggtgtaccgagatggagagagtgttcgggttcccagtccactacacagatgtcagcaacatgtctagactggccagacagagactgctgggaagaagctggtccgtccctgtgatcagacacctgttcgcccctctgaaggagtacttcgcctgcgtgagcagcggcaacagcaacgccaacagccggggccccagcttctctagcggcctggtgccactgtccctgagagggagccacatgggccccatggagatctacaaaaccgtgagcgcctggaagcggcagcctgtgcgcgtgctgagcctgtttcggaatatcgataaagtcctgaaaagcctgggattcctggagagcggctctggctccggcggtggcaccctgaagtacgtggaggatgtgacaaacgtggtcagacgggatgtggagaagtggggccccttcgatctggtgtacggcagcacccaacccctgggcagctcttgtgaccggtgccctggctggtacatgtttcagttccaccggatcctgcagtacgccctgccgagacaggagtcccagcggccattcttttggattttcatggacaacttgctgctgaccgaggatgaccaggaaactaccactcggttcctgcagaccgaagccgtgaccctgcaggacgtgagaggccgggactaccagaacgccatgcgggtgtggtccaacatccctggactgaaaagcaagcacgcacctctgacccctaaagaagaggagtacctgcaggcccaggtgcggagcagaagcaagctggacgcccctaaggtggatctgctggtgaagaattgcctcctgcccctgagagagtacttcaagtatttcagccagaatagtctgcccctgggaggcagcggcggcggcgccctggtgacatttgaggacgtcgccgtgcggttcacccaggaggaatgggctctgctggatccttctcagaaaatcctgtaccgggacgtgatgagagagacataccggaatctgacctccgtgggcatcaactgggaatgttgggaccttgaagcctgcttcagaagcctgggaagaaacctgagagtgcaggtggtgaagagaaagtgcgagctgaccaacagcggcccctgcgccgagggcggcccaagcagcggcgcccctcctcccagcggcggcagcccagccggctccccaacctctaccgaggagggcacctctgagtccgccacccccgagagcggccctggcacctccaccgagcccagcgagggcagcgcacccggcagccctgccggcagccccacctccacagaggagggaaccagcaccgagcccagcgaaggcagcgccccaggcaccagcaccgagcctagtgagcaggagattaaacggatcaacaagatcagaagaagacttgtgaaagacagcaacaccaagaaggccggcaagacaggccccatgaaaaccctgctggttagagtgatgacacccgatctgagagagcggctggaaaacctgagaaagaagcctgaaaatatcccccagcccatcagcaatacatctagagccaacctgaataagctgctgaccgattacaccgaaatgaagaaggcgatcctgcatgtgtactgggaagagttccagaaggaccctgtgggcctgatgagccgggtggcccagcctgccagcaagaagatcgatcagaacaagctgaaacctgagatggacgagaagggcaacctgaccaccgccggctttgcctgctctcagtgtggccagcccctgttcgtgtacaagctggagcaggtgtctgagaagggcaaggcttacaccaactacttcggacggtgcaatgtggccgagcacgaaaagctgatcctgctggcccagctgaagcccgagaaggatagcgacgaagccgtgacatatagcctgggaaagtttgggcagagggccctggatttctacagcattcatgtgaccaaggagtccacccaccccgtgaagcccctggcccagatcgccggaaacagatacgcctccggacctgtgggaaaggccctgagcgacgcatgtatgggcacaatcgcctccttcctgtctaagtaccaggacatcatcatcgaacaccagaaggtggtgaagggcaaccagaagagactggagagcctgcgggagctggccggcaaggaaaacctggaataccctagcgtgaccctgccacctcagcctcacaccaaggagggcgttgatgcctacaacgaagtgatcgcccgggtgcgaatgtgggtgaacctgaacctgtggcagaagctgaagctaagcagagatgatgccaagcctctgctgagactgaagggattcccttcctttcctctggtcgagagacaggccaacgaagtggactggtgggacatggtgtgtaacgtgaagaagctgatcaacgagaaaaaggaggatggcaaggtgttttggcagaatctggctggctacaagagacaggaagccctgagaccatacctgagcagcgaggaagatcggaagaagggaaagaaattcgctcggtaccagctgggcgacctgctgctgcacctggaaaagaagcacggcgaggactggggaaaggtgtacgacgaggcctgggagcggattgacaagaaagtggaaggcctgagcaagcacatcaagctggaagaggaacggagaagcgaggacgcccagagcaaggccgccctgaccgactggctgcgggctaaggccagcttcgtgatcgagggcctgaaggaggccgacaaggacgagttctgcagatgcgagctgaagctgcagaagtggtacggggacctgcggggaaagcccttcgccatcgaagccgagaacagcatcctggacatcagcggcttcagcaagcagtacaactgtgccttcatctggcagaaggacggcgtgaagaagctgaacctgtacctgatcatcaactacttcaagggcggcaagctgcggttcaagaagatcaaacctgaagccttcgaagccaacagattctacaccgtgatcaacaaaaagagcggcgagatcgtgcccatggaggtgaacttcaacttcgacgaccccaacctgatcatcctgcctctggcctttggcaagagacagggcagagaattcatctggaacgacctgctgtccctggaaaccggcagcctgaagctggccaacggaagagtgatcgagaagacactgtacaacagaagaacccggcaggatgagcctgccctgttcgtggccctgaccttcgagcggcgggaggtcctggactcctccaatatcaaaccaatgaacctgatcggcgtggcaagaggcgaaaacatccccgccgtgatcgccctgaccgaccccgagggctgcccactgagccggtttaaggatagcctgggaaacccaacccacatcctgagaatcggcgagagctataaggagaagcagcggaccatccaggccaagaaggaggtggagcagcggagagccggcggctacagccggaagtacgccagcaaagccaagaatctggcagacgatatggtgagaaacaccgctagagatctgctgtactacgccgtgacccaggatgccatgctgatcttcgccaacctgagccggggcttcggccggcagggcaagcggaccttcatggccgagagacagtacacacggatggaggactggctgaccgccaagctggcctacgagggcctgagcaagacctacctgtccaagacactggcccagtacacctccaagacatgcagcaactgtgggtttaccatcaccagcgccgactacgacagggtgctggagaagctgaagaagacagcaacaggctggatgaccacaattaacggcaaggagctgaaggtggagggccagattacctactacaacagatacaagagacagaacgtagtcaaggacctgtccgtcgagctggatagactgagcgaagaatctgtgaacaacgacatctcctcctggacaaagggcagaagcggagaagctctgagcctcctgaagaaaagattctcccatagacccgtgcaggagaagttcgtgtgcctgaactgcggcttcgagacacacgcagccgagcaagccgccctgaacatcgccagatcctggctgttcctgcggagccaggagtacaagaaataccagacaaacaagacaaccggcaacaccgataagagagccttcgtcgagacctggcagtccttttaccggaagaagcttaaggaggtgtggaaacctgccgtgcggtctggcggatctggcggaggctccgcccccctgctggcccccaggcccggcgagaccaggcccggctgcaggaagcccggcgccgtgagcttcgccgacgtggccgtgtacttcagccccgaggagtggggctgcctgaggcccgcccagagggccctgtacagggacgtgatgagggagacctacggccacctgggcgccctgggcttccccggccccaagcccgccctgatcagctggatggagcaggagagcgaggcctggagcggcggcccaagcagcggcgcccctcctcccagcggcggcagcccagccggctccccaacctctaccgaggagggcacctctgagtccgccacccccgagagcggccctggcacctccaccgagcccagcgagggcagcgcacccggcagccctgccggcagccccacctccacagaggagggaaccagcaccgagcccagcgaaggcagcgccccaggcaccagcaccgagcctagtgagcaggagattaaacggatcaacaagatcagaagaagacttgtgaaagacagcaacaccaagaaggccggcaagacaggccccatgaaaaccctgctggttagagtgatgacacccgatctgagagagcggctggaaaacctgagaaagaagcctgaaaatatcccccagcccatcagcaatacatctagagccaacctgaataagctgctgaccgattacaccgaaatgaagaaggcgatcctgcatgtgtactgggaagagttccagaaggaccctgtgggcctgatgagccgggtggcccagcctgccagcaagaagatcgatcagaacaagctgaaacctgagatggacgagaagggcaacctgaccaccgccggctttgcctgctctcagtgtggccagcccctgttcgtgtacaagctggagcaggtgtctgagaagggcaaggcttacaccaactacttcggacggtgcaatgtggccgagcacgaaaagctgatcctgctggcccagctgaagcccgagaaggatagcgacgaagccgtgacatatagcctgggaaagtttgggcagagggccctggatttctacagcattcatgtgaccaaggagtccacccaccccgtgaagcccctggcccagatcgccggaaacagatacgcctccggacctgtgggaaaggccctgagcgacgcatgtatgggcacaatcgcctccttcctgtctaagtaccaggacatcatcatcgaacaccagaaggtggtgaagggcaaccagaagagactggagagcctgcgggagctggccggcaaggaaaacctggaataccctagcgtgaccctgccacctcagcctcacaccaaggagggcgttgatgcctacaacgaagtgatcgcccgggtgcgaatgtgggtgaacctgaacctgtggcagaagctgaagctaagcagagatgatgccaagcctctgctgagactgaagggattcccttcctttcctctggtcgagagacaggccaacgaagtggactggtgggacatggtgtgtaacgtgaagaagctgatcaacgagaaaaaggaggatggcaaggtgttttggcagaatctggctggctacaagagacaggaagccctgagaccatacctgagcagcgaggaagatcggaagaagggaaagaaattcgctcggtaccagctgggcgacctgctgctgcacctggaaaagaagcacggcgaggactggggaaaggtgtacgacgaggcctgggagcggattgacaagaaagtggaaggcctgagcaagcacatcaagctggaagaggaacggagaagcgaggacgcccagagcaaggccgccctgaccgactggctgcgggctaaggccagcttcgtgatcgagggcctgaaggaggccgacaaggacgagttctgcagatgcgagctgaagctgcagaagtggtacggggacctgcggggaaagcccttcgccatcgaagccgagaacagcatcctggacatcagcggcttcagcaagcagtacaactgtgccttcatctggcagaaggacggcgtgaagaagctgaacctgtacctgatcatcaactacttcaagggcggcaagctgcggttcaagaagatcaaacctgaagccttcgaagccaacagattctacaccgtgatcaacaaaaagagcggcgagatcgtgcccatggaggtgaacttcaacttcgacgaccccaacctgatcatcctgcctctggcctttggcaagagacagggcagagaattcatctggaacgacctgctgtccctggaaaccggcagcctgaagctggccaacggaagagtgatcgagaagacactgtacaacagaagaacccggcaggatgagcctgccctgttcgtggccctgaccttcgagcggcgggaggtcctggactcctccaatatcaaaccaatgaacctgatcggcgtggcaagaggcgaaaacatccccgccgtgatcgccctgaccgaccccgagggctgcccactgagccggtttaaggatagcctgggaaacccaacccacatcctgagaatcggcgagagctataaggagaagcagcggaccatccaggccaagaaggaggtggagcagcggagagccggcggctacagccggaagtacgccagcaaagccaagaatctggcagacgatatggtgagaaacaccgctagagatctgctgtactacgccgtgacccaggatgccatgctgatcttcgccaacctgagccggggcttcggccggcagggcaagcggaccttcatggccgagagacagtacacacggatggaggactggctgaccgccaagctggcctacgagggcctgagcaagacctacctgtccaagacactggcccagtacacctccaagacatgcagcaactgtgggtttaccatcaccagcgccgactacgacagggtgctggagaagctgaagaagacagcaacaggctggatgaccacaattaacggcaaggagctgaaggtggagggccagattacctactacaacagatacaagagacagaacgtagtcaaggacctgtccgtcgagctggatagactgagcgaagaatctgtgaacaacgacatctcctcctggacaaagggcagaagcggagaagctctgagcctcctgaagaaaagattctcccatagacccgtgcaggagaagttcgtgtgcctgaactgcggcttcgagacacacgcagccgagcaagccgccctgaacatcgccagatcctggctgttcctgcggagccaggagtacaagaaataccagacaaacaagacaaccggcaacaccgataagagagccttcgtcgagacctggcagtccttttaccggaagaagcttaaggaggtgtggaaacctgccgtgcggtctggcggatctggcggaggctcctgcccccctgctggcccccaggcccggcgagaccaggcccggctgcaggaagcccggcgccgtgagcttcgccgacgtggccgtgtacttcagccccgaggagtggggctgcctgaggcccgcccagagggccctgtacagggacgtgatgagggagacctacggccacctgggcgccctgggcttccccggccccaagcccgccctgatcagctggatggagcaggagagcgaggcctggagcggatctggctccggcagcggccccaagaaaaagagaaaagtctaagctgccttctgcggggcttgccttctggccatgcccttcttctctcccttgcacctgtacctcttggtctttgaataaagcctgagtaggaaggctagcaaaaaaaaaaaaaaaaaaaaaaaaaaaaaaaaaaaaaaaaaaaaaaaaaaaaaaaaaaaaaaaaaaaaaaaaaaaaaaaa

SEQ ID NO: 15818 - RNA, 9485 nt, synthetic construct
  source 1..9485: mol_type = other RNA
aggaaataagagagaaaagaagagtaagaagaaatataagagccaccatggcccctaagaagaagcgtaaagtgagccggatggaacgcctcgtctacgaggtgcggcagaagtgcagaaacatcgaggacatctgcatctcctgcggatctctgaacgtgaccctggagcacccactgttcatcggcggcatgtgccagaactgtaaaaactgttttctggagtgtgcctatcaatacgacgatgacggctaccagagctactgcaccatctgttgcggcggaagagaggtgctgatgtgtggaaataacaactgctgccggtgcttctgcgtggaatgcgtggacctgctggtgggccccggcgccgcccaggccgctattaaggaagatccttggaactgctacatgtgcggccacaagggcacatacggcctgctgagacggagagaggactggcctagcagactgcagatgttcttcgccaataaccacgaccaggagttcgacccccctaaggtgtaccctcccgtccccgccgagaagagaaagcccatccgggtcctgagcctgttcgatggcatcgccaccggtctgctggtgctgaaggacctgggcatccaggtggataggtacattgcctccgaggtgtgcgaggactccatcaccgtgggaatggtgcgtcatcagggcaagatcatgtacgtgggcgacgtgcggagcgtgacacagaagcatatccaggagtggggccctttcgacctggtgatcggcggcagcccttgcaatgacctgagcatcgtgaacccagcccggaagggcctgtacgagggaaccggcagactgttcttcgagttttacagactgctgcacgacgcccggcctaaggaaggcgacgaccggcccttcttttggctgttcgagaatgtggtggccatgggagtcagcgacaagcgggatattagccggttcctggagagcaaccccgtgatgatcgatgccaaggaagtgagcgccgcccaccgggccagatacttctggggcaatctgcctggcatgaacagacccctggccagcaccgtgaacgacaagctggagctgcaggagtgcctggagcacggccggatcgccaagttcagcaaggtgagaaccatcaccacccgaagcaacagcatcaaacaaggcaaggaccagcactttcctgtgttcatgaacgagaaggaggacatcctgtggtgtaccgagatggagagagtgttcgggttcccagtccactacacagatgtcagcaacatgtctagactggccagacagagactgctgggaagaagctggtccgtccctgtgatcagacacctgttcgcccctctgaaggagtacttcgcctgcgtgagcagcggcaacagcaacgccaacagccggggccccagcttctctagcggcctggtgccactgtccctgagagggagccacatgggccccatggagatctacaaaaccgtgagcgcctggaagcggcagcctgtgcgcgtgctgagcctgtttcggaatatcgataaagtcctgaaaagcctgggattcctggagagcggctctggctccggcggtggcaccctgaagtacgtggaggatgtgacaaacgtggtcagacgggatgtggagaagtggggccccttcgatctggtgtacggcagcacccaacccctgggcagctcttgtgaccggtgccctggctggtacatgtttcagttccaccggatcctgcagtacgccctgccgagacaggagtcccagcggccattcttttggattttcatggacaacttgctgctgaccgaggatgaccaggaaactaccactcggttcctgcagaccgaagccgtgaccctgcaggacgtgagaggccgggactaccagaacgccatgcgggtgtggtccaacatccctggactgaaaagcaagcacgcacctctgacccctaaagaagaggagtacctgcaggcccaggtgcggagcagaagcaagctggacgcccctaaggtggatctgctggtgaagaattgcctcctgcccctgagagagtacttcaagtatttcagccagaatagtctgcccctgggaggcagcggcggcggcgccctggtgacatttgaggacgtcgccgtgcggttcacccaggaggaatgggctctgctggatccttctcagaaaatcctgtaccgggacgtgatgagagagacataccggaatctgacctccgtgggcatcaactgggaatgttgggaccttgaagcctgcttcagaagcctgggaagaaacctgagagtgcaggtggtgaagagaaagtgcgagctgaccaacagcggcccctgcgccgagggcggcccaagcagcggcgcccctcctcccagcggcggcagcccagccggctccccaacctctaccgaggagggcacctctgagtccgccacccccgagagcggccctggcacctccaccgagcccagcgagggcagcgcacccggcagccctgccggcagccccacctccacagaggagggaaccagcaccgagcccagcgaaggcagcgccccaggcaccagcaccgagcctagtgagcaggagattaaacggatcaacaagatcagaagaagacttgtgaaagacagcaacaccaagaaggccggcaagacaggccccatgaaaaccctgctggttagagtgatgacacccgatctgagagagcggctggaaaacctgagaaagaagcctgaaaatatcccccagcccatcagcaatacatctagagccaacctgaataagctgctgaccgattacaccgaaatgaagaaggcgatcctgcatgtgtactgggaagagttccagaaggaccctgtgggcctgatgagccgggtggcccagcctgccagcaagaagatcgatcagaacaagctgaaacctgagatggacgagaagggcaacctgaccaccgccggctttgcctgctctcagtgtggccagcccctgttcgtgtacaagctggagcaggtgtctgagaagggcaaggcttacaccaactacttcggacggtgcaatgtggccgagcacgaaaagctgatcctgctggcccagctgaagcccgagaaggatagcgacgaagccgtgacatatagcctgggaaagtttgggcagagggccctggatttctacagcattcatgtgaccaaggagtccacccaccccgtgaagcccctggcccagatcgccggaaacagatacgcctccggacctgtgggaaaggccctgagcgacgcatgtatgggcacaatcgcctccttcctgtctaagtaccaggacatcatcatcgaacaccagaaggtggtgaagggcaaccagaagagactggagagcctgcgggagctggccggcaaggaaaacctggaataccctagcgtgaccctgccacctcagcctcacaccaaggagggcgttgatgcctacaacgaagtgatcgcccgggtgcgaatgtgggtgaacctgaacctgtggcagaagctgaagctaagcagagatgatgccaagcctctgctgagactgaagggattcccttcctttcctctggtcgagagacaggccaacgaagtggactggtgggacatggtgtgtaacgtgaagaagctgatcaacgagaaaaaggaggatggcaaggtgttttggcagaatctggctggctacaagagacaggaagccctgagaccatacctgagcagcgaggaagatcggaagaagggaaagaaattcgctcggtaccagctgggcgacctgctgctgcacctggaaaagaagcacggcgaggactggggaaaggtgtacgacgaggcctgggagcggattgacaagaaagtggaaggcctgagcaagcacatcaagctggaagaggaacggagaagcgaggacgcccagagcaaggccgccctgaccgactggctgcgggctaaggccagcttcgtgatcgagggcctgaaggaggccgacaaggacgagttctgcagatgcgagctgaagctgcagaagtggtacggggacctgcggggaaagcccttcgccatcgaagccgagaacagcatcctggacatcagcggcttcagcaagcagtacaactgtgccttcatctggcagaaggacggcgtgaagaagctgaacctgtacctgatcatcaactacttcaagggcggcaagctgcggttcaagaagatcaaacctgaagccttcgaagccaacagattctacaccgtgatcaacaaaaagagcggcgagatcgtgcccatggaggtgaacttcaacttcgacgaccccaacctgatcatcctgcctctggcctttggcaagagacagggcagagaattcatctggaacgacctgctgtccctggaaaccggcagcctgaagctggccaacggaagagtgatcgagaagacactgtacaacagaagaacccggcaggatgagcctgccctgttcgtggccctgaccttcgagcggcgggaggtcctggactcctccaatatcaaaccaatgaacctgatcggcgtggcaagaggcgaaaacatccccgccgtgatcgccctgaccgaccccgagggctgcccactgagccggtttaaggatagcctgggaaacccaacccacatcctgagaatcggcgagagctataaggagaagcagcggaccatccaggccaagaaggaggtggagcagcggagagccggcggctacagccggaagtacgccagcaaagccaagaatctggcagacgatatggtgagaaacaccgctagagatctgctgtactacgccgtgacccaggatgccatgctgatcttcgccaacctgagccggggcttcggccggcagggcaagcggaccttcatggccgagagacagtacacacggatggaggactggctgaccgccaagctggcctacgagggcctgagcaagacctacctgtccaagacactggcccagtacacctccaagacatgcagcaactgtgggtttaccatcaccagcgccgactacgacagggtgctggagaagctgaagaagacagcaacaggctggatgaccacaattaacggcaaggagctgaaggtggagggccagattacctactacaacagatacaagagacagaacgtagtcaaggacctgtccgtcgagctggatagactgagcgaagaatctgtgaacaacgacatctcctcctggacaaagggcagaagcggagaagctctgagcctcctgaagaaaagattctcccatagacccgtgcaggagaagttcgtgtgcctgaactgcggcttcgagacacacgcagccgagcaagccgccctgaacatcgccagatcctggctgttcctgcggagccaggagtacaagaaataccagacaaacaagacaaccggcaacaccgataagagagccttcgtcgagacctggcagtccttttaccggaagaagcttaaggaggtgtggaaacctgccgtgcggtctggcggatctggcggaggctccttccagggcctggtgaccttcgaggaggtggccgtgtacttcaccagggaggagggcgccctgctggaccccacccagagggccctgtacagggacgtgatgcaggagaactacgagaccgtggtgctgctgggcaaggagagcttcagcaagcccgacgtgatcagccagctggagaggggcgaggagccctgggtgcccgacctgcagggcagcgagaaggagaggcccgaggagaacttcggcggcccaagcagcggcgcccctcctcccagcggcggcagcccagccggctccccaacctctaccgaggagggcacctctgagtccgccacccccgagagcggccctggcacctccaccgagcccagcgagggcagcgcacccggcagccctgccggcagccccacctccacagaggagggaaccagcaccgagcccagcgaaggcagcgccccaggcaccagcaccgagcctagtgagcaggagattaaacggatcaacaagatcagaagaagacttgtgaaagacagcaacaccaagaaggccggcaagacaggccccatgaaaaccctgctggttagagtgatgacacccgatctgagagagcggctggaaaacctgagaaagaagcctgaaaatatcccccagcccatcagcaatacatctagagccaacctgaataagctgctgaccgattacaccgaaatgaagaaggcgatcctgcatgtgtactgggaagagttccagaaggaccctgtgggcctgatgagccgggtggcccagcctgccagcaagaagatcgatcagaacaagctgaaacctgagatggacgagaagggcaacctgaccaccgccggctttgcctgctctcagtgtggccagcccctgttcgtgtacaagctggagcaggtgtctgagaagggcaaggcttacaccaactacttcggacggtgcaatgtggccgagcacgaaaagctgatcctgctggcccagctgaagcccgagaaggatagcgacgaagccgtgacatatagcctgggaaagtttgggcagagggccctggatttctacagcattcatgtgaccaaggagtccacccaccccgtgaagcccctggcccagatcgccggaaacagatacgcctccggacctgtgggaaaggccctgagcgacgcatgtatgggcacaatcgcctccttcctgtctaagtaccaggacatcatcatcgaacaccagaaggtggtgaagggcaaccagaagagactggagagcctgcgggagctggccggcaaggaaaacctggaataccctagcgtgaccctgccacctcagcctcacaccaaggagggcgttgatgcctacaacgaagtgatcgcccgggtgcgaatgtgggtgaacctgaacctgtggcagaagctgaagctaagcagagatgatgccaagcctctgctgagactgaagggattcccttcctttcctctggtcgagagacaggccaacgaagtggactggtgggacatggtgtgtaacgtgaagaagctgatcaacgagaaaaaggaggatggcaaggtgttttggcagaatctggctggctacaagagacaggaagccctgagaccatacctgagcagcgaggaagatcggaagaagggaaagaaattcgctcggtaccagctgggcgacctgctgctgcacctggaaaagaagcacggcgaggactggggaaaggtgtacgacgaggcctgggagcggattgacaagaaagtggaaggcctgagcaagcacatcaagctggaagaggaacggagaagcgaggacgcccagagcaaggccgccctgaccgactggctgcgggctaaggccagcttcgtgatcgagggcctgaaggaggccgacaaggacgagttctgcagatgcgagctgaagctgcagaagtggtacggggacctgcggggaaagcccttcgccatcgaagccgagaacagcatcctggacatcagcggcttcagcaagcagtacaactgtgccttcatctggcagaaggacggcgtgaagaagctgaacctgtacctgatcatcaactacttcaagggcggcaagctgcggttcaagaagatcaaacctgaagccttcgaagccaacagattctacaccgtgatcaacaaaaagagcggcgagatcgtgcccatggaggtgaacttcaacttcgacgaccccaacctgatcatcctgcctctggcctttggcaagagacagggcagagaattcatctggaacgacctgctgtccctggaaaccggcagcctgaagctggccaacggaagagtgatcgagaagacactgtacaacagaagaacccggcaggatgagcctgccctgttcgtggccctgaccttcgagcggcgggaggtcctggactcctccaatatcaaaccaatgaacctgatcggcgtggcaagaggcgaaaacatccccgccgtgatcgccctgaccgaccccgagggctgcccactgagccggtttaaggatagcctgggaaacccaacccacatcctgagaatcggcgagagctataaggagaagcagcggaccatccaggccaagaaggaggtggagcagcggagagccggcggctacagccggaagtacgccagcaaagccaagaatctggcagacgatatggtgagaaacaccgctagagatctgctgtactacgccgtgacccaggatgccatgctgatcttcgccaacctgagccggggcttcggccggcagggcaagcggaccttcatggccgagagacagtacacacggatggaggactggctgaccgccaagctggcctacgagggcctgagcaagacctacctgtccaagacactggcccagtacacctccaagacatgcagcaactgtgggtttaccatcaccagcgccgactacgacagggtgctggagaagctgaagaagacagcaacaggctggatgaccacaattaacggcaaggagctgaaggtggagggccagattacctactacaacagatacaagagacagaacgtagtcaaggacctgtccgtcgagctggatagactgagcgaagaatctgtgaacaacgacatctcctcctggacaaagggcagaagcggagaagctctgagcctcctgaagaaaagattctcccatagacccgtgcaggagaagttcgtgtgcctgaactgcggcttcgagacacacgcagccgagcaagccgccctgaacatcgccagatcctggctgttcctgcggagccaggagtacaagaaataccagacaaacaagacaaccggcaacaccgataagagagccttcgtcgagacctggcagtccttttaccggaagaagcttaaggaggtgtggaaacctgccgtgcggtctggcggatctggcggaggctcctttccagggcctggtgaccttcgaggaggtggccgtgtacttcaccagggaggagggcgccctgctggaccccacccagagggccctgtacagggacgtgatgcaggagaactacgagaccgtggtgctgctgggcaaggagagcttcagcaagcccgacgtgatcagccagctggagaggggcgaggagccctgggtgcccgacctgcagggcagcgagaaggagaggcccgaggagaacttcggatctggctccggcagcggccccaagaaaaagagaaaagtctaagctgccttctgcggggcttgccttctggccatgcccttcttctctcccttgcacctgtacctcttggtctttgaataaagcctgagtaggaaggctagcaaaaaaaaaaaaaaaaaaaaaaaaaaaaaaaaaaaaaaaaaaaaaaaaaaaaaaaaaaaaaaaaaaaaaaaaaaaaaaaa

SEQ ID NO: 15819 - RNA, 9485 nt, synthetic construct
  source 1..9485: mol_type = other RNA
aggaaataagagagaaaagaagagtaagaagaaatataagagccaccatggcccctaagaagaagcgtaaagtgagccggatggaacgcctcgtctacgaggtgcggcagaagtgcagaaacatcgaggacatctgcatctcctgcggatctctgaacgtgaccctggagcacccactgttcatcggcggcatgtgccagaactgtaaaaactgttttctggagtgtgcctatcaatacgacgatgacggctaccagagctactgcaccatctgttgcggcggaagagaggtgctgatgtgtggaaataacaactgctgccggtgcttctgcgtggaatgcgtggacctgctggtgggccccggcgccgcccaggccgctattaaggaagatccttggaactgctacatgtgcggccacaagggcacatacggcctgctgagacggagagaggactggcctagcagactgcagatgttcttcgccaataaccacgaccaggagttcgacccccctaaggtgtaccctcccgtccccgccgagaagagaaagcccatccgggtcctgagcctgttcgatggcatcgccaccggtctgctggtgctgaaggacctgggcatccaggtggataggtacattgcctccgaggtgtgcgaggactccatcaccgtgggaatggtgcgtcatcagggcaagatcatgtacgtgggcgacgtgcggagcgtgacacagaagcatatccaggagtggggccctttcgacctggtgatcggcggcagcccttgcaatgacctgagcatcgtgaacccagcccggaagggcctgtacgagggaaccggcagactgttcttcgagttttacagactgctgcacgacgcccggcctaaggaaggcgacgaccggcccttcttttggctgttcgagaatgtggtggccatgggagtcagcgacaagcgggatattagccggttcctggagagcaaccccgtgatgatcgatgccaaggaagtgagcgccgcccaccgggccagatacttctggggcaatctgcctggcatgaacagacccctggccagcaccgtgaacgacaagctggagctgcaggagtgcctggagcacggccggatcgccaagttcagcaaggtgagaaccatcaccacccgaagcaacagcatcaaacaaggcaaggaccagcactttcctgtgttcatgaacgagaaggaggacatcctgtggtgtaccgagatggagagagtgttcgggttcccagtccactacacagatgtcagcaacatgtctagactggccagacagagactgctgggaagaagctggtccgtccctgtgatcagacacctgttcgcccctctgaaggagtacttcgcctgcgtgagcagcggcaacagcaacgccaacagccggggccccagcttctctagcggcctggtgccactgtccctgagagggagccacatgggccccatggagatctacaaaaccgtgagcgcctggaagcggcagcctgtgcgcgtgctgagcctgtttcggaatatcgataaagtcctgaaaagcctgggattcctggagagcggctctggctccggcggtggcaccctgaagtacgtggaggatgtgacaaacgtggtcagacgggatgtggagaagtggggccccttcgatctggtgtacggcagcacccaacccctgggcagctcttgtgaccggtgccctggctggtacatgtttcagttccaccggatcctgcagtacgccctgccgagacaggagtcccagcggccattcttttggattttcatggacaacttgctgctgaccgaggatgaccaggaaactaccactcggttcctgcagaccgaagccgtgaccctgcaggacgtgagaggccgggactaccagaacgccatgcgggtgtggtccaacatccctggactgaaaagcaagcacgcacctctgacccctaaagaagaggagtacctgcaggcccaggtgcggagcagaagcaagctggacgcccctaaggtggatctgctggtgaagaattgcctcctgcccctgagagagtacttcaagtatttcagccagaatagtctgcccctgggaggcagcggcggcggcgccctggtgacatttgaggacgtcgccgtgcggttcacccaggaggaatgggctctgctggatccttctcagaaaatcctgtaccgggacgtgatgagagagacataccggaatctgacctccgtgggcatcaactgggaatgttgggaccttgaagcctgcttcagaagcctgggaagaaacctgagagtgcaggtggtgaagagaaagtgcgagctgaccaacagcggcccctgcgccgagggcggcccaagcagcggcgcccctcctcccagcggcggcagcccagccggctccccaacctctaccgaggagggcacctctgagtccgccacccccgagagcggccctggcacctccaccgagcccagcgagggcagcgcacccggcagccctgccggcagccccacctccacagaggagggaaccagcaccgagcccagcgaaggcagcgccccaggcaccagcaccgagcctagtgagcaggagattaaacggatcaacaagatcagaagaagacttgtgaaagacagcaacaccaagaaggccggcaagacaggccccatgaaaaccctgctggttagagtgatgacacccgatctgagagagcggctggaaaacctgagaaagaagcctgaaaatatcccccagcccatcagcaatacatctagagccaacctgaataagctgctgaccgattacaccgaaatgaagaaggcgatcctgcatgtgtactgggaagagttccagaaggaccctgtgggcctgatgagccgggtggcccagcctgccagcaagaagatcgatcagaacaagctgaaacctgagatggacgagaagggcaacctgaccaccgccggctttgcctgctctcagtgtggccagcccctgttcgtgtacaagctggagcaggtgtctgagaagggcaaggcttacaccaactacttcggacggtgcaatgtggccgagcacgaaaagctgatcctgctggcccagctgaagcccgagaaggatagcgacgaagccgtgacatatagcctgggaaagtttgggcagagggccctggatttctacagcattcatgtgaccaaggagtccacccaccccgtgaagcccctggcccagatcgccggaaacagatacgcctccggacctgtgggaaaggccctgagcgacgcatgtatgggcacaatcgcctccttcctgtctaagtaccaggacatcatcatcgaacaccagaaggtggtgaagggcaaccagaagagactggagagcctgcgggagctggccggcaaggaaaacctggaataccctagcgtgaccctgccacctcagcctcacaccaaggagggcgttgatgcctacaacgaagtgatcgcccgggtgcgaatgtgggtgaacctgaacctgtggcagaagctgaagctaagcagagatgatgccaagcctctgctgagactgaagggattcccttcctttcctctggtcgagagacaggccaacgaagtggactggtgggacatggtgtgtaacgtgaagaagctgatcaacgagaaaaaggaggatggcaaggtgttttggcagaatctggctggctacaagagacaggaagccctgagaccatacctgagcagcgaggaagatcggaagaagggaaagaaattcgctcggtaccagctgggcgacctgctgctgcacctggaaaagaagcacggcgaggactggggaaaggtgtacgacgaggcctgggagcggattgacaagaaagtggaaggcctgagcaagcacatcaagctggaagaggaacggagaagcgaggacgcccagagcaaggccgccctgaccgactggctgcgggctaaggccagcttcgtgatcgagggcctgaaggaggccgacaaggacgagttctgcagatgcgagctgaagctgcagaagtggtacggggacctgcggggaaagcccttcgccatcgaagccgagaacagcatcctggacatcagcggcttcagcaagcagtacaactgtgccttcatctggcagaaggacggcgtgaagaagctgaacctgtacctgatcatcaactacttcaagggcggcaagctgcggttcaagaagatcaaacctgaagccttcgaagccaacagattctacaccgtgatcaacaaaaagagcggcgagatcgtgcccatggaggtgaacttcaacttcgacgaccccaacctgatcatcctgcctctggcctttggcaagagacagggcagagaattcatctggaacgacctgctgtccctggaaaccggcagcctgaagctggccaacggaagagtgatcgagaagacactgtacaacagaagaacccggcaggatgagcctgccctgttcgtggccctgaccttcgagcggcgggaggtcctggactcctccaatatcaaaccaatgaacctgatcggcgtggcaagaggcgaaaacatccccgccgtgatcgccctgaccgaccccgagggctgcccactgagccggtttaaggatagcctgggaaacccaacccacatcctgagaatcggcgagagctataaggagaagcagcggaccatccaggccaagaaggaggtggagcagcggagagccggcggctacagccggaagtacgccagcaaagccaagaatctggcagacgatatggtgagaaacaccgctagagatctgctgtactacgccgtgacccaggatgccatgctgatcttcgccaacctgagccggggcttcggccggcagggcaagcggaccttcatggccgagagacagtacacacggatggaggactggctgaccgccaagctggcctacgagggcctgagcaagacctacctgtccaagacactggcccagtacacctccaagacatgcagcaactgtgggtttaccatcaccagcgccgactacgacagggtgctggagaagctgaagaagacagcaacaggctggatgaccacaattaacggcaaggagctgaaggtggagggccagattacctactacaacagatacaagagacagaacgtagtcaaggacctgtccgtcgagctggatagactgagcgaagaatctgtgaacaacgacatctcctcctggacaaagggcagaagcggagaagctctgagcctcctgaagaaaagattctcccatagacccgtgcaggagaagttcgtgtgcctgaactgcggcttcgagacacacgcagccgagcaagccgccctgaacatcgccagatcctggctgttcctgcggagccaggagtacaagaaataccagacaaacaagacaaccggcaacaccgataagagagccttcgtcgagacctggcagtccttttaccggaagaagcttaaggaggtgtggaaacctgccgtgcggtctggcggatctggcggaggctcccaggccgaggtgaccttcgaggacgtggccgtgctgctgagcagggaggagtggggcaggctgggccccgtgcagaagggcctgtacagggacgtgatgctggagacctacaggaacctggtgagcctgggcggcggccccgccggccccaagcccgaggtgatcacccagctggagaggggcgacgagccctgggtgcccgacgtgcagggcagggagaggctgaccatcgacggcagcgccggcggcccaagcagcggcgcccctcctcccagcggcggcagcccagccggctccccaacctctaccgaggagggcacctctgagtccgccacccccgagagcggccctggcacctccaccgagcccagcgagggcagcgcacccggcagccctgccggcagccccacctccacagaggagggaaccagcaccgagcccagcgaaggcagcgccccaggcaccagcaccgagcctagtgagcaggagattaaacggatcaacaagatcagaagaagacttgtgaaagacagcaacaccaagaaggccggcaagacaggccccatgaaaaccctgctggttagagtgatgacacccgatctgagagagcggctggaaaacctgagaaagaagcctgaaaatatcccccagcccatcagcaatacatctagagccaacctgaataagctgctgaccgattacaccgaaatgaagaaggcgatcctgcatgtgtactgggaagagttccagaaggaccctgtgggcctgatgagccgggtggcccagcctgccagcaagaagatcgatcagaacaagctgaaacctgagatggacgagaagggcaacctgaccaccgccggctttgcctgctctcagtgtggccagcccctgttcgtgtacaagctggagcaggtgtctgagaagggcaaggcttacaccaactacttcggacggtgcaatgtggccgagcacgaaaagctgatcctgctggcccagctgaagcccgagaaggatagcgacgaagccgtgacatatagcctgggaaagtttgggcagagggccctggatttctacagcattcatgtgaccaaggagtccacccaccccgtgaagcccctggcccagatcgccggaaacagatacgcctccggacctgtgggaaaggccctgagcgacgcatgtatgggcacaatcgcctccttcctgtctaagtaccaggacatcatcatcgaacaccagaaggtggtgaagggcaaccagaagagactggagagcctgcgggagctggccggcaaggaaaacctggaataccctagcgtgaccctgccacctcagcctcacaccaaggagggcgttgatgcctacaacgaagtgatcgcccgggtgcgaatgtgggtgaacctgaacctgtggcagaagctgaagctaagcagagatgatgccaagcctctgctgagactgaagggattcccttcctttcctctggtcgagagacaggccaacgaagtggactggtgggacatggtgtgtaacgtgaagaagctgatcaacgagaaaaaggaggatggcaaggtgttttggcagaatctggctggctacaagagacaggaagccctgagaccatacctgagcagcgaggaagatcggaagaagggaaagaaattcgctcggtaccagctgggcgacctgctgctgcacctggaaaagaagcacggcgaggactggggaaaggtgtacgacgaggcctgggagcggattgacaagaaagtggaaggcctgagcaagcacatcaagctggaagaggaacggagaagcgaggacgcccagagcaaggccgccctgaccgactggctgcgggctaaggccagcttcgtgatcgagggcctgaaggaggccgacaaggacgagttctgcagatgcgagctgaagctgcagaagtggtacggggacctgcggggaaagcccttcgccatcgaagccgagaacagcatcctggacatcagcggcttcagcaagcagtacaactgtgccttcatctggcagaaggacggcgtgaagaagctgaacctgtacctgatcatcaactacttcaagggcggcaagctgcggttcaagaagatcaaacctgaagccttcgaagccaacagattctacaccgtgatcaacaaaaagagcggcgagatcgtgcccatggaggtgaacttcaacttcgacgaccccaacctgatcatcctgcctctggcctttggcaagagacagggcagagaattcatctggaacgacctgctgtccctggaaaccggcagcctgaagctggccaacggaagagtgatcgagaagacactgtacaacagaagaacccggcaggatgagcctgccctgttcgtggccctgaccttcgagcggcgggaggtcctggactcctccaatatcaaaccaatgaacctgatcggcgtggcaagaggcgaaaacatccccgccgtgatcgccctgaccgaccccgagggctgcccactgagccggtttaaggatagcctgggaaacccaacccacatcctgagaatcggcgagagctataaggagaagcagcggaccatccaggccaagaaggaggtggagcagcggagagccggcggctacagccggaagtacgccagcaaagccaagaatctggcagacgatatggtgagaaacaccgctagagatctgctgtactacgccgtgacccaggatgccatgctgatcttcgccaacctgagccggggcttcggccggcagggcaagcggaccttcatggccgagagacagtacacacggatggaggactggctgaccgccaagctggcctacgagggcctgagcaagacctacctgtccaagacactggcccagtacacctccaagacatgcagcaactgtgggtttaccatcaccagcgccgactacgacagggtgctggagaagctgaagaagacagcaacaggctggatgaccacaattaacggcaaggagctgaaggtggagggccagattacctactacaacagatacaagagacagaacgtagtcaaggacctgtccgtcgagctggatagactgagcgaagaatctgtgaacaacgacatctcctcctggacaaagggcagaagcggagaagctctgagcctcctgaagaaaagattctcccatagacccgtgcaggagaagttcgtgtgcctgaactgcggcttcgagacacacgcagccgagcaagccgccctgaacatcgccagatcctggctgttcctgcggagccaggagtacaagaaataccagacaaacaagacaaccggcaacaccgataagagagccttcgtcgagacctggcagtccttttaccggaagaagcttaaggaggtgtggaaacctgccgtgcggtctggcggatctggcggaggctcctcaggccgaggtgaccttcgaggacgtggccgtgctgctgagcagggaggagtggggcaggctgggccccgtgcagaagggcctgtacagggacgtgatgctggagacctacaggaacctggtgagcctgggcggcggccccgccggccccaagcccgaggtgatcacccagctggagaggggcgacgagccctgggtgcccgacgtgcagggcagggagaggctgaccatcgacggcagcgccggatctggctccggcagcggccccaagaaaaagagaaaagtctaagctgccttctgcggggcttgccttctggccatgcccttcttctctcccttgcacctgtacctcttggtctttgaataaagcctgagtaggaaggctagcaaaaaaaaaaaaaaaaaaaaaaaaaaaaaaaaaaaaaaaaaaaaaaaaaaaaaaaaaaaaaaaaaaaaaaaaaaaaaaaa

SEQ ID NO: 15820 - RNA, 9485 nt, synthetic construct
  source 1..9485: mol_type = other RNA
aggaaataagagagaaaagaagagtaagaagaaatataagagccaccatggcccctaagaagaagcgtaaagtgagccggatggaacgcctcgtctacgaggtgcggcagaagtgcagaaacatcgaggacatctgcatctcctgcggatctctgaacgtgaccctggagcacccactgttcatcggcggcatgtgccagaactgtaaaaactgttttctggagtgtgcctatcaatacgacgatgacggctaccagagctactgcaccatctgttgcggcggaagagaggtgctgatgtgtggaaataacaactgctgccggtgcttctgcgtggaatgcgtggacctgctggtgggccccggcgccgcccaggccgctattaaggaagatccttggaactgctacatgtgcggccacaagggcacatacggcctgctgagacggagagaggactggcctagcagactgcagatgttcttcgccaataaccacgaccaggagttcgacccccctaaggtgtaccctcccgtccccgccgagaagagaaagcccatccgggtcctgagcctgttcgatggcatcgccaccggtctgctggtgctgaaggacctgggcatccaggtggataggtacattgcctccgaggtgtgcgaggactccatcaccgtgggaatggtgcgtcatcagggcaagatcatgtacgtgggcgacgtgcggagcgtgacacagaagcatatccaggagtggggccctttcgacctggtgatcggcggcagcccttgcaatgacctgagcatcgtgaacccagcccggaagggcctgtacgagggaaccggcagactgttcttcgagttttacagactgctgcacgacgcccggcctaaggaaggcgacgaccggcccttcttttggctgttcgagaatgtggtggccatgggagtcagcgacaagcgggatattagccggttcctggagagcaaccccgtgatgatcgatgccaaggaagtgagcgccgcccaccgggccagatacttctggggcaatctgcctggcatgaacagacccctggccagcaccgtgaacgacaagctggagctgcaggagtgcctggagcacggccggatcgccaagttcagcaaggtgagaaccatcaccacccgaagcaacagcatcaaacaaggcaaggaccagcactttcctgtgttcatgaacgagaaggaggacatcctgtggtgtaccgagatggagagagtgttcgggttcccagtccactacacagatgtcagcaacatgtctagactggccagacagagactgctgggaagaagctggtccgtccctgtgatcagacacctgttcgcccctctgaaggagtacttcgcctgcgtgagcagcggcaacagcaacgccaacagccggggccccagcttctctagcggcctggtgccactgtccctgagagggagccacatgggccccatggagatctacaaaaccgtgagcgcctggaagcggcagcctgtgcgcgtgctgagcctgtttcggaatatcgataaagtcctgaaaagcctgggattcctggagagcggctctggctccggcggtggcaccctgaagtacgtggaggatgtgacaaacgtggtcagacgggatgtggagaagtggggccccttcgatctggtgtacggcagcacccaacccctgggcagctcttgtgaccggtgccctggctggtacatgtttcagttccaccggatcctgcagtacgccctgccgagacaggagtcccagcggccattcttttggattttcatggacaacttgctgctgaccgaggatgaccaggaaactaccactcggttcctgcagaccgaagccgtgaccctgcaggacgtgagaggccgggactaccagaacgccatgcgggtgtggtccaacatccctggactgaaaagcaagcacgcacctctgacccctaaagaagaggagtacctgcaggcccaggtgcggagcagaagcaagctggacgcccctaaggtggatctgctggtgaagaattgcctcctgcccctgagagagtacttcaagtatttcagccagaatagtctgcccctgggaggcagcggcggcggcgccctggtgacatttgaggacgtcgccgtgcggttcacccaggaggaatgggctctgctggatccttctcagaaaatcctgtaccgggacgtgatgagagagacataccggaatctgacctccgtgggcatcaactgggaatgttgggaccttgaagcctgcttcagaagcctgggaagaaacctgagagtgcaggtggtgaagagaaagtgcgagctgaccaacagcggcccctgcgccgagggcggcccaagcagcggcgcccctcctcccagcggcggcagcccagccggctccccaacctctaccgaggagggcacctctgagtccgccacccccgagagcggccctggcacctccaccgagcccagcgagggcagcgcacccggcagccctgccggcagccccacctccacagaggagggaaccagcaccgagcccagcgaaggcagcgccccaggcaccagcaccgagcctagtgagcaggagattaaacggatcaacaagatcagaagaagacttgtgaaagacagcaacaccaagaaggccggcaagacaggccccatgaaaaccctgctggttagagtgatgacacccgatctgagagagcggctggaaaacctgagaaagaagcctgaaaatatcccccagcccatcagcaatacatctagagccaacctgaataagctgctgaccgattacaccgaaatgaagaaggcgatcctgcatgtgtactgggaagagttccagaaggaccctgtgggcctgatgagccgggtggcccagcctgccagcaagaagatcgatcagaacaagctgaaacctgagatggacgagaagggcaacctgaccaccgccggctttgcctgctctcagtgtggccagcccctgttcgtgtacaagctggagcaggtgtctgagaagggcaaggcttacaccaactacttcggacggtgcaatgtggccgagcacgaaaagctgatcctgctggcccagctgaagcccgagaaggatagcgacgaagccgtgacatatagcctgggaaagtttgggcagagggccctggatttctacagcattcatgtgaccaaggagtccacccaccccgtgaagcccctggcccagatcgccggaaacagatacgcctccggacctgtgggaaaggccctgagcgacgcatgtatgggcacaatcgcctccttcctgtctaagtaccaggacatcatcatcgaacaccagaaggtggtgaagggcaaccagaagagactggagagcctgcgggagctggccggcaaggaaaacctggaataccctagcgtgaccctgccacctcagcctcacaccaaggagggcgttgatgcctacaacgaagtgatcgcccgggtgcgaatgtgggtgaacctgaacctgtggcagaagctgaagctaagcagagatgatgccaagcctctgctgagactgaagggattcccttcctttcctctggtcgagagacaggccaacgaagtggactggtgggacatggtgtgtaacgtgaagaagctgatcaacgagaaaaaggaggatggcaaggtgttttggcagaatctggctggctacaagagacaggaagccctgagaccatacctgagcagcgaggaagatcggaagaagggaaagaaattcgctcggtaccagctgggcgacctgctgctgcacctggaaaagaagcacggcgaggactggggaaaggtgtacgacgaggcctgggagcggattgacaagaaagtggaaggcctgagcaagcacatcaagctggaagaggaacggagaagcgaggacgcccagagcaaggccgccctgaccgactggctgcgggctaaggccagcttcgtgatcgagggcctgaaggaggccgacaaggacgagttctgcagatgcgagctgaagctgcagaagtggtacggggacctgcggggaaagcccttcgccatcgaagccgagaacagcatcctggacatcagcggcttcagcaagcagtacaactgtgccttcatctggcagaaggacggcgtgaagaagctgaacctgtacctgatcatcaactacttcaagggcggcaagctgcggttcaagaagatcaaacctgaagccttcgaagccaacagattctacaccgtgatcaacaaaaagagcggcgagatcgtgcccatggaggtgaacttcaacttcgacgaccccaacctgatcatcctgcctctggcctttggcaagagacagggcagagaattcatctggaacgacctgctgtccctggaaaccggcagcctgaagctggccaacggaagagtgatcgagaagacactgtacaacagaagaacccggcaggatgagcctgccctgttcgtggccctgaccttcgagcggcgggaggtcctggactcctccaatatcaaaccaatgaacctgatcggcgtggcaagaggcgaaaacatccccgccgtgatcgccctgaccgaccccgagggctgcccactgagccggtttaaggatagcctgggaaacccaacccacatcctgagaatcggcgagagctataaggagaagcagcggaccatccaggccaagaaggaggtggagcagcggagagccggcggctacagccggaagtacgccagcaaagccaagaatctggcagacgatatggtgagaaacaccgctagagatctgctgtactacgccgtgacccaggatgccatgctgatcttcgccaacctgagccggggcttcggccggcagggcaagcggaccttcatggccgagagacagtacacacggatggaggactggctgaccgccaagctggcctacgagggcctgagcaagacctacctgtccaagacactggcccagtacacctccaagacatgcagcaactgtgggtttaccatcaccagcgccgactacgacagggtgctggagaagctgaagaagacagcaacaggctggatgaccacaattaacggcaaggagctgaaggtggagggccagattacctactacaacagatacaagagacagaacgtagtcaaggacctgtccgtcgagctggatagactgagcgaagaatctgtgaacaacgacatctcctcctggacaaagggcagaagcggagaagctctgagcctcctgaagaaaagattctcccatagacccgtgcaggagaagttcgtgtgcctgaactgcggcttcgagacacacgcagccgagcaagccgccctgaacatcgccagatcctggctgttcctgcggagccaggagtacaagaaataccagacaaacaagacaaccggcaacaccgataagagagccttcgtcgagacctggcagtccttttaccggaagaagcttaaggaggtgtggaaacctgccgtgcggtctggcggatctggcggaggctccaaggagctgcccagcgtgttcgaggacgtggccgtgtacttcaccagggaggagtggggcatgctggacaagaggcagaaggagctgtacagggacgtgatgaggatgaactacgagctgctggccagcctgggccccgccgccgccaagcccgacctgatcagcaagctggagaggagggccgccccctggatcaaggaccccaacggccccaagtggggcgagggccacccccccggcaagggcggcccaagcagcggcgcccctcctcccagcggcggcagcccagccggctccccaacctctaccgaggagggcacctctgagtccgccacccccgagagcggccctggcacctccaccgagcccagcgagggcagcgcacccggcagccctgccggcagccccacctccacagaggagggaaccagcaccgagcccagcgaaggcagcgccccaggcaccagcaccgagcctagtgagcaggagattaaacggatcaacaagatcagaagaagacttgtgaaagacagcaacaccaagaaggccggcaagacaggccccatgaaaaccctgctggttagagtgatgacacccgatctgagagagcggctggaaaacctgagaaagaagcctgaaaatatcccccagcccatcagcaatacatctagagccaacctgaataagctgctgaccgattacaccgaaatgaagaaggcgatcctgcatgtgtactgggaagagttccagaaggaccctgtgggcctgatgagccgggtggcccagcctgccagcaagaagatcgatcagaacaagctgaaacctgagatggacgagaagggcaacctgaccaccgccggctttgcctgctctcagtgtggccagcccctgttcgtgtacaagctggagcaggtgtctgagaagggcaaggcttacaccaactacttcggacggtgcaatgtggccgagcacgaaaagctgatcctgctggcccagctgaagcccgagaaggatagcgacgaagccgtgacatatagcctgggaaagtttgggcagagggccctggatttctacagcattcatgtgaccaaggagtccacccaccccgtgaagcccctggcccagatcgccggaaacagatacgcctccggacctgtgggaaaggccctgagcgacgcatgtatgggcacaatcgcctccttcctgtctaagtaccaggacatcatcatcgaacaccagaaggtggtgaagggcaaccagaagagactggagagcctgcgggagctggccggcaaggaaaacctggaataccctagcgtgaccctgccacctcagcctcacaccaaggagggcgttgatgcctacaacgaagtgatcgcccgggtgcgaatgtgggtgaacctgaacctgtggcagaagctgaagctaagcagagatgatgccaagcctctgctgagactgaagggattcccttcctttcctctggtcgagagacaggccaacgaagtggactggtgggacatggtgtgtaacgtgaagaagctgatcaacgagaaaaaggaggatggcaaggtgttttggcagaatctggctggctacaagagacaggaagccctgagaccatacctgagcagcgaggaagatcggaagaagggaaagaaattcgctcggtaccagctgggcgacctgctgctgcacctggaaaagaagcacggcgaggactggggaaaggtgtacgacgaggcctgggagcggattgacaagaaagtggaaggcctgagcaagcacatcaagctggaagaggaacggagaagcgaggacgcccagagcaaggccgccctgaccgactggctgcgggctaaggccagcttcgtgatcgagggcctgaaggaggccgacaaggacgagttctgcagatgcgagctgaagctgcagaagtggtacggggacctgcggggaaagcccttcgccatcgaagccgagaacagcatcctggacatcagcggcttcagcaagcagtacaactgtgccttcatctggcagaaggacggcgtgaagaagctgaacctgtacctgatcatcaactacttcaagggcggcaagctgcggttcaagaagatcaaacctgaagccttcgaagccaacagattctacaccgtgatcaacaaaaagagcggcgagatcgtgcccatggaggtgaacttcaacttcgacgaccccaacctgatcatcctgcctctggcctttggcaagagacagggcagagaattcatctggaacgacctgctgtccctggaaaccggcagcctgaagctggccaacggaagagtgatcgagaagacactgtacaacagaagaacccggcaggatgagcctgccctgttcgtggccctgaccttcgagcggcgggaggtcctggactcctccaatatcaaaccaatgaacctgatcggcgtggcaagaggcgaaaacatccccgccgtgatcgccctgaccgaccccgagggctgcccactgagccggtttaaggatagcctgggaaacccaacccacatcctgagaatcggcgagagctataaggagaagcagcggaccatccaggccaagaaggaggtggagcagcggagagccggcggctacagccggaagtacgccagcaaagccaagaatctggcagacgatatggtgagaaacaccgctagagatctgctgtactacgccgtgacccaggatgccatgctgatcttcgccaacctgagccggggcttcggccggcagggcaagcggaccttcatggccgagagacagtacacacggatggaggactggctgaccgccaagctggcctacgagggcctgagcaagacctacctgtccaagacactggcccagtacacctccaagacatgcagcaactgtgggtttaccatcaccagcgccgactacgacagggtgctggagaagctgaagaagacagcaacaggctggatgaccacaattaacggcaaggagctgaaggtggagggccagattacctactacaacagatacaagagacagaacgtagtcaaggacctgtccgtcgagctggatagactgagcgaagaatctgtgaacaacgacatctcctcctggacaaagggcagaagcggagaagctctgagcctcctgaagaaaagattctcccatagacccgtgcaggagaagttcgtgtgcctgaactgcggcttcgagacacacgcagccgagcaagccgccctgaacatcgccagatcctggctgttcctgcggagccaggagtacaagaaataccagacaaacaagacaaccggcaacaccgataagagagccttcgtcgagacctggcagtccttttaccggaagaagcttaaggaggtgtggaaacctgccgtgcggtctggcggatctggcggaggctcctaaggagctgcccagcgtgttcgaggacgtggccgtgtacttcaccagggaggagtggggcatgctggacaagaggcagaaggagctgtacagggacgtgatgaggatgaactacgagctgctggccagcctgggccccgccgccgccaagcccgacctgatcagcaagctggagaggagggccgccccctggatcaaggaccccaacggccccaagtggggcgagggccacccccccggcaagggatctggctccggcagcggccccaagaaaaagagaaaagtctaagctgccttctgcggggcttgccttctggccatgcccttcttctctcccttgcacctgtacctcttggtctttgaataaagcctgagtaggaaggctagcaaaaaaaaaaaaaaaaaaaaaaaaaaaaaaaaaaaaaaaaaaaaaaaaaaaaaaaaaaaaaaaaaaaaaaaaaaaaaaaa

SEQ ID NO: 15821 - RNA, 9485 nt, synthetic construct
  source 1..9485: mol_type = other RNA
aggaaataagagagaaaagaagagtaagaagaaatataagagccaccatggcccctaagaagaagcgtaaagtgagccggatggaacgcctcgtctacgaggtgcggcagaagtgcagaaacatcgaggacatctgcatctcctgcggatctctgaacgtgaccctggagcacccactgttcatcggcggcatgtgccagaactgtaaaaactgttttctggagtgtgcctatcaatacgacgatgacggctaccagagctactgcaccatctgttgcggcggaagagaggtgctgatgtgtggaaataacaactgctgccggtgcttctgcgtggaatgcgtggacctgctggtgggccccggcgccgcccaggccgctattaaggaagatccttggaactgctacatgtgcggccacaagggcacatacggcctgctgagacggagagaggactggcctagcagactgcagatgttcttcgccaataaccacgaccaggagttcgacccccctaaggtgtaccctcccgtccccgccgagaagagaaagcccatccgggtcctgagcctgttcgatggcatcgccaccggtctgctggtgctgaaggacctgggcatccaggtggataggtacattgcctccgaggtgtgcgaggactccatcaccgtgggaatggtgcgtcatcagggcaagatcatgtacgtgggcgacgtgcggagcgtgacacagaagcatatccaggagtggggccctttcgacctggtgatcggcggcagcccttgcaatgacctgagcatcgtgaacccagcccggaagggcctgtacgagggaaccggcagactgttcttcgagttttacagactgctgcacgacgcccggcctaaggaaggcgacgaccggcccttcttttggctgttcgagaatgtggtggccatgggagtcagcgacaagcgggatattagccggttcctggagagcaaccccgtgatgatcgatgccaaggaagtgagcgccgcccaccgggccagatacttctggggcaatctgcctggcatgaacagacccctggccagcaccgtgaacgacaagctggagctgcaggagtgcctggagcacggccggatcgccaagttcagcaaggtgagaaccatcaccacccgaagcaacagcatcaaacaaggcaaggaccagcactttcctgtgttcatgaacgagaaggaggacatcctgtggtgtaccgagatggagagagtgttcgggttcccagtccactacacagatgtcagcaacatgtctagactggccagacagagactgctgggaagaagctggtccgtccctgtgatcagacacctgttcgcccctctgaaggagtacttcgcctgcgtgagcagcggcaacagcaacgccaacagccggggccccagcttctctagcggcctggtgccactgtccctgagagggagccacatgggccccatggagatctacaaaaccgtgagcgcctggaagcggcagcctgtgcgcgtgctgagcctgtttcggaatatcgataaagtcctgaaaagcctgggattcctggagagcggctctggctccggcggtggcaccctgaagtacgtggaggatgtgacaaacgtggtcagacgggatgtggagaagtggggccccttcgatctggtgtacggcagcacccaacccctgggcagctcttgtgaccggtgccctggctggtacatgtttcagttccaccggatcctgcagtacgccctgccgagacaggagtcccagcggccattcttttggattttcatggacaacttgctgctgaccgaggatgaccaggaaactaccactcggttcctgcagaccgaagccgtgaccctgcaggacgtgagaggccgggactaccagaacgccatgcgggtgtggtccaacatccctggactgaaaagcaagcacgcacctctgacccctaaagaagaggagtacctgcaggcccaggtgcggagcagaagcaagctggacgcccctaaggtggatctgctggtgaagaattgcctcctgcccctgagagagtacttcaagtatttcagccagaatagtctgcccctgggaggcagcggcggcggcgccctggtgacatttgaggacgtcgccgtgcggttcacccaggaggaatgggctctgctggatccttctcagaaaatcctgtaccgggacgtgatgagagagacataccggaatctgacctccgtgggcatcaactgggaatgttgggaccttgaagcctgcttcagaagcctgggaagaaacctgagagtgcaggtggtgaagagaaagtgcgagctgaccaacagcggcccctgcgccgagggcggcccaagcagcggcgcccctcctcccagcggcggcagcccagccggctccccaacctctaccgaggagggcacctctgagtccgccacccccgagagcggccctggcacctccaccgagcccagcgagggcagcgcacccggcagccctgccggcagccccacctccacagaggagggaaccagcaccgagcccagcgaaggcagcgccccaggcaccagcaccgagcctagtgagcaggagattaaacggatcaacaagatcagaagaagacttgtgaaagacagcaacaccaagaaggccggcaagacaggccccatgaaaaccctgctggttagagtgatgacacccgatctgagagagcggctggaaaacctgagaaagaagcctgaaaatatcccccagcccatcagcaatacatctagagccaacctgaataagctgctgaccgattacaccgaaatgaagaaggcgatcctgcatgtgtactgggaagagttccagaaggaccctgtgggcctgatgagccgggtggcccagcctgccagcaagaagatcgatcagaacaagctgaaacctgagatggacgagaagggcaacctgaccaccgccggctttgcctgctctcagtgtggccagcccctgttcgtgtacaagctggagcaggtgtctgagaagggcaaggcttacaccaactacttcggacggtgcaatgtggccgagcacgaaaagctgatcctgctggcccagctgaagcccgagaaggatagcgacgaagccgtgacatatagcctgggaaagtttgggcagagggccctggatttctacagcattcatgtgaccaaggagtccacccaccccgtgaagcccctggcccagatcgccggaaacagatacgcctccggacctgtgggaaaggccctgagcgacgcatgtatgggcacaatcgcctccttcctgtctaagtaccaggacatcatcatcgaacaccagaaggtggtgaagggcaaccagaagagactggagagcctgcgggagctggccggcaaggaaaacctggaataccctagcgtgaccctgccacctcagcctcacaccaaggagggcgttgatgcctacaacgaagtgatcgcccgggtgcgaatgtgggtgaacctgaacctgtggcagaagctgaagctaagcagagatgatgccaagcctctgctgagactgaagggattcccttcctttcctctggtcgagagacaggccaacgaagtggactggtgggacatggtgtgtaacgtgaagaagctgatcaacgagaaaaaggaggatggcaaggtgttttggcagaatctggctggctacaagagacaggaagccctgagaccatacctgagcagcgaggaagatcggaagaagggaaagaaattcgctcggtaccagctgggcgacctgctgctgcacctggaaaagaagcacggcgaggactggggaaaggtgtacgacgaggcctgggagcggattgacaagaaagtggaaggcctgagcaagcacatcaagctggaagaggaacggagaagcgaggacgcccagagcaaggccgccctgaccgactggctgcgggctaaggccagcttcgtgatcgagggcctgaaggaggccgacaaggacgagttctgcagatgcgagctgaagctgcagaagtggtacggggacctgcggggaaagcccttcgccatcgaagccgagaacagcatcctggacatcagcggcttcagcaagcagtacaactgtgccttcatctggcagaaggacggcgtgaagaagctgaacctgtacctgatcatcaactacttcaagggcggcaagctgcggttcaagaagatcaaacctgaagccttcgaagccaacagattctacaccgtgatcaacaaaaagagcggcgagatcgtgcccatggaggtgaacttcaacttcgacgaccccaacctgatcatcctgcctctggcctttggcaagagacagggcagagaattcatctggaacgacctgctgtccctggaaaccggcagcctgaagctggccaacggaagagtgatcgagaagacactgtacaacagaagaacccggcaggatgagcctgccctgttcgtggccctgaccttcgagcggcgggaggtcctggactcctccaatatcaaaccaatgaacctgatcggcgtggcaagaggcgaaaacatccccgccgtgatcgccctgaccgaccccgagggctgcccactgagccggtttaaggatagcctgggaaacccaacccacatcctgagaatcggcgagagctataaggagaagcagcggaccatccaggccaagaaggaggtggagcagcggagagccggcggctacagccggaagtacgccagcaaagccaagaatctggcagacgatatggtgagaaacaccgctagagatctgctgtactacgccgtgacccaggatgccatgctgatcttcgccaacctgagccggggcttcggccggcagggcaagcggaccttcatggccgagagacagtacacacggatggaggactggctgaccgccaagctggcctacgagggcctgagcaagacctacctgtccaagacactggcccagtacacctccaagacatgcagcaactgtgggtttaccatcaccagcgccgactacgacagggtgctggagaagctgaagaagacagcaacaggctggatgaccacaattaacggcaaggagctgaaggtggagggccagattacctactacaacagatacaagagacagaacgtagtcaaggacctgtccgtcgagctggatagactgagcgaagaatctgtgaacaacgacatctcctcctggacaaagggcagaagcggagaagctctgagcctcctgaagaaaagattctcccatagacccgtgcaggagaagttcgtgtgcctgaactgcggcttcgagacacacgcagccgagcaagccgccctgaacatcgccagatcctggctgttcctgcggagccaggagtacaagaaataccagacaaacaagacaaccggcaacaccgataagagagccttcgtcgagacctggcagtccttttaccggaagaagcttaaggaggtgtggaaacctgccgtgcggtctggcggatctggcggaggctccggcaaggagctgctgagcttcgaggacgtggccatgtacttcaccagggaggagtggggcaggctggactggggccagaaggacctgtacagggacgtgatgctggagaactacaggaacatggtgctgctgggcttccagttccccaagcccgaggtgatctgccagctggagaactgggacgagcagtggatcctggacctgcccagggccggcagcaggaaggccagcggcagcgcctgcggcggcccaagcagcggcgcccctcctcccagcggcggcagcccagccggctccccaacctctaccgaggagggcacctctgagtccgccacccccgagagcggccctggcacctccaccgagcccagcgagggcagcgcacccggcagccctgccggcagccccacctccacagaggagggaaccagcaccgagcccagcgaaggcagcgccccaggcaccagcaccgagcctagtgagcaggagattaaacggatcaacaagatcagaagaagacttgtgaaagacagcaacaccaagaaggccggcaagacaggccccatgaaaaccctgctggttagagtgatgacacccgatctgagagagcggctggaaaacctgagaaagaagcctgaaaatatcccccagcccatcagcaatacatctagagccaacctgaataagctgctgaccgattacaccgaaatgaagaaggcgatcctgcatgtgtactgggaagagttccagaaggaccctgtgggcctgatgagccgggtggcccagcctgccagcaagaagatcgatcagaacaagctgaaacctgagatggacgagaagggcaacctgaccaccgccggctttgcctgctctcagtgtggccagcccctgttcgtgtacaagctggagcaggtgtctgagaagggcaaggcttacaccaactacttcggacggtgcaatgtggccgagcacgaaaagctgatcctgctggcccagctgaagcccgagaaggatagcgacgaagccgtgacatatagcctgggaaagtttgggcagagggccctggatttctacagcattcatgtgaccaaggagtccacccaccccgtgaagcccctggcccagatcgccggaaacagatacgcctccggacctgtgggaaaggccctgagcgacgcatgtatgggcacaatcgcctccttcctgtctaagtaccaggacatcatcatcgaacaccagaaggtggtgaagggcaaccagaagagactggagagcctgcgggagctggccggcaaggaaaacctggaataccctagcgtgaccctgccacctcagcctcacaccaaggagggcgttgatgcctacaacgaagtgatcgcccgggtgcgaatgtgggtgaacctgaacctgtggcagaagctgaagctaagcagagatgatgccaagcctctgctgagactgaagggattcccttcctttcctctggtcgagagacaggccaacgaagtggactggtgggacatggtgtgtaacgtgaagaagctgatcaacgagaaaaaggaggatggcaaggtgttttggcagaatctggctggctacaagagacaggaagccctgagaccatacctgagcagcgaggaagatcggaagaagggaaagaaattcgctcggtaccagctgggcgacctgctgctgcacctggaaaagaagcacggcgaggactggggaaaggtgtacgacgaggcctgggagcggattgacaagaaagtggaaggcctgagcaagcacatcaagctggaagaggaacggagaagcgaggacgcccagagcaaggccgccctgaccgactggctgcgggctaaggccagcttcgtgatcgagggcctgaaggaggccgacaaggacgagttctgcagatgcgagctgaagctgcagaagtggtacggggacctgcggggaaagcccttcgccatcgaagccgagaacagcatcctggacatcagcggcttcagcaagcagtacaactgtgccttcatctggcagaaggacggcgtgaagaagctgaacctgtacctgatcatcaactacttcaagggcggcaagctgcggttcaagaagatcaaacctgaagccttcgaagccaacagattctacaccgtgatcaacaaaaagagcggcgagatcgtgcccatggaggtgaacttcaacttcgacgaccccaacctgatcatcctgcctctggcctttggcaagagacagggcagagaattcatctggaacgacctgctgtccctggaaaccggcagcctgaagctggccaacggaagagtgatcgagaagacactgtacaacagaagaacccggcaggatgagcctgccctgttcgtggccctgaccttcgagcggcgggaggtcctggactcctccaatatcaaaccaatgaacctgatcggcgtggcaagaggcgaaaacatccccgccgtgatcgccctgaccgaccccgagggctgcccactgagccggtttaaggatagcctgggaaacccaacccacatcctgagaatcggcgagagctataaggagaagcagcggaccatccaggccaagaaggaggtggagcagcggagagccggcggctacagccggaagtacgccagcaaagccaagaatctggcagacgatatggtgagaaacaccgctagagatctgctgtactacgccgtgacccaggatgccatgctgatcttcgccaacctgagccggggcttcggccggcagggcaagcggaccttcatggccgagagacagtacacacggatggaggactggctgaccgccaagctggcctacgagggcctgagcaagacctacctgtccaagacactggcccagtacacctccaagacatgcagcaactgtgggtttaccatcaccagcgccgactacgacagggtgctggagaagctgaagaagacagcaacaggctggatgaccacaattaacggcaaggagctgaaggtggagggccagattacctactacaacagatacaagagacagaacgtagtcaaggacctgtccgtcgagctggatagactgagcgaagaatctgtgaacaacgacatctcctcctggacaaagggcagaagcggagaagctctgagcctcctgaagaaaagattctcccatagacccgtgcaggagaagttcgtgtgcctgaactgcggcttcgagacacacgcagccgagcaagccgccctgaacatcgccagatcctggctgttcctgcggagccaggagtacaagaaataccagacaaacaagacaaccggcaacaccgataagagagccttcgtcgagacctggcagtccttttaccggaagaagcttaaggaggtgtggaaacctgccgtgcggtctggcggatctggcggaggctcctggcaaggagctgctgagcttcgaggacgtggccatgtacttcaccagggaggagtggggcaggctggactggggccagaaggacctgtacagggacgtgatgctggagaactacaggaacatggtgctgctgggcttccagttccccaagcccgaggtgatctgccagctggagaactgggacgagcagtggatcctggacctgcccagggccggcagcaggaaggccagcggcagcgcctgcggatctggctccggcagcggccccaagaaaaagagaaaagtctaagctgccttctgcggggcttgccttctggccatgcccttcttctctcccttgcacctgtacctcttggtctttgaataaagcctgagtaggaaggctagcaaaaaaaaaaaaaaaaaaaaaaaaaaaaaaaaaaaaaaaaaaaaaaaaaaaaaaaaaaaaaaaaaaaaaaaaaaaaaaaa

SEQ ID NO: 15822 - RNA, 9485 nt, synthetic construct
  source 1..9485: mol_type = other RNA
aggaaataagagagaaaagaagagtaagaagaaatataagagccaccatggcccctaagaagaagcgtaaagtgagccggatggaacgcctcgtctacgaggtgcggcagaagtgcagaaacatcgaggacatctgcatctcctgcggatctctgaacgtgaccctggagcacccactgttcatcggcggcatgtgccagaactgtaaaaactgttttctggagtgtgcctatcaatacgacgatgacggctaccagagctactgcaccatctgttgcggcggaagagaggtgctgatgtgtggaaataacaactgctgccggtgcttctgcgtggaatgcgtggacctgctggtgggccccggcgccgcccaggccgctattaaggaagatccttggaactgctacatgtgcggccacaagggcacatacggcctgctgagacggagagaggactggcctagcagactgcagatgttcttcgccaataaccacgaccaggagttcgacccccctaaggtgtaccctcccgtccccgccgagaagagaaagcccatccgggtcctgagcctgttcgatggcatcgccaccggtctgctggtgctgaaggacctgggcatccaggtggataggtacattgcctccgaggtgtgcgaggactccatcaccgtgggaatggtgcgtcatcagggcaagatcatgtacgtgggcgacgtgcggagcgtgacacagaagcatatccaggagtggggccctttcgacctggtgatcggcggcagcccttgcaatgacctgagcatcgtgaacccagcccggaagggcctgtacgagggaaccggcagactgttcttcgagttttacagactgctgcacgacgcccggcctaaggaaggcgacgaccggcccttcttttggctgttcgagaatgtggtggccatgggagtcagcgacaagcgggatattagccggttcctggagagcaaccccgtgatgatcgatgccaaggaagtgagcgccgcccaccgggccagatacttctggggcaatctgcctggcatgaacagacccctggccagcaccgtgaacgacaagctggagctgcaggagtgcctggagcacggccggatcgccaagttcagcaaggtgagaaccatcaccacccgaagcaacagcatcaaacaaggcaaggaccagcactttcctgtgttcatgaacgagaaggaggacatcctgtggtgtaccgagatggagagagtgttcgggttcccagtccactacacagatgtcagcaacatgtctagactggccagacagagactgctgggaagaagctggtccgtccctgtgatcagacacctgttcgcccctctgaaggagtacttcgcctgcgtgagcagcggcaacagcaacgccaacagccggggccccagcttctctagcggcctggtgccactgtccctgagagggagccacatgggccccatggagatctacaaaaccgtgagcgcctggaagcggcagcctgtgcgcgtgctgagcctgtttcggaatatcgataaagtcctgaaaagcctgggattcctggagagcggctctggctccggcggtggcaccctgaagtacgtggaggatgtgacaaacgtggtcagacgggatgtggagaagtggggccccttcgatctggtgtacggcagcacccaacccctgggcagctcttgtgaccggtgccctggctggtacatgtttcagttccaccggatcctgcagtacgccctgccgagacaggagtcccagcggccattcttttggattttcatggacaacttgctgctgaccgaggatgaccaggaaactaccactcggttcctgcagaccgaagccgtgaccctgcaggacgtgagaggccgggactaccagaacgccatgcgggtgtggtccaacatccctggactgaaaagcaagcacgcacctctgacccctaaagaagaggagtacctgcaggcccaggtgcggagcagaagcaagctggacgcccctaaggtggatctgctggtgaagaattgcctcctgcccctgagagagtacttcaagtatttcagccagaatagtctgcccctgggaggcagcggcggcggcgccctggtgacatttgaggacgtcgccgtgcggttcacccaggaggaatgggctctgctggatccttctcagaaaatcctgtaccgggacgtgatgagagagacataccggaatctgacctccgtgggcatcaactgggaatgttgggaccttgaagcctgcttcagaagcctgggaagaaacctgagagtgcaggtggtgaagagaaagtgcgagctgaccaacagcggcccctgcgccgagggcggcccaagcagcggcgcccctcctcccagcggcggcagcccagccggctccccaacctctaccgaggagggcacctctgagtccgccacccccgagagcggccctggcacctccaccgagcccagcgagggcagcgcacccggcagccctgccggcagccccacctccacagaggagggaaccagcaccgagcccagcgaaggcagcgccccaggcaccagcaccgagcctagtgagcaggagattaaacggatcaacaagatcagaagaagacttgtgaaagacagcaacaccaagaaggccggcaagacaggccccatgaaaaccctgctggttagagtgatgacacccgatctgagagagcggctggaaaacctgagaaagaagcctgaaaatatcccccagcccatcagcaatacatctagagccaacctgaataagctgctgaccgattacaccgaaatgaagaaggcgatcctgcatgtgtactgggaagagttccagaaggaccctgtgggcctgatgagccgggtggcccagcctgccagcaagaagatcgatcagaacaagctgaaacctgagatggacgagaagggcaacctgaccaccgccggctttgcctgctctcagtgtggccagcccctgttcgtgtacaagctggagcaggtgtctgagaagggcaaggcttacaccaactacttcggacggtgcaatgtggccgagcacgaaaagctgatcctgctggcccagctgaagcccgagaaggatagcgacgaagccgtgacatatagcctgggaaagtttgggcagagggccctggatttctacagcattcatgtgaccaaggagtccacccaccccgtgaagcccctggcccagatcgccggaaacagatacgcctccggacctgtgggaaaggccctgagcgacgcatgtatgggcacaatcgcctccttcctgtctaagtaccaggacatcatcatcgaacaccagaaggtggtgaagggcaaccagaagagactggagagcctgcgggagctggccggcaaggaaaacctggaataccctagcgtgaccctgccacctcagcctcacaccaaggagggcgttgatgcctacaacgaagtgatcgcccgggtgcgaatgtgggtgaacctgaacctgtggcagaagctgaagctaagcagagatgatgccaagcctctgctgagactgaagggattcccttcctttcctctggtcgagagacaggccaacgaagtggactggtgggacatggtgtgtaacgtgaagaagctgatcaacgagaaaaaggaggatggcaaggtgttttggcagaatctggctggctacaagagacaggaagccctgagaccatacctgagcagcgaggaagatcggaagaagggaaagaaattcgctcggtaccagctgggcgacctgctgctgcacctggaaaagaagcacggcgaggactggggaaaggtgtacgacgaggcctgggagcggattgacaagaaagtggaaggcctgagcaagcacatcaagctggaagaggaacggagaagcgaggacgcccagagcaaggccgccctgaccgactggctgcgggctaaggccagcttcgtgatcgagggcctgaaggaggccgacaaggacgagttctgcagatgcgagctgaagctgcagaagtggtacggggacctgcggggaaagcccttcgccatcgaagccgagaacagcatcctggacatcagcggcttcagcaagcagtacaactgtgccttcatctggcagaaggacggcgtgaagaagctgaacctgtacctgatcatcaactacttcaagggcggcaagctgcggttcaagaagatcaaacctgaagccttcgaagccaacagattctacaccgtgatcaacaaaaagagcggcgagatcgtgcccatggaggtgaacttcaacttcgacgaccccaacctgatcatcctgcctctggcctttggcaagagacagggcagagaattcatctggaacgacctgctgtccctggaaaccggcagcctgaagctggccaacggaagagtgatcgagaagacactgtacaacagaagaacccggcaggatgagcctgccctgttcgtggccctgaccttcgagcggcgggaggtcctggactcctccaatatcaaaccaatgaacctgatcggcgtggcaagaggcgaaaacatccccgccgtgatcgccctgaccgaccccgagggctgcccactgagccggtttaaggatagcctgggaaacccaacccacatcctgagaatcggcgagagctataaggagaagcagcggaccatccaggccaagaaggaggtggagcagcggagagccggcggctacagccggaagtacgccagcaaagccaagaatctggcagacgatatggtgagaaacaccgctagagatctgctgtactacgccgtgacccaggatgccatgctgatcttcgccaacctgagccggggcttcggccggcagggcaagcggaccttcatggccgagagacagtacacacggatggaggactggctgaccgccaagctggcctacgagggcctgagcaagacctacctgtccaagacactggcccagtacacctccaagacatgcagcaactgtgggtttaccatcaccagcgccgactacgacagggtgctggagaagctgaagaagacagcaacaggctggatgaccacaattaacggcaaggagctgaaggtggagggccagattacctactacaacagatacaagagacagaacgtagtcaaggacctgtccgtcgagctggatagactgagcgaagaatctgtgaacaacgacatctcctcctggacaaagggcagaagcggagaagctctgagcctcctgaagaaaagattctcccatagacccgtgcaggagaagttcgtgtgcctgaactgcggcttcgagacacacgcagccgagcaagccgccctgaacatcgccagatcctggctgttcctgcggagccaggagtacaagaaataccagacaaacaagacaaccggcaacaccgataagagagccttcgtcgagacctggcagtccttttaccggaagaagcttaaggaggtgtggaaacctgccgtgcggtctggcggatctggcggaggctccgtgtggggccccctgagcttcatggacgtgttcgtggacttcacctgggaggagtggcagctgctggaccccgcccagaagtgcctgtacaggagcgtgatgctggagaactacagcaacctggtgagcctgggctaccagcacaccaagcccgacatcatcttcaagctggagcagggcgaggagctgtgcatggtgcaggcccccatccccaaccagtgctgccccaacaaggtgtggaagggcggcccaagcagcggcgcccctcctcccagcggcggcagcccagccggctccccaacctctaccgaggagggcacctctgagtccgccacccccgagagcggccctggcacctccaccgagcccagcgagggcagcgcacccggcagccctgccggcagccccacctccacagaggagggaaccagcaccgagcccagcgaaggcagcgccccaggcaccagcaccgagcctagtgagcaggagattaaacggatcaacaagatcagaagaagacttgtgaaagacagcaacaccaagaaggccggcaagacaggccccatgaaaaccctgctggttagagtgatgacacccgatctgagagagcggctggaaaacctgagaaagaagcctgaaaatatcccccagcccatcagcaatacatctagagccaacctgaataagctgctgaccgattacaccgaaatgaagaaggcgatcctgcatgtgtactgggaagagttccagaaggaccctgtgggcctgatgagccgggtggcccagcctgccagcaagaagatcgatcagaacaagctgaaacctgagatggacgagaagggcaacctgaccaccgccggctttgcctgctctcagtgtggccagcccctgttcgtgtacaagctggagcaggtgtctgagaagggcaaggcttacaccaactacttcggacggtgcaatgtggccgagcacgaaaagctgatcctgctggcccagctgaagcccgagaaggatagcgacgaagccgtgacatatagcctgggaaagtttgggcagagggccctggatttctacagcattcatgtgaccaaggagtccacccaccccgtgaagcccctggcccagatcgccggaaacagatacgcctccggacctgtgggaaaggccctgagcgacgcatgtatgggcacaatcgcctccttcctgtctaagtaccaggacatcatcatcgaacaccagaaggtggtgaagggcaaccagaagagactggagagcctgcgggagctggccggcaaggaaaacctggaataccctagcgtgaccctgccacctcagcctcacaccaaggagggcgttgatgcctacaacgaagtgatcgcccgggtgcgaatgtgggtgaacctgaacctgtggcagaagctgaagctaagcagagatgatgccaagcctctgctgagactgaagggattcccttcctttcctctggtcgagagacaggccaacgaagtggactggtgggacatggtgtgtaacgtgaagaagctgatcaacgagaaaaaggaggatggcaaggtgttttggcagaatctggctggctacaagagacaggaagccctgagaccatacctgagcagcgaggaagatcggaagaagggaaagaaattcgctcggtaccagctgggcgacctgctgctgcacctggaaaagaagcacggcgaggactggggaaaggtgtacgacgaggcctgggagcggattgacaagaaagtggaaggcctgagcaagcacatcaagctggaagaggaacggagaagcgaggacgcccagagcaaggccgccctgaccgactggctgcgggctaaggccagcttcgtgatcgagggcctgaaggaggccgacaaggacgagttctgcagatgcgagctgaagctgcagaagtggtacggggacctgcggggaaagcccttcgccatcgaagccgagaacagcatcctggacatcagcggcttcagcaagcagtacaactgtgccttcatctggcagaaggacggcgtgaagaagctgaacctgtacctgatcatcaactacttcaagggcggcaagctgcggttcaagaagatcaaacctgaagccttcgaagccaacagattctacaccgtgatcaacaaaaagagcggcgagatcgtgcccatggaggtgaacttcaacttcgacgaccccaacctgatcatcctgcctctggcctttggcaagagacagggcagagaattcatctggaacgacctgctgtccctggaaaccggcagcctgaagctggccaacggaagagtgatcgagaagacactgtacaacagaagaacccggcaggatgagcctgccctgttcgtggccctgaccttcgagcggcgggaggtcctggactcctccaatatcaaaccaatgaacctgatcggcgtggcaagaggcgaaaacatccccgccgtgatcgccctgaccgaccccgagggctgcccactgagccggtttaaggatagcctgggaaacccaacccacatcctgagaatcggcgagagctataaggagaagcagcggaccatccaggccaagaaggaggtggagcagcggagagccggcggctacagccggaagtacgccagcaaagccaagaatctggcagacgatatggtgagaaacaccgctagagatctgctgtactacgccgtgacccaggatgccatgctgatcttcgccaacctgagccggggcttcggccggcagggcaagcggaccttcatggccgagagacagtacacacggatggaggactggctgaccgccaagctggcctacgagggcctgagcaagacctacctgtccaagacactggcccagtacacctccaagacatgcagcaactgtgggtttaccatcaccagcgccgactacgacagggtgctggagaagctgaagaagacagcaacaggctggatgaccacaattaacggcaaggagctgaaggtggagggccagattacctactacaacagatacaagagacagaacgtagtcaaggacctgtccgtcgagctggatagactgagcgaagaatctgtgaacaacgacatctcctcctggacaaagggcagaagcggagaagctctgagcctcctgaagaaaagattctcccatagacccgtgcaggagaagttcgtgtgcctgaactgcggcttcgagacacacgcagccgagcaagccgccctgaacatcgccagatcctggctgttcctgcggagccaggagtacaagaaataccagacaaacaagacaaccggcaacaccgataagagagccttcgtcgagacctggcagtccttttaccggaagaagcttaaggaggtgtggaaacctgccgtgcggtctggcggatctggcggaggctcctgtgtggggccccctgagcttcatggacgtgttcgtggacttcacctgggaggagtggcagctgctggaccccgcccagaagtgcctgtacaggagcgtgatgctggagaactacagcaacctggtgagcctgggctaccagcacaccaagcccgacatcatcttcaagctggagcagggcgaggagctgtgcatggtgcaggcccccatccccaaccagtgctgccccaacaaggtgtggaagggatctggctccggcagcggccccaagaaaaagagaaaagtctaagctgccttctgcggggcttgccttctggccatgcccttcttctctcccttgcacctgtacctcttggtctttgaataaagcctgagtaggaaggctagcaaaaaaaaaaaaaaaaaaaaaaaaaaaaaaaaaaaaaaaaaaaaaaaaaaaaaaaaaaaaaaaaaaaaaaaaaaaaaaaa

SEQ ID NO: 15823 - RNA, 9485 nt, synthetic construct
  source 1..9485: mol_type = other RNA
aggaaataagagagaaaagaagagtaagaagaaatataagagccaccatggcccctaagaagaagcgtaaagtgagccggatggaacgcctcgtctacgaggtgcggcagaagtgcagaaacatcgaggacatctgcatctcctgcggatctctgaacgtgaccctggagcacccactgttcatcggcggcatgtgccagaactgtaaaaactgttttctggagtgtgcctatcaatacgacgatgacggctaccagagctactgcaccatctgttgcggcggaagagaggtgctgatgtgtggaaataacaactgctgccggtgcttctgcgtggaatgcgtggacctgctggtgggccccggcgccgcccaggccgctattaaggaagatccttggaactgctacatgtgcggccacaagggcacatacggcctgctgagacggagagaggactggcctagcagactgcagatgttcttcgccaataaccacgaccaggagttcgacccccctaaggtgtaccctcccgtccccgccgagaagagaaagcccatccgggtcctgagcctgttcgatggcatcgccaccggtctgctggtgctgaaggacctgggcatccaggtggataggtacattgcctccgaggtgtgcgaggactccatcaccgtgggaatggtgcgtcatcagggcaagatcatgtacgtgggcgacgtgcggagcgtgacacagaagcatatccaggagtggggccctttcgacctggtgatcggcggcagcccttgcaatgacctgagcatcgtgaacccagcccggaagggcctgtacgagggaaccggcagactgttcttcgagttttacagactgctgcacgacgcccggcctaaggaaggcgacgaccggcccttcttttggctgttcgagaatgtggtggccatgggagtcagcgacaagcgggatattagccggttcctggagagcaaccccgtgatgatcgatgccaaggaagtgagcgccgcccaccgggccagatacttctggggcaatctgcctggcatgaacagacccctggccagcaccgtgaacgacaagctggagctgcaggagtgcctggagcacggccggatcgccaagttcagcaaggtgagaaccatcaccacccgaagcaacagcatcaaacaaggcaaggaccagcactttcctgtgttcatgaacgagaaggaggacatcctgtggtgtaccgagatggagagagtgttcgggttcccagtccactacacagatgtcagcaacatgtctagactggccagacagagactgctgggaagaagctggtccgtccctgtgatcagacacctgttcgcccctctgaaggagtacttcgcctgcgtgagcagcggcaacagcaacgccaacagccggggccccagcttctctagcggcctggtgccactgtccctgagagggagccacatgggccccatggagatctacaaaaccgtgagcgcctggaagcggcagcctgtgcgcgtgctgagcctgtttcggaatatcgataaagtcctgaaaagcctgggattcctggagagcggctctggctccggcggtggcaccctgaagtacgtggaggatgtgacaaacgtggtcagacgggatgtggagaagtggggccccttcgatctggtgtacggcagcacccaacccctgggcagctcttgtgaccggtgccctggctggtacatgtttcagttccaccggatcctgcagtacgccctgccgagacaggagtcccagcggccattcttttggattttcatggacaacttgctgctgaccgaggatgaccaggaaactaccactcggttcctgcagaccgaagccgtgaccctgcaggacgtgagaggccgggactaccagaacgccatgcgggtgtggtccaacatccctggactgaaaagcaagcacgcacctctgacccctaaagaagaggagtacctgcaggcccaggtgcggagcagaagcaagctggacgcccctaaggtggatctgctggtgaagaattgcctcctgcccctgagagagtacttcaagtatttcagccagaatagtctgcccctgggaggcagcggcggcggcgccctggtgacatttgaggacgtcgccgtgcggttcacccaggaggaatgggctctgctggatccttctcagaaaatcctgtaccgggacgtgatgagagagacataccggaatctgacctccgtgggcatcaactgggaatgttgggaccttgaagcctgcttcagaagcctgggaagaaacctgagagtgcaggtggtgaagagaaagtgcgagctgaccaacagcggcccctgcgccgagggcggcccaagcagcggcgcccctcctcccagcggcggcagcccagccggctccccaacctctaccgaggagggcacctctgagtccgccacccccgagagcggccctggcacctccaccgagcccagcgagggcagcgcacccggcagccctgccggcagccccacctccacagaggagggaaccagcaccgagcccagcgaaggcagcgccccaggcaccagcaccgagcctagtgagcaggagattaaacggatcaacaagatcagaagaagacttgtgaaagacagcaacaccaagaaggccggcaagacaggccccatgaaaaccctgctggttagagtgatgacacccgatctgagagagcggctggaaaacctgagaaagaagcctgaaaatatcccccagcccatcagcaatacatctagagccaacctgaataagctgctgaccgattacaccgaaatgaagaaggcgatcctgcatgtgtactgggaagagttccagaaggaccctgtgggcctgatgagccgggtggcccagcctgccagcaagaagatcgatcagaacaagctgaaacctgagatggacgagaagggcaacctgaccaccgccggctttgcctgctctcagtgtggccagcccctgttcgtgtacaagctggagcaggtgtctgagaagggcaaggcttacaccaactacttcggacggtgcaatgtggccgagcacgaaaagctgatcctgctggcccagctgaagcccgagaaggatagcgacgaagccgtgacatatagcctgggaaagtttgggcagagggccctggatttctacagcattcatgtgaccaaggagtccacccaccccgtgaagcccctggcccagatcgccggaaacagatacgcctccggacctgtgggaaaggccctgagcgacgcatgtatgggcacaatcgcctccttcctgtctaagtaccaggacatcatcatcgaacaccagaaggtggtgaagggcaaccagaagagactggagagcctgcgggagctggccggcaaggaaaacctggaataccctagcgtgaccctgccacctcagcctcacaccaaggagggcgttgatgcctacaacgaagtgatcgcccgggtgcgaatgtgggtgaacctgaacctgtggcagaagctgaagctaagcagagatgatgccaagcctctgctgagactgaagggattcccttcctttcctctggtcgagagacaggccaacgaagtggactggtgggacatggtgtgtaacgtgaagaagctgatcaacgagaaaaaggaggatggcaaggtgttttggcagaatctggctggctacaagagacaggaagccctgagaccatacctgagcagcgaggaagatcggaagaagggaaagaaattcgctcggtaccagctgggcgacctgctgctgcacctggaaaagaagcacggcgaggactggggaaaggtgtacgacgaggcctgggagcggattgacaagaaagtggaaggcctgagcaagcacatcaagctggaagaggaacggagaagcgaggacgcccagagcaaggccgccctgaccgactggctgcgggctaaggccagcttcgtgatcgagggcctgaaggaggccgacaaggacgagttctgcagatgcgagctgaagctgcagaagtggtacggggacctgcggggaaagcccttcgccatcgaagccgagaacagcatcctggacatcagcggcttcagcaagcagtacaactgtgccttcatctggcagaaggacggcgtgaagaagctgaacctgtacctgatcatcaactacttcaagggcggcaagctgcggttcaagaagatcaaacctgaagccttcgaagccaacagattctacaccgtgatcaacaaaaagagcggcgagatcgtgcccatggaggtgaacttcaacttcgacgaccccaacctgatcatcctgcctctggcctttggcaagagacagggcagagaattcatctggaacgacctgctgtccctggaaaccggcagcctgaagctggccaacggaagagtgatcgagaagacactgtacaacagaagaacccggcaggatgagcctgccctgttcgtggccctgaccttcgagcggcgggaggtcctggactcctccaatatcaaaccaatgaacctgatcggcgtggcaagaggcgaaaacatccccgccgtgatcgccctgaccgaccccgagggctgcccactgagccggtttaaggatagcctgggaaacccaacccacatcctgagaatcggcgagagctataaggagaagcagcggaccatccaggccaagaaggaggtggagcagcggagagccggcggctacagccggaagtacgccagcaaagccaagaatctggcagacgatatggtgagaaacaccgctagagatctgctgtactacgccgtgacccaggatgccatgctgatcttcgccaacctgagccggggcttcggccggcagggcaagcggaccttcatggccgagagacagtacacacggatggaggactggctgaccgccaagctggcctacgagggcctgagcaagacctacctgtccaagacactggcccagtacacctccaagacatgcagcaactgtgggtttaccatcaccagcgccgactacgacagggtgctggagaagctgaagaagacagcaacaggctggatgaccacaattaacggcaaggagctgaaggtggagggccagattacctactacaacagatacaagagacagaacgtagtcaaggacctgtccgtcgagctggatagactgagcgaagaatctgtgaacaacgacatctcctcctggacaaagggcagaagcggagaagctctgagcctcctgaagaaaagattctcccatagacccgtgcaggagaagttcgtgtgcctgaactgcggcttcgagacacacgcagccgagcaagccgccctgaacatcgccagatcctggctgttcctgcggagccaggagtacaagaaataccagacaaacaagacaaccggcaacaccgataagagagccttcgtcgagacctggcagtccttttaccggaagaagcttaaggaggtgtggaaacctgccgtgcggtctggcggatctggcggaggctccagctgcgagggcagcgtgagcttcagggacgtggccatcaacttcagcagggaggagtggcagcacctggaccccagccagaggaacctgtacagggacgtgatgctggagacctacagccacctgctgagcgtgggctaccaggtgcccgaggccgaggtggtgatgctggagcagggcaaggagccctgggccctgcagggcgagaggcccaggcagagctgccccggcgagaagctgtggggcggcccaagcagcggcgcccctcctcccagcggcggcagcccagccggctccccaacctctaccgaggagggcacctctgagtccgccacccccgagagcggccctggcacctccaccgagcccagcgagggcagcgcacccggcagccctgccggcagccccacctccacagaggagggaaccagcaccgagcccagcgaaggcagcgccccaggcaccagcaccgagcctagtgagcaggagattaaacggatcaacaagatcagaagaagacttgtgaaagacagcaacaccaagaaggccggcaagacaggccccatgaaaaccctgctggttagagtgatgacacccgatctgagagagcggctggaaaacctgagaaagaagcctgaaaatatcccccagcccatcagcaatacatctagagccaacctgaataagctgctgaccgattacaccgaaatgaagaaggcgatcctgcatgtgtactgggaagagttccagaaggaccctgtgggcctgatgagccgggtggcccagcctgccagcaagaagatcgatcagaacaagctgaaacctgagatggacgagaagggcaacctgaccaccgccggctttgcctgctctcagtgtggccagcccctgttcgtgtacaagctggagcaggtgtctgagaagggcaaggcttacaccaactacttcggacggtgcaatgtggccgagcacgaaaagctgatcctgctggcccagctgaagcccgagaaggatagcgacgaagccgtgacatatagcctgggaaagtttgggcagagggccctggatttctacagcattcatgtgaccaaggagtccacccaccccgtgaagcccctggcccagatcgccggaaacagatacgcctccggacctgtgggaaaggccctgagcgacgcatgtatgggcacaatcgcctccttcctgtctaagtaccaggacatcatcatcgaacaccagaaggtggtgaagggcaaccagaagagactggagagcctgcgggagctggccggcaaggaaaacctggaataccctagcgtgaccctgccacctcagcctcacaccaaggagggcgttgatgcctacaacgaagtgatcgcccgggtgcgaatgtgggtgaacctgaacctgtggcagaagctgaagctaagcagagatgatgccaagcctctgctgagactgaagggattcccttcctttcctctggtcgagagacaggccaacgaagtggactggtgggacatggtgtgtaacgtgaagaagctgatcaacgagaaaaaggaggatggcaaggtgttttggcagaatctggctggctacaagagacaggaagccctgagaccatacctgagcagcgaggaagatcggaagaagggaaagaaattcgctcggtaccagctgggcgacctgctgctgcacctggaaaagaagcacggcgaggactggggaaaggtgtacgacgaggcctgggagcggattgacaagaaagtggaaggcctgagcaagcacatcaagctggaagaggaacggagaagcgaggacgcccagagcaaggccgccctgaccgactggctgcgggctaaggccagcttcgtgatcgagggcctgaaggaggccgacaaggacgagttctgcagatgcgagctgaagctgcagaagtggtacggggacctgcggggaaagcccttcgccatcgaagccgagaacagcatcctggacatcagcggcttcagcaagcagtacaactgtgccttcatctggcagaaggacggcgtgaagaagctgaacctgtacctgatcatcaactacttcaagggcggcaagctgcggttcaagaagatcaaacctgaagccttcgaagccaacagattctacaccgtgatcaacaaaaagagcggcgagatcgtgcccatggaggtgaacttcaacttcgacgaccccaacctgatcatcctgcctctggcctttggcaagagacagggcagagaattcatctggaacgacctgctgtccctggaaaccggcagcctgaagctggccaacggaagagtgatcgagaagacactgtacaacagaagaacccggcaggatgagcctgccctgttcgtggccctgaccttcgagcggcgggaggtcctggactcctccaatatcaaaccaatgaacctgatcggcgtggcaagaggcgaaaacatccccgccgtgatcgccctgaccgaccccgagggctgcccactgagccggtttaaggatagcctgggaaacccaacccacatcctgagaatcggcgagagctataaggagaagcagcggaccatccaggccaagaaggaggtggagcagcggagagccggcggctacagccggaagtacgccagcaaagccaagaatctggcagacgatatggtgagaaacaccgctagagatctgctgtactacgccgtgacccaggatgccatgctgatcttcgccaacctgagccggggcttcggccggcagggcaagcggaccttcatggccgagagacagtacacacggatggaggactggctgaccgccaagctggcctacgagggcctgagcaagacctacctgtccaagacactggcccagtacacctccaagacatgcagcaactgtgggtttaccatcaccagcgccgactacgacagggtgctggagaagctgaagaagacagcaacaggctggatgaccacaattaacggcaaggagctgaaggtggagggccagattacctactacaacagatacaagagacagaacgtagtcaaggacctgtccgtcgagctggatagactgagcgaagaatctgtgaacaacgacatctcctcctggacaaagggcagaagcggagaagctctgagcctcctgaagaaaagattctcccatagacccgtgcaggagaagttcgtgtgcctgaactgcggcttcgagacacacgcagccgagcaagccgccctgaacatcgccagatcctggctgttcctgcggagccaggagtacaagaaataccagacaaacaagacaaccggcaacaccgataagagagccttcgtcgagacctggcagtccttttaccggaagaagcttaaggaggtgtggaaacctgccgtgcggtctggcggatctggcggaggctcctagctgcgagggcagcgtgagcttcagggacgtggccatcaacttcagcagggaggagtggcagcacctggaccccagccagaggaacctgtacagggacgtgatgctggagacctacagccacctgctgagcgtgggctaccaggtgcccgaggccgaggtggtgatgctggagcagggcaaggagccctgggccctgcagggcgagaggcccaggcagagctgccccggcgagaagctgtggggatctggctccggcagcggccccaagaaaaagagaaaagtctaagctgccttctgcggggcttgccttctggccatgcccttcttctctcccttgcacctgtacctcttggtctttgaataaagcctgagtaggaaggctagcaaaaaaaaaaaaaaaaaaaaaaaaaaaaaaaaaaaaaaaaaaaaaaaaaaaaaaaaaaaaaaaaaaaaaaaaaaaaaaaa

SEQ ID NO: 15824 - RNA, 9485 nt, synthetic construct
  source 1..9485: mol_type = other RNA
aggaaataagagagaaaagaagagtaagaagaaatataagagccaccatggcccctaagaagaagcgtaaagtgagccggatggaacgcctcgtctacgaggtgcggcagaagtgcagaaacatcgaggacatctgcatctcctgcggatctctgaacgtgaccctggagcacccactgttcatcggcggcatgtgccagaactgtaaaaactgttttctggagtgtgcctatcaatacgacgatgacggctaccagagctactgcaccatctgttgcggcggaagagaggtgctgatgtgtggaaataacaactgctgccggtgcttctgcgtggaatgcgtggacctgctggtgggccccggcgccgcccaggccgctattaaggaagatccttggaactgctacatgtgcggccacaagggcacatacggcctgctgagacggagagaggactggcctagcagactgcagatgttcttcgccaataaccacgaccaggagttcgacccccctaaggtgtaccctcccgtccccgccgagaagagaaagcccatccgggtcctgagcctgttcgatggcatcgccaccggtctgctggtgctgaaggacctgggcatccaggtggataggtacattgcctccgaggtgtgcgaggactccatcaccgtgggaatggtgcgtcatcagggcaagatcatgtacgtgggcgacgtgcggagcgtgacacagaagcatatccaggagtggggccctttcgacctggtgatcggcggcagcccttgcaatgacctgagcatcgtgaacccagcccggaagggcctgtacgagggaaccggcagactgttcttcgagttttacagactgctgcacgacgcccggcctaaggaaggcgacgaccggcccttcttttggctgttcgagaatgtggtggccatgggagtcagcgacaagcgggatattagccggttcctggagagcaaccccgtgatgatcgatgccaaggaagtgagcgccgcccaccgggccagatacttctggggcaatctgcctggcatgaacagacccctggccagcaccgtgaacgacaagctggagctgcaggagtgcctggagcacggccggatcgccaagttcagcaaggtgagaaccatcaccacccgaagcaacagcatcaaacaaggcaaggaccagcactttcctgtgttcatgaacgagaaggaggacatcctgtggtgtaccgagatggagagagtgttcgggttcccagtccactacacagatgtcagcaacatgtctagactggccagacagagactgctgggaagaagctggtccgtccctgtgatcagacacctgttcgcccctctgaaggagtacttcgcctgcgtgagcagcggcaacagcaacgccaacagccggggccccagcttctctagcggcctggtgccactgtccctgagagggagccacatgggccccatggagatctacaaaaccgtgagcgcctggaagcggcagcctgtgcgcgtgctgagcctgtttcggaatatcgataaagtcctgaaaagcctgggattcctggagagcggctctggctccggcggtggcaccctgaagtacgtggaggatgtgacaaacgtggtcagacgggatgtggagaagtggggccccttcgatctggtgtacggcagcacccaacccctgggcagctcttgtgaccggtgccctggctggtacatgtttcagttccaccggatcctgcagtacgccctgccgagacaggagtcccagcggccattcttttggattttcatggacaacttgctgctgaccgaggatgaccaggaaactaccactcggttcctgcagaccgaagccgtgaccctgcaggacgtgagaggccgggactaccagaacgccatgcgggtgtggtccaacatccctggactgaaaagcaagcacgcacctctgacccctaaagaagaggagtacctgcaggcccaggtgcggagcagaagcaagctggacgcccctaaggtggatctgctggtgaagaattgcctcctgcccctgagagagtacttcaagtatttcagccagaatagtctgcccctgggaggcagcggcggcggcgccctggtgacatttgaggacgtcgccgtgcggttcacccaggaggaatgggctctgctggatccttctcagaaaatcctgtaccgggacgtgatgagagagacataccggaatctgacctccgtgggcatcaactgggaatgttgggaccttgaagcctgcttcagaagcctgggaagaaacctgagagtgcaggtggtgaagagaaagtgcgagctgaccaacagcggcccctgcgccgagggcggcccaagcagcggcgcccctcctcccagcggcggcagcccagccggctccccaacctctaccgaggagggcacctctgagtccgccacccccgagagcggccctggcacctccaccgagcccagcgagggcagcgcacccggcagccctgccggcagccccacctccacagaggagggaaccagcaccgagcccagcgaaggcagcgccccaggcaccagcaccgagcctagtgagcaggagattaaacggatcaacaagatcagaagaagacttgtgaaagacagcaacaccaagaaggccggcaagacaggccccatgaaaaccctgctggttagagtgatgacacccgatctgagagagcggctggaaaacctgagaaagaagcctgaaaatatcccccagcccatcagcaatacatctagagccaacctgaataagctgctgaccgattacaccgaaatgaagaaggcgatcctgcatgtgtactgggaagagttccagaaggaccctgtgggcctgatgagccgggtggcccagcctgccagcaagaagatcgatcagaacaagctgaaacctgagatggacgagaagggcaacctgaccaccgccggctttgcctgctctcagtgtggccagcccctgttcgtgtacaagctggagcaggtgtctgagaagggcaaggcttacaccaactacttcggacggtgcaatgtggccgagcacgaaaagctgatcctgctggcccagctgaagcccgagaaggatagcgacgaagccgtgacatatagcctgggaaagtttgggcagagggccctggatttctacagcattcatgtgaccaaggagtccacccaccccgtgaagcccctggcccagatcgccggaaacagatacgcctccggacctgtgggaaaggccctgagcgacgcatgtatgggcacaatcgcctccttcctgtctaagtaccaggacatcatcatcgaacaccagaaggtggtgaagggcaaccagaagagactggagagcctgcgggagctggccggcaaggaaaacctggaataccctagcgtgaccctgccacctcagcctcacaccaaggagggcgttgatgcctacaacgaagtgatcgcccgggtgcgaatgtgggtgaacctgaacctgtggcagaagctgaagctaagcagagatgatgccaagcctctgctgagactgaagggattcccttcctttcctctggtcgagagacaggccaacgaagtggactggtgggacatggtgtgtaacgtgaagaagctgatcaacgagaaaaaggaggatggcaaggtgttttggcagaatctggctggctacaagagacaggaagccctgagaccatacctgagcagcgaggaagatcggaagaagggaaagaaattcgctcggtaccagctgggcgacctgctgctgcacctggaaaagaagcacggcgaggactggggaaaggtgtacgacgaggcctgggagcggattgacaagaaagtggaaggcctgagcaagcacatcaagctggaagaggaacggagaagcgaggacgcccagagcaaggccgccctgaccgactggctgcgggctaaggccagcttcgtgatcgagggcctgaaggaggccgacaaggacgagttctgcagatgcgagctgaagctgcagaagtggtacggggacctgcggggaaagcccttcgccatcgaagccgagaacagcatcctggacatcagcggcttcagcaagcagtacaactgtgccttcatctggcagaaggacggcgtgaagaagctgaacctgtacctgatcatcaactacttcaagggcggcaagctgcggttcaagaagatcaaacctgaagccttcgaagccaacagattctacaccgtgatcaacaaaaagagcggcgagatcgtgcccatggaggtgaacttcaacttcgacgaccccaacctgatcatcctgcctctggcctttggcaagagacagggcagagaattcatctggaacgacctgctgtccctggaaaccggcagcctgaagctggccaacggaagagtgatcgagaagacactgtacaacagaagaacccggcaggatgagcctgccctgttcgtggccctgaccttcgagcggcgggaggtcctggactcctccaatatcaaaccaatgaacctgatcggcgtggcaagaggcgaaaacatccccgccgtgatcgccctgaccgaccccgagggctgcccactgagccggtttaaggatagcctgggaaacccaacccacatcctgagaatcggcgagagctataaggagaagcagcggaccatccaggccaagaaggaggtggagcagcggagagccggcggctacagccggaagtacgccagcaaagccaagaatctggcagacgatatggtgagaaacaccgctagagatctgctgtactacgccgtgacccaggatgccatgctgatcttcgccaacctgagccggggcttcggccggcagggcaagcggaccttcatggccgagagacagtacacacggatggaggactggctgaccgccaagctggcctacgagggcctgagcaagacctacctgtccaagacactggcccagtacacctccaagacatgcagcaactgtgggtttaccatcaccagcgccgactacgacagggtgctggagaagctgaagaagacagcaacaggctggatgaccacaattaacggcaaggagctgaaggtggagggccagattacctactacaacagatacaagagacagaacgtagtcaaggacctgtccgtcgagctggatagactgagcgaagaatctgtgaacaacgacatctcctcctggacaaagggcagaagcggagaagctctgagcctcctgaagaaaagattctcccatagacccgtgcaggagaagttcgtgtgcctgaactgcggcttcgagacacacgcagccgagcaagccgccctgaacatcgccagatcctggctgttcctgcggagccaggagtacaagaaataccagacaaacaagacaaccggcaacaccgataagagagccttcgtcgagacctggcagtccttttaccggaagaagcttaaggaggtgtggaaacctgccgtgcggtctggcggatctggcggaggctcctacaccctggagagcctgaccctggaggacgtggccgtggacttcacccaggaggagtggaggctgctggcccccgcccagaaggacctgtactgggacgtgatgctggagaacttcaggaacctggtgagcgtgggctacgtggccagcatgcccgccgccctgagcaggctggagaggggcggccagtggatgaccgaggacgagaccaggcactggatctgccccgagatcaagaaggacggcggcccaagcagcggcgcccctcctcccagcggcggcagcccagccggctccccaacctctaccgaggagggcacctctgagtccgccacccccgagagcggccctggcacctccaccgagcccagcgagggcagcgcacccggcagccctgccggcagccccacctccacagaggagggaaccagcaccgagcccagcgaaggcagcgccccaggcaccagcaccgagcctagtgagcaggagattaaacggatcaacaagatcagaagaagacttgtgaaagacagcaacaccaagaaggccggcaagacaggccccatgaaaaccctgctggttagagtgatgacacccgatctgagagagcggctggaaaacctgagaaagaagcctgaaaatatcccccagcccatcagcaatacatctagagccaacctgaataagctgctgaccgattacaccgaaatgaagaaggcgatcctgcatgtgtactgggaagagttccagaaggaccctgtgggcctgatgagccgggtggcccagcctgccagcaagaagatcgatcagaacaagctgaaacctgagatggacgagaagggcaacctgaccaccgccggctttgcctgctctcagtgtggccagcccctgttcgtgtacaagctggagcaggtgtctgagaagggcaaggcttacaccaactacttcggacggtgcaatgtggccgagcacgaaaagctgatcctgctggcccagctgaagcccgagaaggatagcgacgaagccgtgacatatagcctgggaaagtttgggcagagggccctggatttctacagcattcatgtgaccaaggagtccacccaccccgtgaagcccctggcccagatcgccggaaacagatacgcctccggacctgtgggaaaggccctgagcgacgcatgtatgggcacaatcgcctccttcctgtctaagtaccaggacatcatcatcgaacaccagaaggtggtgaagggcaaccagaagagactggagagcctgcgggagctggccggcaaggaaaacctggaataccctagcgtgaccctgccacctcagcctcacaccaaggagggcgttgatgcctacaacgaagtgatcgcccgggtgcgaatgtgggtgaacctgaacctgtggcagaagctgaagctaagcagagatgatgccaagcctctgctgagactgaagggattcccttcctttcctctggtcgagagacaggccaacgaagtggactggtgggacatggtgtgtaacgtgaagaagctgatcaacgagaaaaaggaggatggcaaggtgttttggcagaatctggctggctacaagagacaggaagccctgagaccatacctgagcagcgaggaagatcggaagaagggaaagaaattcgctcggtaccagctgggcgacctgctgctgcacctggaaaagaagcacggcgaggactggggaaaggtgtacgacgaggcctgggagcggattgacaagaaagtggaaggcctgagcaagcacatcaagctggaagaggaacggagaagcgaggacgcccagagcaaggccgccctgaccgactggctgcgggctaaggccagcttcgtgatcgagggcctgaaggaggccgacaaggacgagttctgcagatgcgagctgaagctgcagaagtggtacggggacctgcggggaaagcccttcgccatcgaagccgagaacagcatcctggacatcagcggcttcagcaagcagtacaactgtgccttcatctggcagaaggacggcgtgaagaagctgaacctgtacctgatcatcaactacttcaagggcggcaagctgcggttcaagaagatcaaacctgaagccttcgaagccaacagattctacaccgtgatcaacaaaaagagcggcgagatcgtgcccatggaggtgaacttcaacttcgacgaccccaacctgatcatcctgcctctggcctttggcaagagacagggcagagaattcatctggaacgacctgctgtccctggaaaccggcagcctgaagctggccaacggaagagtgatcgagaagacactgtacaacagaagaacccggcaggatgagcctgccctgttcgtggccctgaccttcgagcggcgggaggtcctggactcctccaatatcaaaccaatgaacctgatcggcgtggcaagaggcgaaaacatccccgccgtgatcgccctgaccgaccccgagggctgcccactgagccggtttaaggatagcctgggaaacccaacccacatcctgagaatcggcgagagctataaggagaagcagcggaccatccaggccaagaaggaggtggagcagcggagagccggcggctacagccggaagtacgccagcaaagccaagaatctggcagacgatatggtgagaaacaccgctagagatctgctgtactacgccgtgacccaggatgccatgctgatcttcgccaacctgagccggggcttcggccggcagggcaagcggaccttcatggccgagagacagtacacacggatggaggactggctgaccgccaagctggcctacgagggcctgagcaagacctacctgtccaagacactggcccagtacacctccaagacatgcagcaactgtgggtttaccatcaccagcgccgactacgacagggtgctggagaagctgaagaagacagcaacaggctggatgaccacaattaacggcaaggagctgaaggtggagggccagattacctactacaacagatacaagagacagaacgtagtcaaggacctgtccgtcgagctggatagactgagcgaagaatctgtgaacaacgacatctcctcctggacaaagggcagaagcggagaagctctgagcctcctgaagaaaagattctcccatagacccgtgcaggagaagttcgtgtgcctgaactgcggcttcgagacacacgcagccgagcaagccgccctgaacatcgccagatcctggctgttcctgcggagccaggagtacaagaaataccagacaaacaagacaaccggcaacaccgataagagagccttcgtcgagacctggcagtccttttaccggaagaagcttaaggaggtgtggaaacctgccgtgcggtctggcggatctggcggaggctccttacaccctggagagcctgaccctggaggacgtggccgtggacttcacccaggaggagtggaggctgctggcccccgcccagaaggacctgtactgggacgtgatgctggagaacttcaggaacctggtgagcgtgggctacgtggccagcatgcccgccgccctgagcaggctggagaggggcggccagtggatgaccgaggacgagaccaggcactggatctgccccgagatcaagaaggacggatctggctccggcagcggccccaagaaaaagagaaaagtctaagctgccttctgcggggcttgccttctggccatgcccttcttctctcccttgcacctgtacctcttggtctttgaataaagcctgagtaggaaggctagcaaaaaaaaaaaaaaaaaaaaaaaaaaaaaaaaaaaaaaaaaaaaaaaaaaaaaaaaaaaaaaaaaaaaaaaaaaaaaaaa

SEQ ID NO: 15825 - RNA, 9485 nt, synthetic construct
  source 1..9485: mol_type = other RNA
aggaaataagagagaaaagaagagtaagaagaaatataagagccaccatggcccctaagaagaagcgtaaagtgagccggatggaacgcctcgtctacgaggtgcggcagaagtgcagaaacatcgaggacatctgcatctcctgcggatctctgaacgtgaccctggagcacccactgttcatcggcggcatgtgccagaactgtaaaaactgttttctggagtgtgcctatcaatacgacgatgacggctaccagagctactgcaccatctgttgcggcggaagagaggtgctgatgtgtggaaataacaactgctgccggtgcttctgcgtggaatgcgtggacctgctggtgggccccggcgccgcccaggccgctattaaggaagatccttggaactgctacatgtgcggccacaagggcacatacggcctgctgagacggagagaggactggcctagcagactgcagatgttcttcgccaataaccacgaccaggagttcgacccccctaaggtgtaccctcccgtccccgccgagaagagaaagcccatccgggtcctgagcctgttcgatggcatcgccaccggtctgctggtgctgaaggacctgggcatccaggtggataggtacattgcctccgaggtgtgcgaggactccatcaccgtgggaatggtgcgtcatcagggcaagatcatgtacgtgggcgacgtgcggagcgtgacacagaagcatatccaggagtggggccctttcgacctggtgatcggcggcagcccttgcaatgacctgagcatcgtgaacccagcccggaagggcctgtacgagggaaccggcagactgttcttcgagttttacagactgctgcacgacgcccggcctaaggaaggcgacgaccggcccttcttttggctgttcgagaatgtggtggccatgggagtcagcgacaagcgggatattagccggttcctggagagcaaccccgtgatgatcgatgccaaggaagtgagcgccgcccaccgggccagatacttctggggcaatctgcctggcatgaacagacccctggccagcaccgtgaacgacaagctggagctgcaggagtgcctggagcacggccggatcgccaagttcagcaaggtgagaaccatcaccacccgaagcaacagcatcaaacaaggcaaggaccagcactttcctgtgttcatgaacgagaaggaggacatcctgtggtgtaccgagatggagagagtgttcgggttcccagtccactacacagatgtcagcaacatgtctagactggccagacagagactgctgggaagaagctggtccgtccctgtgatcagacacctgttcgcccctctgaaggagtacttcgcctgcgtgagcagcggcaacagcaacgccaacagccggggccccagcttctctagcggcctggtgccactgtccctgagagggagccacatgggccccatggagatctacaaaaccgtgagcgcctggaagcggcagcctgtgcgcgtgctgagcctgtttcggaatatcgataaagtcctgaaaagcctgggattcctggagagcggctctggctccggcggtggcaccctgaagtacgtggaggatgtgacaaacgtggtcagacgggatgtggagaagtggggccccttcgatctggtgtacggcagcacccaacccctgggcagctcttgtgaccggtgccctggctggtacatgtttcagttccaccggatcctgcagtacgccctgccgagacaggagtcccagcggccattcttttggattttcatggacaacttgctgctgaccgaggatgaccaggaaactaccactcggttcctgcagaccgaagccgtgaccctgcaggacgtgagaggccgggactaccagaacgccatgcgggtgtggtccaacatccctggactgaaaagcaagcacgcacctctgacccctaaagaagaggagtacctgcaggcccaggtgcggagcagaagcaagctggacgcccctaaggtggatctgctggtgaagaattgcctcctgcccctgagagagtacttcaagtatttcagccagaatagtctgcccctgggaggcagcggcggcggcgccctggtgacatttgaggacgtcgccgtgcggttcacccaggaggaatgggctctgctggatccttctcagaaaatcctgtaccgggacgtgatgagagagacataccggaatctgacctccgtgggcatcaactgggaatgttgggaccttgaagcctgcttcagaagcctgggaagaaacctgagagtgcaggtggtgaagagaaagtgcgagctgaccaacagcggcccctgcgccgagggcggcccaagcagcggcgcccctcctcccagcggcggcagcccagccggctccccaacctctaccgaggagggcacctctgagtccgccacccccgagagcggccctggcacctccaccgagcccagcgagggcagcgcacccggcagccctgccggcagccccacctccacagaggagggaaccagcaccgagcccagcgaaggcagcgccccaggcaccagcaccgagcctagtgagcaggagattaaacggatcaacaagatcagaagaagacttgtgaaagacagcaacaccaagaaggccggcaagacaggccccatgaaaaccctgctggttagagtgatgacacccgatctgagagagcggctggaaaacctgagaaagaagcctgaaaatatcccccagcccatcagcaatacatctagagccaacctgaataagctgctgaccgattacaccgaaatgaagaaggcgatcctgcatgtgtactgggaagagttccagaaggaccctgtgggcctgatgagccgggtggcccagcctgccagcaagaagatcgatcagaacaagctgaaacctgagatggacgagaagggcaacctgaccaccgccggctttgcctgctctcagtgtggccagcccctgttcgtgtacaagctggagcaggtgtctgagaagggcaaggcttacaccaactacttcggacggtgcaatgtggccgagcacgaaaagctgatcctgctggcccagctgaagcccgagaaggatagcgacgaagccgtgacatatagcctgggaaagtttgggcagagggccctggatttctacagcattcatgtgaccaaggagtccacccaccccgtgaagcccctggcccagatcgccggaaacagatacgcctccggacctgtgggaaaggccctgagcgacgcatgtatgggcacaatcgcctccttcctgtctaagtaccaggacatcatcatcgaacaccagaaggtggtgaagggcaaccagaagagactggagagcctgcgggagctggccggcaaggaaaacctggaataccctagcgtgaccctgccacctcagcctcacaccaaggagggcgttgatgcctacaacgaagtgatcgcccgggtgcgaatgtgggtgaacctgaacctgtggcagaagctgaagctaagcagagatgatgccaagcctctgctgagactgaagggattcccttcctttcctctggtcgagagacaggccaacgaagtggactggtgggacatggtgtgtaacgtgaagaagctgatcaacgagaaaaaggaggatggcaaggtgttttggcagaatctggctggctacaagagacaggaagccctgagaccatacctgagcagcgaggaagatcggaagaagggaaagaaattcgctcggtaccagctgggcgacctgctgctgcacctggaaaagaagcacggcgaggactggggaaaggtgtacgacgaggcctgggagcggattgacaagaaagtggaaggcctgagcaagcacatcaagctggaagaggaacggagaagcgaggacgcccagagcaaggccgccctgaccgactggctgcgggctaaggccagcttcgtgatcgagggcctgaaggaggccgacaaggacgagttctgcagatgcgagctgaagctgcagaagtggtacggggacctgcggggaaagcccttcgccatcgaagccgagaacagcatcctggacatcagcggcttcagcaagcagtacaactgtgccttcatctggcagaaggacggcgtgaagaagctgaacctgtacctgatcatcaactacttcaagggcggcaagctgcggttcaagaagatcaaacctgaagccttcgaagccaacagattctacaccgtgatcaacaaaaagagcggcgagatcgtgcccatggaggtgaacttcaacttcgacgaccccaacctgatcatcctgcctctggcctttggcaagagacagggcagagaattcatctggaacgacctgctgtccctggaaaccggcagcctgaagctggccaacggaagagtgatcgagaagacactgtacaacagaagaacccggcaggatgagcctgccctgttcgtggccctgaccttcgagcggcgggaggtcctggactcctccaatatcaaaccaatgaacctgatcggcgtggcaagaggcgaaaacatccccgccgtgatcgccctgaccgaccccgagggctgcccactgagccggtttaaggatagcctgggaaacccaacccacatcctgagaatcggcgagagctataaggagaagcagcggaccatccaggccaagaaggaggtggagcagcggagagccggcggctacagccggaagtacgccagcaaagccaagaatctggcagacgatatggtgagaaacaccgctagagatctgctgtactacgccgtgacccaggatgccatgctgatcttcgccaacctgagccggggcttcggccggcagggcaagcggaccttcatggccgagagacagtacacacggatggaggactggctgaccgccaagctggcctacgagggcctgagcaagacctacctgtccaagacactggcccagtacacctccaagacatgcagcaactgtgggtttaccatcaccagcgccgactacgacagggtgctggagaagctgaagaagacagcaacaggctggatgaccacaattaacggcaaggagctgaaggtggagggccagattacctactacaacagatacaagagacagaacgtagtcaaggacctgtccgtcgagctggatagactgagcgaagaatctgtgaacaacgacatctcctcctggacaaagggcagaagcggagaagctctgagcctcctgaagaaaagattctcccatagacccgtgcaggagaagttcgtgtgcctgaactgcggcttcgagacacacgcagccgagcaagccgccctgaacatcgccagatcctggctgttcctgcggagccaggagtacaagaaataccagacaaacaagacaaccggcaacaccgataagagagccttcgtcgagacctggcagtccttttaccggaagaagcttaaggaggtgtggaaacctgccgtgcggtctggcggatctggcggaggctccctgcaggtgagcgtgagcttcgaggacgtgaccgtggacttcagcagggaggagtggcagcacctggaccccgcccagaggaggctgtacagggacgtgaccctggagaactacagccacctgtgcagcgtgggctaccaggtgcccaagcccgaggtgatcttcaagctggagcagggcgagggcccctggatgctggagggcgaggccccccaccagagctgcagcgacgacgacatcggcggcggcccaagcagcggcgcccctcctcccagcggcggcagcccagccggctccccaacctctaccgaggagggcacctctgagtccgccacccccgagagcggccctggcacctccaccgagcccagcgagggcagcgcacccggcagccctgccggcagccccacctccacagaggagggaaccagcaccgagcccagcgaaggcagcgccccaggcaccagcaccgagcctagtgagcaggagattaaacggatcaacaagatcagaagaagacttgtgaaagacagcaacaccaagaaggccggcaagacaggccccatgaaaaccctgctggttagagtgatgacacccgatctgagagagcggctggaaaacctgagaaagaagcctgaaaatatcccccagcccatcagcaatacatctagagccaacctgaataagctgctgaccgattacaccgaaatgaagaaggcgatcctgcatgtgtactgggaagagttccagaaggaccctgtgggcctgatgagccgggtggcccagcctgccagcaagaagatcgatcagaacaagctgaaacctgagatggacgagaagggcaacctgaccaccgccggctttgcctgctctcagtgtggccagcccctgttcgtgtacaagctggagcaggtgtctgagaagggcaaggcttacaccaactacttcggacggtgcaatgtggccgagcacgaaaagctgatcctgctggcccagctgaagcccgagaaggatagcgacgaagccgtgacatatagcctgggaaagtttgggcagagggccctggatttctacagcattcatgtgaccaaggagtccacccaccccgtgaagcccctggcccagatcgccggaaacagatacgcctccggacctgtgggaaaggccctgagcgacgcatgtatgggcacaatcgcctccttcctgtctaagtaccaggacatcatcatcgaacaccagaaggtggtgaagggcaaccagaagagactggagagcctgcgggagctggccggcaaggaaaacctggaataccctagcgtgaccctgccacctcagcctcacaccaaggagggcgttgatgcctacaacgaagtgatcgcccgggtgcgaatgtgggtgaacctgaacctgtggcagaagctgaagctaagcagagatgatgccaagcctctgctgagactgaagggattcccttcctttcctctggtcgagagacaggccaacgaagtggactggtgggacatggtgtgtaacgtgaagaagctgatcaacgagaaaaaggaggatggcaaggtgttttggcagaatctggctggctacaagagacaggaagccctgagaccatacctgagcagcgaggaagatcggaagaagggaaagaaattcgctcggtaccagctgggcgacctgctgctgcacctggaaaagaagcacggcgaggactggggaaaggtgtacgacgaggcctgggagcggattgacaagaaagtggaaggcctgagcaagcacatcaagctggaagaggaacggagaagcgaggacgcccagagcaaggccgccctgaccgactggctgcgggctaaggccagcttcgtgatcgagggcctgaaggaggccgacaaggacgagttctgcagatgcgagctgaagctgcagaagtggtacggggacctgcggggaaagcccttcgccatcgaagccgagaacagcatcctggacatcagcggcttcagcaagcagtacaactgtgccttcatctggcagaaggacggcgtgaagaagctgaacctgtacctgatcatcaactacttcaagggcggcaagctgcggttcaagaagatcaaacctgaagccttcgaagccaacagattctacaccgtgatcaacaaaaagagcggcgagatcgtgcccatggaggtgaacttcaacttcgacgaccccaacctgatcatcctgcctctggcctttggcaagagacagggcagagaattcatctggaacgacctgctgtccctggaaaccggcagcctgaagctggccaacggaagagtgatcgagaagacactgtacaacagaagaacccggcaggatgagcctgccctgttcgtggccctgaccttcgagcggcgggaggtcctggactcctccaatatcaaaccaatgaacctgatcggcgtggcaagaggcgaaaacatccccgccgtgatcgccctgaccgaccccgagggctgcccactgagccggtttaaggatagcctgggaaacccaacccacatcctgagaatcggcgagagctataaggagaagcagcggaccatccaggccaagaaggaggtggagcagcggagagccggcggctacagccggaagtacgccagcaaagccaagaatctggcagacgatatggtgagaaacaccgctagagatctgctgtactacgccgtgacccaggatgccatgctgatcttcgccaacctgagccggggcttcggccggcagggcaagcggaccttcatggccgagagacagtacacacggatggaggactggctgaccgccaagctggcctacgagggcctgagcaagacctacctgtccaagacactggcccagtacacctccaagacatgcagcaactgtgggtttaccatcaccagcgccgactacgacagggtgctggagaagctgaagaagacagcaacaggctggatgaccacaattaacggcaaggagctgaaggtggagggccagattacctactacaacagatacaagagacagaacgtagtcaaggacctgtccgtcgagctggatagactgagcgaagaatctgtgaacaacgacatctcctcctggacaaagggcagaagcggagaagctctgagcctcctgaagaaaagattctcccatagacccgtgcaggagaagttcgtgtgcctgaactgcggcttcgagacacacgcagccgagcaagccgccctgaacatcgccagatcctggctgttcctgcggagccaggagtacaagaaataccagacaaacaagacaaccggcaacaccgataagagagccttcgtcgagacctggcagtccttttaccggaagaagcttaaggaggtgtggaaacctgccgtgcggtctggcggatctggcggaggctcctctgcaggtgagcgtgagcttcgaggacgtgaccgtggacttcagcagggaggagtggcagcacctggaccccgcccagaggaggctgtacagggacgtgaccctggagaactacagccacctgtgcagcgtgggctaccaggtgcccaagcccgaggtgatcttcaagctggagcagggcgagggcccctggatgctggagggcgaggccccccaccagagctgcagcgacgacgacatcggcggatctggctccggcagcggccccaagaaaaagagaaaagtctaagctgccttctgcggggcttgccttctggccatgcccttcttctctcccttgcacctgtacctcttggtctttgaataaagcctgagtaggaaggctagcaaaaaaaaaaaaaaaaaaaaaaaaaaaaaaaaaaaaaaaaaaaaaaaaaaaaaaaaaaaaaaaaaaaaaaaaaaaaaaaa

SEQ ID NO: 15826 - RNA, 9485 nt, synthetic construct
  source 1..9485: mol_type = other RNA
aggaaataagagagaaaagaagagtaagaagaaatataagagccaccatggcccctaagaagaagcgtaaagtgagccggatggaacgcctcgtctacgaggtgcggcagaagtgcagaaacatcgaggacatctgcatctcctgcggatctctgaacgtgaccctggagcacccactgttcatcggcggcatgtgccagaactgtaaaaactgttttctggagtgtgcctatcaatacgacgatgacggctaccagagctactgcaccatctgttgcggcggaagagaggtgctgatgtgtggaaataacaactgctgccggtgcttctgcgtggaatgcgtggacctgctggtgggccccggcgccgcccaggccgctattaaggaagatccttggaactgctacatgtgcggccacaagggcacatacggcctgctgagacggagagaggactggcctagcagactgcagatgttcttcgccaataaccacgaccaggagttcgacccccctaaggtgtaccctcccgtccccgccgagaagagaaagcccatccgggtcctgagcctgttcgatggcatcgccaccggtctgctggtgctgaaggacctgggcatccaggtggataggtacattgcctccgaggtgtgcgaggactccatcaccgtgggaatggtgcgtcatcagggcaagatcatgtacgtgggcgacgtgcggagcgtgacacagaagcatatccaggagtggggccctttcgacctggtgatcggcggcagcccttgcaatgacctgagcatcgtgaacccagcccggaagggcctgtacgagggaaccggcagactgttcttcgagttttacagactgctgcacgacgcccggcctaaggaaggcgacgaccggcccttcttttggctgttcgagaatgtggtggccatgggagtcagcgacaagcgggatattagccggttcctggagagcaaccccgtgatgatcgatgccaaggaagtgagcgccgcccaccgggccagatacttctggggcaatctgcctggcatgaacagacccctggccagcaccgtgaacgacaagctggagctgcaggagtgcctggagcacggccggatcgccaagttcagcaaggtgagaaccatcaccacccgaagcaacagcatcaaacaaggcaaggaccagcactttcctgtgttcatgaacgagaaggaggacatcctgtggtgtaccgagatggagagagtgttcgggttcccagtccactacacagatgtcagcaacatgtctagactggccagacagagactgctgggaagaagctggtccgtccctgtgatcagacacctgttcgcccctctgaaggagtacttcgcctgcgtgagcagcggcaacagcaacgccaacagccggggccccagcttctctagcggcctggtgccactgtccctgagagggagccacatgggccccatggagatctacaaaaccgtgagcgcctggaagcggcagcctgtgcgcgtgctgagcctgtttcggaatatcgataaagtcctgaaaagcctgggattcctggagagcggctctggctccggcggtggcaccctgaagtacgtggaggatgtgacaaacgtggtcagacgggatgtggagaagtggggccccttcgatctggtgtacggcagcacccaacccctgggcagctcttgtgaccggtgccctggctggtacatgtttcagttccaccggatcctgcagtacgccctgccgagacaggagtcccagcggccattcttttggattttcatggacaacttgctgctgaccgaggatgaccaggaaactaccactcggttcctgcagaccgaagccgtgaccctgcaggacgtgagaggccgggactaccagaacgccatgcgggtgtggtccaacatccctggactgaaaagcaagcacgcacctctgacccctaaagaagaggagtacctgcaggcccaggtgcggagcagaagcaagctggacgcccctaaggtggatctgctggtgaagaattgcctcctgcccctgagagagtacttcaagtatttcagccagaatagtctgcccctgggaggcagcggcggcggcgccctggtgacatttgaggacgtcgccgtgcggttcacccaggaggaatgggctctgctggatccttctcagaaaatcctgtaccgggacgtgatgagagagacataccggaatctgacctccgtgggcatcaactgggaatgttgggaccttgaagcctgcttcagaagcctgggaagaaacctgagagtgcaggtggtgaagagaaagtgcgagctgaccaacagcggcccctgcgccgagggcggcccaagcagcggcgcccctcctcccagcggcggcagcccagccggctccccaacctctaccgaggagggcacctctgagtccgccacccccgagagcggccctggcacctccaccgagcccagcgagggcagcgcacccggcagccctgccggcagccccacctccacagaggagggaaccagcaccgagcccagcgaaggcagcgccccaggcaccagcaccgagcctagtgagcaggagattaaacggatcaacaagatcagaagaagacttgtgaaagacagcaacaccaagaaggccggcaagacaggccccatgaaaaccctgctggttagagtgatgacacccgatctgagagagcggctggaaaacctgagaaagaagcctgaaaatatcccccagcccatcagcaatacatctagagccaacctgaataagctgctgaccgattacaccgaaatgaagaaggcgatcctgcatgtgtactgggaagagttccagaaggaccctgtgggcctgatgagccgggtggcccagcctgccagcaagaagatcgatcagaacaagctgaaacctgagatggacgagaagggcaacctgaccaccgccggctttgcctgctctcagtgtggccagcccctgttcgtgtacaagctggagcaggtgtctgagaagggcaaggcttacaccaactacttcggacggtgcaatgtggccgagcacgaaaagctgatcctgctggcccagctgaagcccgagaaggatagcgacgaagccgtgacatatagcctgggaaagtttgggcagagggccctggatttctacagcattcatgtgaccaaggagtccacccaccccgtgaagcccctggcccagatcgccggaaacagatacgcctccggacctgtgggaaaggccctgagcgacgcatgtatgggcacaatcgcctccttcctgtctaagtaccaggacatcatcatcgaacaccagaaggtggtgaagggcaaccagaagagactggagagcctgcgggagctggccggcaaggaaaacctggaataccctagcgtgaccctgccacctcagcctcacaccaaggagggcgttgatgcctacaacgaagtgatcgcccgggtgcgaatgtgggtgaacctgaacctgtggcagaagctgaagctaagcagagatgatgccaagcctctgctgagactgaagggattcccttcctttcctctggtcgagagacaggccaacgaagtggactggtgggacatggtgtgtaacgtgaagaagctgatcaacgagaaaaaggaggatggcaaggtgttttggcagaatctggctggctacaagagacaggaagccctgagaccatacctgagcagcgaggaagatcggaagaagggaaagaaattcgctcggtaccagctgggcgacctgctgctgcacctggaaaagaagcacggcgaggactggggaaaggtgtacgacgaggcctgggagcggattgacaagaaagtggaaggcctgagcaagcacatcaagctggaagaggaacggagaagcgaggacgcccagagcaaggccgccctgaccgactggctgcgggctaaggccagcttcgtgatcgagggcctgaaggaggccgacaaggacgagttctgcagatgcgagctgaagctgcagaagtggtacggggacctgcggggaaagcccttcgccatcgaagccgagaacagcatcctggacatcagcggcttcagcaagcagtacaactgtgccttcatctggcagaaggacggcgtgaagaagctgaacctgtacctgatcatcaactacttcaagggcggcaagctgcggttcaagaagatcaaacctgaagccttcgaagccaacagattctacaccgtgatcaacaaaaagagcggcgagatcgtgcccatggaggtgaacttcaacttcgacgaccccaacctgatcatcctgcctctggcctttggcaagagacagggcagagaattcatctggaacgacctgctgtccctggaaaccggcagcctgaagctggccaacggaagagtgatcgagaagacactgtacaacagaagaacccggcaggatgagcctgccctgttcgtggccctgaccttcgagcggcgggaggtcctggactcctccaatatcaaaccaatgaacctgatcggcgtggcaagaggcgaaaacatccccgccgtgatcgccctgaccgaccccgagggctgcccactgagccggtttaaggatagcctgggaaacccaacccacatcctgagaatcggcgagagctataaggagaagcagcggaccatccaggccaagaaggaggtggagcagcggagagccggcggctacagccggaagtacgccagcaaagccaagaatctggcagacgatatggtgagaaacaccgctagagatctgctgtactacgccgtgacccaggatgccatgctgatcttcgccaacctgagccggggcttcggccggcagggcaagcggaccttcatggccgagagacagtacacacggatggaggactggctgaccgccaagctggcctacgagggcctgagcaagacctacctgtccaagacactggcccagtacacctccaagacatgcagcaactgtgggtttaccatcaccagcgccgactacgacagggtgctggagaagctgaagaagacagcaacaggctggatgaccacaattaacggcaaggagctgaaggtggagggccagattacctactacaacagatacaagagacagaacgtagtcaaggacctgtccgtcgagctggatagactgagcgaagaatctgtgaacaacgacatctcctcctggacaaagggcagaagcggagaagctctgagcctcctgaagaaaagattctcccatagacccgtgcaggagaagttcgtgtgcctgaactgcggcttcgagacacacgcagccgagcaagccgccctgaacatcgccagatcctggctgttcctgcggagccaggagtacaagaaataccagacaaacaagacaaccggcaacaccgataagagagccttcgtcgagacctggcagtccttttaccggaagaagcttaaggaggtgtggaaacctgccgtgcggtctggcggatctggcggaggctccggcagcctgaccttcagggacgtggccatcgagttcagcctggaggagtggcagtgcctggacaccgcccagcagaacctgtacaggaacgtgatgctggagaactacaggaacctggtgttcctgggcatcgccgcccccaagcccgacctgatcatcttcctggagcagggcaaggagccctggaacgtgaagaggcacgagatggtggaggagccccccgtgatctgcagccacttcgccggcggcccaagcagcggcgcccctcctcccagcggcggcagcccagccggctccccaacctctaccgaggagggcacctctgagtccgccacccccgagagcggccctggcacctccaccgagcccagcgagggcagcgcacccggcagccctgccggcagccccacctccacagaggagggaaccagcaccgagcccagcgaaggcagcgccccaggcaccagcaccgagcctagtgagcaggagattaaacggatcaacaagatcagaagaagacttgtgaaagacagcaacaccaagaaggccggcaagacaggccccatgaaaaccctgctggttagagtgatgacacccgatctgagagagcggctggaaaacctgagaaagaagcctgaaaatatcccccagcccatcagcaatacatctagagccaacctgaataagctgctgaccgattacaccgaaatgaagaaggcgatcctgcatgtgtactgggaagagttccagaaggaccctgtgggcctgatgagccgggtggcccagcctgccagcaagaagatcgatcagaacaagctgaaacctgagatggacgagaagggcaacctgaccaccgccggctttgcctgctctcagtgtggccagcccctgttcgtgtacaagctggagcaggtgtctgagaagggcaaggcttacaccaactacttcggacggtgcaatgtggccgagcacgaaaagctgatcctgctggcccagctgaagcccgagaaggatagcgacgaagccgtgacatatagcctgggaaagtttgggcagagggccctggatttctacagcattcatgtgaccaaggagtccacccaccccgtgaagcccctggcccagatcgccggaaacagatacgcctccggacctgtgggaaaggccctgagcgacgcatgtatgggcacaatcgcctccttcctgtctaagtaccaggacatcatcatcgaacaccagaaggtggtgaagggcaaccagaagagactggagagcctgcgggagctggccggcaaggaaaacctggaataccctagcgtgaccctgccacctcagcctcacaccaaggagggcgttgatgcctacaacgaagtgatcgcccgggtgcgaatgtgggtgaacctgaacctgtggcagaagctgaagctaagcagagatgatgccaagcctctgctgagactgaagggattcccttcctttcctctggtcgagagacaggccaacgaagtggactggtgggacatggtgtgtaacgtgaagaagctgatcaacgagaaaaaggaggatggcaaggtgttttggcagaatctggctggctacaagagacaggaagccctgagaccatacctgagcagcgaggaagatcggaagaagggaaagaaattcgctcggtaccagctgggcgacctgctgctgcacctggaaaagaagcacggcgaggactggggaaaggtgtacgacgaggcctgggagcggattgacaagaaagtggaaggcctgagcaagcacatcaagctggaagaggaacggagaagcgaggacgcccagagcaaggccgccctgaccgactggctgcgggctaaggccagcttcgtgatcgagggcctgaaggaggccgacaaggacgagttctgcagatgcgagctgaagctgcagaagtggtacggggacctgcggggaaagcccttcgccatcgaagccgagaacagcatcctggacatcagcggcttcagcaagcagtacaactgtgccttcatctggcagaaggacggcgtgaagaagctgaacctgtacctgatcatcaactacttcaagggcggcaagctgcggttcaagaagatcaaacctgaagccttcgaagccaacagattctacaccgtgatcaacaaaaagagcggcgagatcgtgcccatggaggtgaacttcaacttcgacgaccccaacctgatcatcctgcctctggcctttggcaagagacagggcagagaattcatctggaacgacctgctgtccctggaaaccggcagcctgaagctggccaacggaagagtgatcgagaagacactgtacaacagaagaacccggcaggatgagcctgccctgttcgtggccctgaccttcgagcggcgggaggtcctggactcctccaatatcaaaccaatgaacctgatcggcgtggcaagaggcgaaaacatccccgccgtgatcgccctgaccgaccccgagggctgcccactgagccggtttaaggatagcctgggaaacccaacccacatcctgagaatcggcgagagctataaggagaagcagcggaccatccaggccaagaaggaggtggagcagcggagagccggcggctacagccggaagtacgccagcaaagccaagaatctggcagacgatatggtgagaaacaccgctagagatctgctgtactacgccgtgacccaggatgccatgctgatcttcgccaacctgagccggggcttcggccggcagggcaagcggaccttcatggccgagagacagtacacacggatggaggactggctgaccgccaagctggcctacgagggcctgagcaagacctacctgtccaagacactggcccagtacacctccaagacatgcagcaactgtgggtttaccatcaccagcgccgactacgacagggtgctggagaagctgaagaagacagcaacaggctggatgaccacaattaacggcaaggagctgaaggtggagggccagattacctactacaacagatacaagagacagaacgtagtcaaggacctgtccgtcgagctggatagactgagcgaagaatctgtgaacaacgacatctcctcctggacaaagggcagaagcggagaagctctgagcctcctgaagaaaagattctcccatagacccgtgcaggagaagttcgtgtgcctgaactgcggcttcgagacacacgcagccgagcaagccgccctgaacatcgccagatcctggctgttcctgcggagccaggagtacaagaaataccagacaaacaagacaaccggcaacaccgataagagagccttcgtcgagacctggcagtccttttaccggaagaagcttaaggaggtgtggaaacctgccgtgcggtctggcggatctggcggaggctcctggcagcctgaccttcagggacgtggccatcgagttcagcctggaggagtggcagtgcctggacaccgcccagcagaacctgtacaggaacgtgatgctggagaactacaggaacctggtgttcctgggcatcgccgcccccaagcccgacctgatcatcttcctggagcagggcaaggagccctggaacgtgaagaggcacgagatggtggaggagccccccgtgatctgcagccacttcgccggatctggctccggcagcggccccaagaaaaagagaaaagtctaagctgccttctgcggggcttgccttctggccatgcccttcttctctcccttgcacctgtacctcttggtctttgaataaagcctgagtaggaaggctagcaaaaaaaaaaaaaaaaaaaaaaaaaaaaaaaaaaaaaaaaaaaaaaaaaaaaaaaaaaaaaaaaaaaaaaaaaaaaaaaa

SEQ ID NO: 15827 - RNA, 9485 nt, synthetic construct
  source 1..9485: mol_type = other RNA
aggaaataagagagaaaagaagagtaagaagaaatataagagccaccatggcccctaagaagaagcgtaaagtgagccggatggaacgcctcgtctacgaggtgcggcagaagtgcagaaacatcgaggacatctgcatctcctgcggatctctgaacgtgaccctggagcacccactgttcatcggcggcatgtgccagaactgtaaaaactgttttctggagtgtgcctatcaatacgacgatgacggctaccagagctactgcaccatctgttgcggcggaagagaggtgctgatgtgtggaaataacaactgctgccggtgcttctgcgtggaatgcgtggacctgctggtgggccccggcgccgcccaggccgctattaaggaagatccttggaactgctacatgtgcggccacaagggcacatacggcctgctgagacggagagaggactggcctagcagactgcagatgttcttcgccaataaccacgaccaggagttcgacccccctaaggtgtaccctcccgtccccgccgagaagagaaagcccatccgggtcctgagcctgttcgatggcatcgccaccggtctgctggtgctgaaggacctgggcatccaggtggataggtacattgcctccgaggtgtgcgaggactccatcaccgtgggaatggtgcgtcatcagggcaagatcatgtacgtgggcgacgtgcggagcgtgacacagaagcatatccaggagtggggccctttcgacctggtgatcggcggcagcccttgcaatgacctgagcatcgtgaacccagcccggaagggcctgtacgagggaaccggcagactgttcttcgagttttacagactgctgcacgacgcccggcctaaggaaggcgacgaccggcccttcttttggctgttcgagaatgtggtggccatgggagtcagcgacaagcgggatattagccggttcctggagagcaaccccgtgatgatcgatgccaaggaagtgagcgccgcccaccgggccagatacttctggggcaatctgcctggcatgaacagacccctggccagcaccgtgaacgacaagctggagctgcaggagtgcctggagcacggccggatcgccaagttcagcaaggtgagaaccatcaccacccgaagcaacagcatcaaacaaggcaaggaccagcactttcctgtgttcatgaacgagaaggaggacatcctgtggtgtaccgagatggagagagtgttcgggttcccagtccactacacagatgtcagcaacatgtctagactggccagacagagactgctgggaagaagctggtccgtccctgtgatcagacacctgttcgcccctctgaaggagtacttcgcctgcgtgagcagcggcaacagcaacgccaacagccggggccccagcttctctagcggcctggtgccactgtccctgagagggagccacatgggccccatggagatctacaaaaccgtgagcgcctggaagcggcagcctgtgcgcgtgctgagcctgtttcggaatatcgataaagtcctgaaaagcctgggattcctggagagcggctctggctccggcggtggcaccctgaagtacgtggaggatgtgacaaacgtggtcagacgggatgtggagaagtggggccccttcgatctggtgtacggcagcacccaacccctgggcagctcttgtgaccggtgccctggctggtacatgtttcagttccaccggatcctgcagtacgccctgccgagacaggagtcccagcggccattcttttggattttcatggacaacttgctgctgaccgaggatgaccaggaaactaccactcggttcctgcagaccgaagccgtgaccctgcaggacgtgagaggccgggactaccagaacgccatgcgggtgtggtccaacatccctggactgaaaagcaagcacgcacctctgacccctaaagaagaggagtacctgcaggcccaggtgcggagcagaagcaagctggacgcccctaaggtggatctgctggtgaagaattgcctcctgcccctgagagagtacttcaagtatttcagccagaatagtctgcccctgggaggcagcggcggcggcgccctggtgacatttgaggacgtcgccgtgcggttcacccaggaggaatgggctctgctggatccttctcagaaaatcctgtaccgggacgtgatgagagagacataccggaatctgacctccgtgggcatcaactgggaatgttgggaccttgaagcctgcttcagaagcctgggaagaaacctgagagtgcaggtggtgaagagaaagtgcgagctgaccaacagcggcccctgcgccgagggcggcccaagcagcggcgcccctcctcccagcggcggcagcccagccggctccccaacctctaccgaggagggcacctctgagtccgccacccccgagagcggccctggcacctccaccgagcccagcgagggcagcgcacccggcagccctgccggcagccccacctccacagaggagggaaccagcaccgagcccagcgaaggcagcgccccaggcaccagcaccgagcctagtgagcaggagattaaacggatcaacaagatcagaagaagacttgtgaaagacagcaacaccaagaaggccggcaagacaggccccatgaaaaccctgctggttagagtgatgacacccgatctgagagagcggctggaaaacctgagaaagaagcctgaaaatatcccccagcccatcagcaatacatctagagccaacctgaataagctgctgaccgattacaccgaaatgaagaaggcgatcctgcatgtgtactgggaagagttccagaaggaccctgtgggcctgatgagccgggtggcccagcctgccagcaagaagatcgatcagaacaagctgaaacctgagatggacgagaagggcaacctgaccaccgccggctttgcctgctctcagtgtggccagcccctgttcgtgtacaagctggagcaggtgtctgagaagggcaaggcttacaccaactacttcggacggtgcaatgtggccgagcacgaaaagctgatcctgctggcccagctgaagcccgagaaggatagcgacgaagccgtgacatatagcctgggaaagtttgggcagagggccctggatttctacagcattcatgtgaccaaggagtccacccaccccgtgaagcccctggcccagatcgccggaaacagatacgcctccggacctgtgggaaaggccctgagcgacgcatgtatgggcacaatcgcctccttcctgtctaagtaccaggacatcatcatcgaacaccagaaggtggtgaagggcaaccagaagagactggagagcctgcgggagctggccggcaaggaaaacctggaataccctagcgtgaccctgccacctcagcctcacaccaaggagggcgttgatgcctacaacgaagtgatcgcccgggtgcgaatgtgggtgaacctgaacctgtggcagaagctgaagctaagcagagatgatgccaagcctctgctgagactgaagggattcccttcctttcctctggtcgagagacaggccaacgaagtggactggtgggacatggtgtgtaacgtgaagaagctgatcaacgagaaaaaggaggatggcaaggtgttttggcagaatctggctggctacaagagacaggaagccctgagaccatacctgagcagcgaggaagatcggaagaagggaaagaaattcgctcggtaccagctgggcgacctgctgctgcacctggaaaagaagcacggcgaggactggggaaaggtgtacgacgaggcctgggagcggattgacaagaaagtggaaggcctgagcaagcacatcaagctggaagaggaacggagaagcgaggacgcccagagcaaggccgccctgaccgactggctgcgggctaaggccagcttcgtgatcgagggcctgaaggaggccgacaaggacgagttctgcagatgcgagctgaagctgcagaagtggtacggggacctgcggggaaagcccttcgccatcgaagccgagaacagcatcctggacatcagcggcttcagcaagcagtacaactgtgccttcatctggcagaaggacggcgtgaagaagctgaacctgtacctgatcatcaactacttcaagggcggcaagctgcggttcaagaagatcaaacctgaagccttcgaagccaacagattctacaccgtgatcaacaaaaagagcggcgagatcgtgcccatggaggtgaacttcaacttcgacgaccccaacctgatcatcctgcctctggcctttggcaagagacagggcagagaattcatctggaacgacctgctgtccctggaaaccggcagcctgaagctggccaacggaagagtgatcgagaagacactgtacaacagaagaacccggcaggatgagcctgccctgttcgtggccctgaccttcgagcggcgggaggtcctggactcctccaatatcaaaccaatgaacctgatcggcgtggcaagaggcgaaaacatccccgccgtgatcgccctgaccgaccccgagggctgcccactgagccggtttaaggatagcctgggaaacccaacccacatcctgagaatcggcgagagctataaggagaagcagcggaccatccaggccaagaaggaggtggagcagcggagagccggcggctacagccggaagtacgccagcaaagccaagaatctggcagacgatatggtgagaaacaccgctagagatctgctgtactacgccgtgacccaggatgccatgctgatcttcgccaacctgagccggggcttcggccggcagggcaagcggaccttcatggccgagagacagtacacacggatggaggactggctgaccgccaagctggcctacgagggcctgagcaagacctacctgtccaagacactggcccagtacacctccaagacatgcagcaactgtgggtttaccatcaccagcgccgactacgacagggtgctggagaagctgaagaagacagcaacaggctggatgaccacaattaacggcaaggagctgaaggtggagggccagattacctactacaacagatacaagagacagaacgtagtcaaggacctgtccgtcgagctggatagactgagcgaagaatctgtgaacaacgacatctcctcctggacaaagggcagaagcggagaagctctgagcctcctgaagaaaagattctcccatagacccgtgcaggagaagttcgtgtgcctgaactgcggcttcgagacacacgcagccgagcaagccgccctgaacatcgccagatcctggctgttcctgcggagccaggagtacaagaaataccagacaaacaagacaaccggcaacaccgataagagagccttcgtcgagacctggcagtccttttaccggaagaagcttaaggaggtgtggaaacctgccgtgcggtctggcggatctggcggaggctccatggccgccgccgccctgagggaccccgcccagcagggctacgtgaccttcgaggacgtggccgtgtacttcagccaggaggagtggaggctgctggacgaggcccagaagctgctgtacaggaacgtgatgctggagaacttcagcctgctggccagcctgggcctggccagcagcaagacccacgagatcacccagctggagagctgggaggagcccttcatgcccgcctgggaggccgtgggcggcccaagcagcggcgcccctcctcccagcggcggcagcccagccggctccccaacctctaccgaggagggcacctctgagtccgccacccccgagagcggccctggcacctccaccgagcccagcgagggcagcgcacccggcagccctgccggcagccccacctccacagaggagggaaccagcaccgagcccagcgaaggcagcgccccaggcaccagcaccgagcctagtgagcaggagattaaacggatcaacaagatcagaagaagacttgtgaaagacagcaacaccaagaaggccggcaagacaggccccatgaaaaccctgctggttagagtgatgacacccgatctgagagagcggctggaaaacctgagaaagaagcctgaaaatatcccccagcccatcagcaatacatctagagccaacctgaataagctgctgaccgattacaccgaaatgaagaaggcgatcctgcatgtgtactgggaagagttccagaaggaccctgtgggcctgatgagccgggtggcccagcctgccagcaagaagatcgatcagaacaagctgaaacctgagatggacgagaagggcaacctgaccaccgccggctttgcctgctctcagtgtggccagcccctgttcgtgtacaagctggagcaggtgtctgagaagggcaaggcttacaccaactacttcggacggtgcaatgtggccgagcacgaaaagctgatcctgctggcccagctgaagcccgagaaggatagcgacgaagccgtgacatatagcctgggaaagtttgggcagagggccctggatttctacagcattcatgtgaccaaggagtccacccaccccgtgaagcccctggcccagatcgccggaaacagatacgcctccggacctgtgggaaaggccctgagcgacgcatgtatgggcacaatcgcctccttcctgtctaagtaccaggacatcatcatcgaacaccagaaggtggtgaagggcaaccagaagagactggagagcctgcgggagctggccggcaaggaaaacctggaataccctagcgtgaccctgccacctcagcctcacaccaaggagggcgttgatgcctacaacgaagtgatcgcccgggtgcgaatgtgggtgaacctgaacctgtggcagaagctgaagctaagcagagatgatgccaagcctctgctgagactgaagggattcccttcctttcctctggtcgagagacaggccaacgaagtggactggtgggacatggtgtgtaacgtgaagaagctgatcaacgagaaaaaggaggatggcaaggtgttttggcagaatctggctggctacaagagacaggaagccctgagaccatacctgagcagcgaggaagatcggaagaagggaaagaaattcgctcggtaccagctgggcgacctgctgctgcacctggaaaagaagcacggcgaggactggggaaaggtgtacgacgaggcctgggagcggattgacaagaaagtggaaggcctgagcaagcacatcaagctggaagaggaacggagaagcgaggacgcccagagcaaggccgccctgaccgactggctgcgggctaaggccagcttcgtgatcgagggcctgaaggaggccgacaaggacgagttctgcagatgcgagctgaagctgcagaagtggtacggggacctgcggggaaagcccttcgccatcgaagccgagaacagcatcctggacatcagcggcttcagcaagcagtacaactgtgccttcatctggcagaaggacggcgtgaagaagctgaacctgtacctgatcatcaactacttcaagggcggcaagctgcggttcaagaagatcaaacctgaagccttcgaagccaacagattctacaccgtgatcaacaaaaagagcggcgagatcgtgcccatggaggtgaacttcaacttcgacgaccccaacctgatcatcctgcctctggcctttggcaagagacagggcagagaattcatctggaacgacctgctgtccctggaaaccggcagcctgaagctggccaacggaagagtgatcgagaagacactgtacaacagaagaacccggcaggatgagcctgccctgttcgtggccctgaccttcgagcggcgggaggtcctggactcctccaatatcaaaccaatgaacctgatcggcgtggcaagaggcgaaaacatccccgccgtgatcgccctgaccgaccccgagggctgcccactgagccggtttaaggatagcctgggaaacccaacccacatcctgagaatcggcgagagctataaggagaagcagcggaccatccaggccaagaaggaggtggagcagcggagagccggcggctacagccggaagtacgccagcaaagccaagaatctggcagacgatatggtgagaaacaccgctagagatctgctgtactacgccgtgacccaggatgccatgctgatcttcgccaacctgagccggggcttcggccggcagggcaagcggaccttcatggccgagagacagtacacacggatggaggactggctgaccgccaagctggcctacgagggcctgagcaagacctacctgtccaagacactggcccagtacacctccaagacatgcagcaactgtgggtttaccatcaccagcgccgactacgacagggtgctggagaagctgaagaagacagcaacaggctggatgaccacaattaacggcaaggagctgaaggtggagggccagattacctactacaacagatacaagagacagaacgtagtcaaggacctgtccgtcgagctggatagactgagcgaagaatctgtgaacaacgacatctcctcctggacaaagggcagaagcggagaagctctgagcctcctgaagaaaagattctcccatagacccgtgcaggagaagttcgtgtgcctgaactgcggcttcgagacacacgcagccgagcaagccgccctgaacatcgccagatcctggctgttcctgcggagccaggagtacaagaaataccagacaaacaagacaaccggcaacaccgataagagagccttcgtcgagacctggcagtccttttaccggaagaagcttaaggaggtgtggaaacctgccgtgcggtctggcggatctggcggaggctcctatggccgccgccgccctgagggaccccgcccagcagggctacgtgaccttcgaggacgtggccgtgtacttcagccaggaggagtggaggctgctggacgaggcccagaagctgctgtacaggaacgtgatgctggagaacttcagcctgctggccagcctgggcctggccagcagcaagacccacgagatcacccagctggagagctgggaggagcccttcatgcccgcctgggaggccgtgggatctggctccggcagcggccccaagaaaaagagaaaagtctaagctgccttctgcggggcttgccttctggccatgcccttcttctctcccttgcacctgtacctcttggtctttgaataaagcctgagtaggaaggctagcaaaaaaaaaaaaaaaaaaaaaaaaaaaaaaaaaaaaaaaaaaaaaaaaaaaaaaaaaaaaaaaaaaaaaaaaaaaaaaaa

SEQ ID NO: 15828 - RNA, 9485 nt, synthetic construct
  source 1..9485: mol_type = other RNA
aggaaataagagagaaaagaagagtaagaagaaatataagagccaccatggcccctaagaagaagcgtaaagtgagccggatggaacgcctcgtctacgaggtgcggcagaagtgcagaaacatcgaggacatctgcatctcctgcggatctctgaacgtgaccctggagcacccactgttcatcggcggcatgtgccagaactgtaaaaactgttttctggagtgtgcctatcaatacgacgatgacggctaccagagctactgcaccatctgttgcggcggaagagaggtgctgatgtgtggaaataacaactgctgccggtgcttctgcgtggaatgcgtggacctgctggtgggccccggcgccgcccaggccgctattaaggaagatccttggaactgctacatgtgcggccacaagggcacatacggcctgctgagacggagagaggactggcctagcagactgcagatgttcttcgccaataaccacgaccaggagttcgacccccctaaggtgtaccctcccgtccccgccgagaagagaaagcccatccgggtcctgagcctgttcgatggcatcgccaccggtctgctggtgctgaaggacctgggcatccaggtggataggtacattgcctccgaggtgtgcgaggactccatcaccgtgggaatggtgcgtcatcagggcaagatcatgtacgtgggcgacgtgcggagcgtgacacagaagcatatccaggagtggggccctttcgacctggtgatcggcggcagcccttgcaatgacctgagcatcgtgaacccagcccggaagggcctgtacgagggaaccggcagactgttcttcgagttttacagactgctgcacgacgcccggcctaaggaaggcgacgaccggcccttcttttggctgttcgagaatgtggtggccatgggagtcagcgacaagcgggatattagccggttcctggagagcaaccccgtgatgatcgatgccaaggaagtgagcgccgcccaccgggccagatacttctggggcaatctgcctggcatgaacagacccctggccagcaccgtgaacgacaagctggagctgcaggagtgcctggagcacggccggatcgccaagttcagcaaggtgagaaccatcaccacccgaagcaacagcatcaaacaaggcaaggaccagcactttcctgtgttcatgaacgagaaggaggacatcctgtggtgtaccgagatggagagagtgttcgggttcccagtccactacacagatgtcagcaacatgtctagactggccagacagagactgctgggaagaagctggtccgtccctgtgatcagacacctgttcgcccctctgaaggagtacttcgcctgcgtgagcagcggcaacagcaacgccaacagccggggccccagcttctctagcggcctggtgccactgtccctgagagggagccacatgggccccatggagatctacaaaaccgtgagcgcctggaagcggcagcctgtgcgcgtgctgagcctgtttcggaatatcgataaagtcctgaaaagcctgggattcctggagagcggctctggctccggcggtggcaccctgaagtacgtggaggatgtgacaaacgtggtcagacgggatgtggagaagtggggccccttcgatctggtgtacggcagcacccaacccctgggcagctcttgtgaccggtgccctggctggtacatgtttcagttccaccggatcctgcagtacgccctgccgagacaggagtcccagcggccattcttttggattttcatggacaacttgctgctgaccgaggatgaccaggaaactaccactcggttcctgcagaccgaagccgtgaccctgcaggacgtgagaggccgggactaccagaacgccatgcgggtgtggtccaacatccctggactgaaaagcaagcacgcacctctgacccctaaagaagaggagtacctgcaggcccaggtgcggagcagaagcaagctggacgcccctaaggtggatctgctggtgaagaattgcctcctgcccctgagagagtacttcaagtatttcagccagaatagtctgcccctgggaggcagcggcggcggcgccctggtgacatttgaggacgtcgccgtgcggttcacccaggaggaatgggctctgctggatccttctcagaaaatcctgtaccgggacgtgatgagagagacataccggaatctgacctccgtgggcatcaactgggaatgttgggaccttgaagcctgcttcagaagcctgggaagaaacctgagagtgcaggtggtgaagagaaagtgcgagctgaccaacagcggcccctgcgccgagggcggcccaagcagcggcgcccctcctcccagcggcggcagcccagccggctccccaacctctaccgaggagggcacctctgagtccgccacccccgagagcggccctggcacctccaccgagcccagcgagggcagcgcacccggcagccctgccggcagccccacctccacagaggagggaaccagcaccgagcccagcgaaggcagcgccccaggcaccagcaccgagcctagtgagcaggagattaaacggatcaacaagatcagaagaagacttgtgaaagacagcaacaccaagaaggccggcaagacaggccccatgaaaaccctgctggttagagtgatgacacccgatctgagagagcggctggaaaacctgagaaagaagcctgaaaatatcccccagcccatcagcaatacatctagagccaacctgaataagctgctgaccgattacaccgaaatgaagaaggcgatcctgcatgtgtactgggaagagttccagaaggaccctgtgggcctgatgagccgggtggcccagcctgccagcaagaagatcgatcagaacaagctgaaacctgagatggacgagaagggcaacctgaccaccgccggctttgcctgctctcagtgtggccagcccctgttcgtgtacaagctggagcaggtgtctgagaagggcaaggcttacaccaactacttcggacggtgcaatgtggccgagcacgaaaagctgatcctgctggcccagctgaagcccgagaaggatagcgacgaagccgtgacatatagcctgggaaagtttgggcagagggccctggatttctacagcattcatgtgaccaaggagtccacccaccccgtgaagcccctggcccagatcgccggaaacagatacgcctccggacctgtgggaaaggccctgagcgacgcatgtatgggcacaatcgcctccttcctgtctaagtaccaggacatcatcatcgaacaccagaaggtggtgaagggcaaccagaagagactggagagcctgcgggagctggccggcaaggaaaacctggaataccctagcgtgaccctgccacctcagcctcacaccaaggagggcgttgatgcctacaacgaagtgatcgcccgggtgcgaatgtgggtgaacctgaacctgtggcagaagctgaagctaagcagagatgatgccaagcctctgctgagactgaagggattcccttcctttcctctggtcgagagacaggccaacgaagtggactggtgggacatggtgtgtaacgtgaagaagctgatcaacgagaaaaaggaggatggcaaggtgttttggcagaatctggctggctacaagagacaggaagccctgagaccatacctgagcagcgaggaagatcggaagaagggaaagaaattcgctcggtaccagctgggcgacctgctgctgcacctggaaaagaagcacggcgaggactggggaaaggtgtacgacgaggcctgggagcggattgacaagaaagtggaaggcctgagcaagcacatcaagctggaagaggaacggagaagcgaggacgcccagagcaaggccgccctgaccgactggctgcgggctaaggccagcttcgtgatcgagggcctgaaggaggccgacaaggacgagttctgcagatgcgagctgaagctgcagaagtggtacggggacctgcggggaaagcccttcgccatcgaagccgagaacagcatcctggacatcagcggcttcagcaagcagtacaactgtgccttcatctggcagaaggacggcgtgaagaagctgaacctgtacctgatcatcaactacttcaagggcggcaagctgcggttcaagaagatcaaacctgaagccttcgaagccaacagattctacaccgtgatcaacaaaaagagcggcgagatcgtgcccatggaggtgaacttcaacttcgacgaccccaacctgatcatcctgcctctggcctttggcaagagacagggcagagaattcatctggaacgacctgctgtccctggaaaccggcagcctgaagctggccaacggaagagtgatcgagaagacactgtacaacagaagaacccggcaggatgagcctgccctgttcgtggccctgaccttcgagcggcgggaggtcctggactcctccaatatcaaaccaatgaacctgatcggcgtggcaagaggcgaaaacatccccgccgtgatcgccctgaccgaccccgagggctgcccactgagccggtttaaggatagcctgggaaacccaacccacatcctgagaatcggcgagagctataaggagaagcagcggaccatccaggccaagaaggaggtggagcagcggagagccggcggctacagccggaagtacgccagcaaagccaagaatctggcagacgatatggtgagaaacaccgctagagatctgctgtactacgccgtgacccaggatgccatgctgatcttcgccaacctgagccggggcttcggccggcagggcaagcggaccttcatggccgagagacagtacacacggatggaggactggctgaccgccaagctggcctacgagggcctgagcaagacctacctgtccaagacactggcccagtacacctccaagacatgcagcaactgtgggtttaccatcaccagcgccgactacgacagggtgctggagaagctgaagaagacagcaacaggctggatgaccacaattaacggcaaggagctgaaggtggagggccagattacctactacaacagatacaagagacagaacgtagtcaaggacctgtccgtcgagctggatagactgagcgaagaatctgtgaacaacgacatctcctcctggacaaagggcagaagcggagaagctctgagcctcctgaagaaaagattctcccatagacccgtgcaggagaagttcgtgtgcctgaactgcggcttcgagacacacgcagccgagcaagccgccctgaacatcgccagatcctggctgttcctgcggagccaggagtacaagaaataccagacaaacaagacaaccggcaacaccgataagagagccttcgtcgagacctggcagtccttttaccggaagaagcttaaggaggtgtggaaacctgccgtgcggtctggcggatctggcggaggctccttccaggagagcgtgaccttcgaggacgtggccgtgtacttcagcgagaacgagtggaccggcctggcccccgcccagagggtgctgtacagggacgtgatgctggagaactacggcgccgtggccagcctggccgccttccccttccccaagcccgccctgatcagccagctggagaggggcgaggccccctggtgcaaggccccccagggcgccctggacggcgagggccccaggggcgtgggcggcccaagcagcggcgcccctcctcccagcggcggcagcccagccggctccccaacctctaccgaggagggcacctctgagtccgccacccccgagagcggccctggcacctccaccgagcccagcgagggcagcgcacccggcagccctgccggcagccccacctccacagaggagggaaccagcaccgagcccagcgaaggcagcgccccaggcaccagcaccgagcctagtgagcaggagattaaacggatcaacaagatcagaagaagacttgtgaaagacagcaacaccaagaaggccggcaagacaggccccatgaaaaccctgctggttagagtgatgacacccgatctgagagagcggctggaaaacctgagaaagaagcctgaaaatatcccccagcccatcagcaatacatctagagccaacctgaataagctgctgaccgattacaccgaaatgaagaaggcgatcctgcatgtgtactgggaagagttccagaaggaccctgtgggcctgatgagccgggtggcccagcctgccagcaagaagatcgatcagaacaagctgaaacctgagatggacgagaagggcaacctgaccaccgccggctttgcctgctctcagtgtggccagcccctgttcgtgtacaagctggagcaggtgtctgagaagggcaaggcttacaccaactacttcggacggtgcaatgtggccgagcacgaaaagctgatcctgctggcccagctgaagcccgagaaggatagcgacgaagccgtgacatatagcctgggaaagtttgggcagagggccctggatttctacagcattcatgtgaccaaggagtccacccaccccgtgaagcccctggcccagatcgccggaaacagatacgcctccggacctgtgggaaaggccctgagcgacgcatgtatgggcacaatcgcctccttcctgtctaagtaccaggacatcatcatcgaacaccagaaggtggtgaagggcaaccagaagagactggagagcctgcgggagctggccggcaaggaaaacctggaataccctagcgtgaccctgccacctcagcctcacaccaaggagggcgttgatgcctacaacgaagtgatcgcccgggtgcgaatgtgggtgaacctgaacctgtggcagaagctgaagctaagcagagatgatgccaagcctctgctgagactgaagggattcccttcctttcctctggtcgagagacaggccaacgaagtggactggtgggacatggtgtgtaacgtgaagaagctgatcaacgagaaaaaggaggatggcaaggtgttttggcagaatctggctggctacaagagacaggaagccctgagaccatacctgagcagcgaggaagatcggaagaagggaaagaaattcgctcggtaccagctgggcgacctgctgctgcacctggaaaagaagcacggcgaggactggggaaaggtgtacgacgaggcctgggagcggattgacaagaaagtggaaggcctgagcaagcacatcaagctggaagaggaacggagaagcgaggacgcccagagcaaggccgccctgaccgactggctgcgggctaaggccagcttcgtgatcgagggcctgaaggaggccgacaaggacgagttctgcagatgcgagctgaagctgcagaagtggtacggggacctgcggggaaagcccttcgccatcgaagccgagaacagcatcctggacatcagcggcttcagcaagcagtacaactgtgccttcatctggcagaaggacggcgtgaagaagctgaacctgtacctgatcatcaactacttcaagggcggcaagctgcggttcaagaagatcaaacctgaagccttcgaagccaacagattctacaccgtgatcaacaaaaagagcggcgagatcgtgcccatggaggtgaacttcaacttcgacgaccccaacctgatcatcctgcctctggcctttggcaagagacagggcagagaattcatctggaacgacctgctgtccctggaaaccggcagcctgaagctggccaacggaagagtgatcgagaagacactgtacaacagaagaacccggcaggatgagcctgccctgttcgtggccctgaccttcgagcggcgggaggtcctggactcctccaatatcaaaccaatgaacctgatcggcgtggcaagaggcgaaaacatccccgccgtgatcgccctgaccgaccccgagggctgcccactgagccggtttaaggatagcctgggaaacccaacccacatcctgagaatcggcgagagctataaggagaagcagcggaccatccaggccaagaaggaggtggagcagcggagagccggcggctacagccggaagtacgccagcaaagccaagaatctggcagacgatatggtgagaaacaccgctagagatctgctgtactacgccgtgacccaggatgccatgctgatcttcgccaacctgagccggggcttcggccggcagggcaagcggaccttcatggccgagagacagtacacacggatggaggactggctgaccgccaagctggcctacgagggcctgagcaagacctacctgtccaagacactggcccagtacacctccaagacatgcagcaactgtgggtttaccatcaccagcgccgactacgacagggtgctggagaagctgaagaagacagcaacaggctggatgaccacaattaacggcaaggagctgaaggtggagggccagattacctactacaacagatacaagagacagaacgtagtcaaggacctgtccgtcgagctggatagactgagcgaagaatctgtgaacaacgacatctcctcctggacaaagggcagaagcggagaagctctgagcctcctgaagaaaagattctcccatagacccgtgcaggagaagttcgtgtgcctgaactgcggcttcgagacacacgcagccgagcaagccgccctgaacatcgccagatcctggctgttcctgcggagccaggagtacaagaaataccagacaaacaagacaaccggcaacaccgataagagagccttcgtcgagacctggcagtccttttaccggaagaagcttaaggaggtgtggaaacctgccgtgcggtctggcggatctggcggaggctcctttccaggagagcgtgaccttcgaggacgtggccgtgtacttcagcgagaacgagtggaccggcctggcccccgcccagagggtgctgtacagggacgtgatgctggagaactacggcgccgtggccagcctggccgccttccccttccccaagcccgccctgatcagccagctggagaggggcgaggccccctggtgcaaggccccccagggcgccctggacggcgagggccccaggggcgtgggatctggctccggcagcggccccaagaaaaagagaaaagtctaagctgccttctgcggggcttgccttctggccatgcccttcttctctcccttgcacctgtacctcttggtctttgaataaagcctgagtaggaaggctagcaaaaaaaaaaaaaaaaaaaaaaaaaaaaaaaaaaaaaaaaaaaaaaaaaaaaaaaaaaaaaaaaaaaaaaaaaaaaaaaa

SEQ ID NO: 15829 - RNA, 9485 nt, synthetic construct
  source 1..9485: mol_type = other RNA
aggaaataagagagaaaagaagagtaagaagaaatataagagccaccatggcccctaagaagaagcgtaaagtgagccggatggaacgcctcgtctacgaggtgcggcagaagtgcagaaacatcgaggacatctgcatctcctgcggatctctgaacgtgaccctggagcacccactgttcatcggcggcatgtgccagaactgtaaaaactgttttctggagtgtgcctatcaatacgacgatgacggctaccagagctactgcaccatctgttgcggcggaagagaggtgctgatgtgtggaaataacaactgctgccggtgcttctgcgtggaatgcgtggacctgctggtgggccccggcgccgcccaggccgctattaaggaagatccttggaactgctacatgtgcggccacaagggcacatacggcctgctgagacggagagaggactggcctagcagactgcagatgttcttcgccaataaccacgaccaggagttcgacccccctaaggtgtaccctcccgtccccgccgagaagagaaagcccatccgggtcctgagcctgttcgatggcatcgccaccggtctgctggtgctgaaggacctgggcatccaggtggataggtacattgcctccgaggtgtgcgaggactccatcaccgtgggaatggtgcgtcatcagggcaagatcatgtacgtgggcgacgtgcggagcgtgacacagaagcatatccaggagtggggccctttcgacctggtgatcggcggcagcccttgcaatgacctgagcatcgtgaacccagcccggaagggcctgtacgagggaaccggcagactgttcttcgagttttacagactgctgcacgacgcccggcctaaggaaggcgacgaccggcccttcttttggctgttcgagaatgtggtggccatgggagtcagcgacaagcgggatattagccggttcctggagagcaaccccgtgatgatcgatgccaaggaagtgagcgccgcccaccgggccagatacttctggggcaatctgcctggcatgaacagacccctggccagcaccgtgaacgacaagctggagctgcaggagtgcctggagcacggccggatcgccaagttcagcaaggtgagaaccatcaccacccgaagcaacagcatcaaacaaggcaaggaccagcactttcctgtgttcatgaacgagaaggaggacatcctgtggtgtaccgagatggagagagtgttcgggttcccagtccactacacagatgtcagcaacatgtctagactggccagacagagactgctgggaagaagctggtccgtccctgtgatcagacacctgttcgcccctctgaaggagtacttcgcctgcgtgagcagcggcaacagcaacgccaacagccggggccccagcttctctagcggcctggtgccactgtccctgagagggagccacatgggccccatggagatctacaaaaccgtgagcgcctggaagcggcagcctgtgcgcgtgctgagcctgtttcggaatatcgataaagtcctgaaaagcctgggattcctggagagcggctctggctccggcggtggcaccctgaagtacgtggaggatgtgacaaacgtggtcagacgggatgtggagaagtggggccccttcgatctggtgtacggcagcacccaacccctgggcagctcttgtgaccggtgccctggctggtacatgtttcagttccaccggatcctgcagtacgccctgccgagacaggagtcccagcggccattcttttggattttcatggacaacttgctgctgaccgaggatgaccaggaaactaccactcggttcctgcagaccgaagccgtgaccctgcaggacgtgagaggccgggactaccagaacgccatgcgggtgtggtccaacatccctggactgaaaagcaagcacgcacctctgacccctaaagaagaggagtacctgcaggcccaggtgcggagcagaagcaagctggacgcccctaaggtggatctgctggtgaagaattgcctcctgcccctgagagagtacttcaagtatttcagccagaatagtctgcccctgggaggcagcggcggcggcgccctggtgacatttgaggacgtcgccgtgcggttcacccaggaggaatgggctctgctggatccttctcagaaaatcctgtaccgggacgtgatgagagagacataccggaatctgacctccgtgggcatcaactgggaatgttgggaccttgaagcctgcttcagaagcctgggaagaaacctgagagtgcaggtggtgaagagaaagtgcgagctgaccaacagcggcccctgcgccgagggcggcccaagcagcggcgcccctcctcccagcggcggcagcccagccggctccccaacctctaccgaggagggcacctctgagtccgccacccccgagagcggccctggcacctccaccgagcccagcgagggcagcgcacccggcagccctgccggcagccccacctccacagaggagggaaccagcaccgagcccagcgaaggcagcgccccaggcaccagcaccgagcctagtgagcaggagattaaacggatcaacaagatcagaagaagacttgtgaaagacagcaacaccaagaaggccggcaagacaggccccatgaaaaccctgctggttagagtgatgacacccgatctgagagagcggctggaaaacctgagaaagaagcctgaaaatatcccccagcccatcagcaatacatctagagccaacctgaataagctgctgaccgattacaccgaaatgaagaaggcgatcctgcatgtgtactgggaagagttccagaaggaccctgtgggcctgatgagccgggtggcccagcctgccagcaagaagatcgatcagaacaagctgaaacctgagatggacgagaagggcaacctgaccaccgccggctttgcctgctctcagtgtggccagcccctgttcgtgtacaagctggagcaggtgtctgagaagggcaaggcttacaccaactacttcggacggtgcaatgtggccgagcacgaaaagctgatcctgctggcccagctgaagcccgagaaggatagcgacgaagccgtgacatatagcctgggaaagtttgggcagagggccctggatttctacagcattcatgtgaccaaggagtccacccaccccgtgaagcccctggcccagatcgccggaaacagatacgcctccggacctgtgggaaaggccctgagcgacgcatgtatgggcacaatcgcctccttcctgtctaagtaccaggacatcatcatcgaacaccagaaggtggtgaagggcaaccagaagagactggagagcctgcgggagctggccggcaaggaaaacctggaataccctagcgtgaccctgccacctcagcctcacaccaaggagggcgttgatgcctacaacgaagtgatcgcccgggtgcgaatgtgggtgaacctgaacctgtggcagaagctgaagctaagcagagatgatgccaagcctctgctgagactgaagggattcccttcctttcctctggtcgagagacaggccaacgaagtggactggtgggacatggtgtgtaacgtgaagaagctgatcaacgagaaaaaggaggatggcaaggtgttttggcagaatctggctggctacaagagacaggaagccctgagaccatacctgagcagcgaggaagatcggaagaagggaaagaaattcgctcggtaccagctgggcgacctgctgctgcacctggaaaagaagcacggcgaggactggggaaaggtgtacgacgaggcctgggagcggattgacaagaaagtggaaggcctgagcaagcacatcaagctggaagaggaacggagaagcgaggacgcccagagcaaggccgccctgaccgactggctgcgggctaaggccagcttcgtgatcgagggcctgaaggaggccgacaaggacgagttctgcagatgcgagctgaagctgcagaagtggtacggggacctgcggggaaagcccttcgccatcgaagccgagaacagcatcctggacatcagcggcttcagcaagcagtacaactgtgccttcatctggcagaaggacggcgtgaagaagctgaacctgtacctgatcatcaactacttcaagggcggcaagctgcggttcaagaagatcaaacctgaagccttcgaagccaacagattctacaccgtgatcaacaaaaagagcggcgagatcgtgcccatggaggtgaacttcaacttcgacgaccccaacctgatcatcctgcctctggcctttggcaagagacagggcagagaattcatctggaacgacctgctgtccctggaaaccggcagcctgaagctggccaacggaagagtgatcgagaagacactgtacaacagaagaacccggcaggatgagcctgccctgttcgtggccctgaccttcgagcggcgggaggtcctggactcctccaatatcaaaccaatgaacctgatcggcgtggcaagaggcgaaaacatccccgccgtgatcgccctgaccgaccccgagggctgcccactgagccggtttaaggatagcctgggaaacccaacccacatcctgagaatcggcgagagctataaggagaagcagcggaccatccaggccaagaaggaggtggagcagcggagagccggcggctacagccggaagtacgccagcaaagccaagaatctggcagacgatatggtgagaaacaccgctagagatctgctgtactacgccgtgacccaggatgccatgctgatcttcgccaacctgagccggggcttcggccggcagggcaagcggaccttcatggccgagagacagtacacacggatggaggactggctgaccgccaagctggcctacgagggcctgagcaagacctacctgtccaagacactggcccagtacacctccaagacatgcagcaactgtgggtttaccatcaccagcgccgactacgacagggtgctggagaagctgaagaagacagcaacaggctggatgaccacaattaacggcaaggagctgaaggtggagggccagattacctactacaacagatacaagagacagaacgtagtcaaggacctgtccgtcgagctggatagactgagcgaagaatctgtgaacaacgacatctcctcctggacaaagggcagaagcggagaagctctgagcctcctgaagaaaagattctcccatagacccgtgcaggagaagttcgtgtgcctgaactgcggcttcgagacacacgcagccgagcaagccgccctgaacatcgccagatcctggctgttcctgcggagccaggagtacaagaaataccagacaaacaagacaaccggcaacaccgataagagagccttcgtcgagacctggcagtccttttaccggaagaagcttaaggaggtgtggaaacctgccgtgcggtctggcggatctggcggaggctccagcaaggcccccgtgaccttcggcgacctggccatctacttcagccaggaggagtgggagtggctgagccccatccagaaggacctgtacgaggacgtgatgctggagaactaccagaacctggtgctgctgggcctggcctgcaggaggcccaacatcatcaccctgctggagaagggcaaggccccctgggtggtggagcccagcaggaggaggaggggccccgagagcggcagcaagtgcggcggcccaagcagcggcgcccctcctcccagcggcggcagcccagccggctccccaacctctaccgaggagggcacctctgagtccgccacccccgagagcggccctggcacctccaccgagcccagcgagggcagcgcacccggcagccctgccggcagccccacctccacagaggagggaaccagcaccgagcccagcgaaggcagcgccccaggcaccagcaccgagcctagtgagcaggagattaaacggatcaacaagatcagaagaagacttgtgaaagacagcaacaccaagaaggccggcaagacaggccccatgaaaaccctgctggttagagtgatgacacccgatctgagagagcggctggaaaacctgagaaagaagcctgaaaatatcccccagcccatcagcaatacatctagagccaacctgaataagctgctgaccgattacaccgaaatgaagaaggcgatcctgcatgtgtactgggaagagttccagaaggaccctgtgggcctgatgagccgggtggcccagcctgccagcaagaagatcgatcagaacaagctgaaacctgagatggacgagaagggcaacctgaccaccgccggctttgcctgctctcagtgtggccagcccctgttcgtgtacaagctggagcaggtgtctgagaagggcaaggcttacaccaactacttcggacggtgcaatgtggccgagcacgaaaagctgatcctgctggcccagctgaagcccgagaaggatagcgacgaagccgtgacatatagcctgggaaagtttgggcagagggccctggatttctacagcattcatgtgaccaaggagtccacccaccccgtgaagcccctggcccagatcgccggaaacagatacgcctccggacctgtgggaaaggccctgagcgacgcatgtatgggcacaatcgcctccttcctgtctaagtaccaggacatcatcatcgaacaccagaaggtggtgaagggcaaccagaagagactggagagcctgcgggagctggccggcaaggaaaacctggaataccctagcgtgaccctgccacctcagcctcacaccaaggagggcgttgatgcctacaacgaagtgatcgcccgggtgcgaatgtgggtgaacctgaacctgtggcagaagctgaagctaagcagagatgatgccaagcctctgctgagactgaagggattcccttcctttcctctggtcgagagacaggccaacgaagtggactggtgggacatggtgtgtaacgtgaagaagctgatcaacgagaaaaaggaggatggcaaggtgttttggcagaatctggctggctacaagagacaggaagccctgagaccatacctgagcagcgaggaagatcggaagaagggaaagaaattcgctcggtaccagctgggcgacctgctgctgcacctggaaaagaagcacggcgaggactggggaaaggtgtacgacgaggcctgggagcggattgacaagaaagtggaaggcctgagcaagcacatcaagctggaagaggaacggagaagcgaggacgcccagagcaaggccgccctgaccgactggctgcgggctaaggccagcttcgtgatcgagggcctgaaggaggccgacaaggacgagttctgcagatgcgagctgaagctgcagaagtggtacggggacctgcggggaaagcccttcgccatcgaagccgagaacagcatcctggacatcagcggcttcagcaagcagtacaactgtgccttcatctggcagaaggacggcgtgaagaagctgaacctgtacctgatcatcaactacttcaagggcggcaagctgcggttcaagaagatcaaacctgaagccttcgaagccaacagattctacaccgtgatcaacaaaaagagcggcgagatcgtgcccatggaggtgaacttcaacttcgacgaccccaacctgatcatcctgcctctggcctttggcaagagacagggcagagaattcatctggaacgacctgctgtccctggaaaccggcagcctgaagctggccaacggaagagtgatcgagaagacactgtacaacagaagaacccggcaggatgagcctgccctgttcgtggccctgaccttcgagcggcgggaggtcctggactcctccaatatcaaaccaatgaacctgatcggcgtggcaagaggcgaaaacatccccgccgtgatcgccctgaccgaccccgagggctgcccactgagccggtttaaggatagcctgggaaacccaacccacatcctgagaatcggcgagagctataaggagaagcagcggaccatccaggccaagaaggaggtggagcagcggagagccggcggctacagccggaagtacgccagcaaagccaagaatctggcagacgatatggtgagaaacaccgctagagatctgctgtactacgccgtgacccaggatgccatgctgatcttcgccaacctgagccggggcttcggccggcagggcaagcggaccttcatggccgagagacagtacacacggatggaggactggctgaccgccaagctggcctacgagggcctgagcaagacctacctgtccaagacactggcccagtacacctccaagacatgcagcaactgtgggtttaccatcaccagcgccgactacgacagggtgctggagaagctgaagaagacagcaacaggctggatgaccacaattaacggcaaggagctgaaggtggagggccagattacctactacaacagatacaagagacagaacgtagtcaaggacctgtccgtcgagctggatagactgagcgaagaatctgtgaacaacgacatctcctcctggacaaagggcagaagcggagaagctctgagcctcctgaagaaaagattctcccatagacccgtgcaggagaagttcgtgtgcctgaactgcggcttcgagacacacgcagccgagcaagccgccctgaacatcgccagatcctggctgttcctgcggagccaggagtacaagaaataccagacaaacaagacaaccggcaacaccgataagagagccttcgtcgagacctggcagtccttttaccggaagaagcttaaggaggtgtggaaacctgccgtgcggtctggcggatctggcggaggctcctagcaaggcccccgtgaccttcggcgacctggccatctacttcagccaggaggagtgggagtggctgagccccatccagaaggacctgtacgaggacgtgatgctggagaactaccagaacctggtgctgctgggcctggcctgcaggaggcccaacatcatcaccctgctggagaagggcaaggccccctgggtggtggagcccagcaggaggaggaggggccccgagagcggcagcaagtgcggatctggctccggcagcggccccaagaaaaagagaaaagtctaagctgccttctgcggggcttgccttctggccatgcccttcttctctcccttgcacctgtacctcttggtctttgaataaagcctgagtaggaaggctagcaaaaaaaaaaaaaaaaaaaaaaaaaaaaaaaaaaaaaaaaaaaaaaaaaaaaaaaaaaaaaaaaaaaaaaaaaaaaaaaa

SEQ ID NO: 15830 - RNA, 9485 nt, synthetic construct
  source 1..9485: mol_type = other RNA
aggaaataagagagaaaagaagagtaagaagaaatataagagccaccatggcccctaagaagaagcgtaaagtgagccggatggaacgcctcgtctacgaggtgcggcagaagtgcagaaacatcgaggacatctgcatctcctgcggatctctgaacgtgaccctggagcacccactgttcatcggcggcatgtgccagaactgtaaaaactgttttctggagtgtgcctatcaatacgacgatgacggctaccagagctactgcaccatctgttgcggcggaagagaggtgctgatgtgtggaaataacaactgctgccggtgcttctgcgtggaatgcgtggacctgctggtgggccccggcgccgcccaggccgctattaaggaagatccttggaactgctacatgtgcggccacaagggcacatacggcctgctgagacggagagaggactggcctagcagactgcagatgttcttcgccaataaccacgaccaggagttcgacccccctaaggtgtaccctcccgtccccgccgagaagagaaagcccatccgggtcctgagcctgttcgatggcatcgccaccggtctgctggtgctgaaggacctgggcatccaggtggataggtacattgcctccgaggtgtgcgaggactccatcaccgtgggaatggtgcgtcatcagggcaagatcatgtacgtgggcgacgtgcggagcgtgacacagaagcatatccaggagtggggccctttcgacctggtgatcggcggcagcccttgcaatgacctgagcatcgtgaacccagcccggaagggcctgtacgagggaaccggcagactgttcttcgagttttacagactgctgcacgacgcccggcctaaggaaggcgacgaccggcccttcttttggctgttcgagaatgtggtggccatgggagtcagcgacaagcgggatattagccggttcctggagagcaaccccgtgatgatcgatgccaaggaagtgagcgccgcccaccgggccagatacttctggggcaatctgcctggcatgaacagacccctggccagcaccgtgaacgacaagctggagctgcaggagtgcctggagcacggccggatcgccaagttcagcaaggtgagaaccatcaccacccgaagcaacagcatcaaacaaggcaaggaccagcactttcctgtgttcatgaacgagaaggaggacatcctgtggtgtaccgagatggagagagtgttcgggttcccagtccactacacagatgtcagcaacatgtctagactggccagacagagactgctgggaagaagctggtccgtccctgtgatcagacacctgttcgcccctctgaaggagtacttcgcctgcgtgagcagcggcaacagcaacgccaacagccggggccccagcttctctagcggcctggtgccactgtccctgagagggagccacatgggccccatggagatctacaaaaccgtgagcgcctggaagcggcagcctgtgcgcgtgctgagcctgtttcggaatatcgataaagtcctgaaaagcctgggattcctggagagcggctctggctccggcggtggcaccctgaagtacgtggaggatgtgacaaacgtggtcagacgggatgtggagaagtggggccccttcgatctggtgtacggcagcacccaacccctgggcagctcttgtgaccggtgccctggctggtacatgtttcagttccaccggatcctgcagtacgccctgccgagacaggagtcccagcggccattcttttggattttcatggacaacttgctgctgaccgaggatgaccaggaaactaccactcggttcctgcagaccgaagccgtgaccctgcaggacgtgagaggccgggactaccagaacgccatgcgggtgtggtccaacatccctggactgaaaagcaagcacgcacctctgacccctaaagaagaggagtacctgcaggcccaggtgcggagcagaagcaagctggacgcccctaaggtggatctgctggtgaagaattgcctcctgcccctgagagagtacttcaagtatttcagccagaatagtctgcccctgggaggcagcggcggcggcgccctggtgacatttgaggacgtcgccgtgcggttcacccaggaggaatgggctctgctggatccttctcagaaaatcctgtaccgggacgtgatgagagagacataccggaatctgacctccgtgggcatcaactgggaatgttgggaccttgaagcctgcttcagaagcctgggaagaaacctgagagtgcaggtggtgaagagaaagtgcgagctgaccaacagcggcccctgcgccgagggcggcccaagcagcggcgcccctcctcccagcggcggcagcccagccggctccccaacctctaccgaggagggcacctctgagtccgccacccccgagagcggccctggcacctccaccgagcccagcgagggcagcgcacccggcagccctgccggcagccccacctccacagaggagggaaccagcaccgagcccagcgaaggcagcgccccaggcaccagcaccgagcctagtgagcaggagattaaacggatcaacaagatcagaagaagacttgtgaaagacagcaacaccaagaaggccggcaagacaggccccatgaaaaccctgctggttagagtgatgacacccgatctgagagagcggctggaaaacctgagaaagaagcctgaaaatatcccccagcccatcagcaatacatctagagccaacctgaataagctgctgaccgattacaccgaaatgaagaaggcgatcctgcatgtgtactgggaagagttccagaaggaccctgtgggcctgatgagccgggtggcccagcctgccagcaagaagatcgatcagaacaagctgaaacctgagatggacgagaagggcaacctgaccaccgccggctttgcctgctctcagtgtggccagcccctgttcgtgtacaagctggagcaggtgtctgagaagggcaaggcttacaccaactacttcggacggtgcaatgtggccgagcacgaaaagctgatcctgctggcccagctgaagcccgagaaggatagcgacgaagccgtgacatatagcctgggaaagtttgggcagagggccctggatttctacagcattcatgtgaccaaggagtccacccaccccgtgaagcccctggcccagatcgccggaaacagatacgcctccggacctgtgggaaaggccctgagcgacgcatgtatgggcacaatcgcctccttcctgtctaagtaccaggacatcatcatcgaacaccagaaggtggtgaagggcaaccagaagagactggagagcctgcgggagctggccggcaaggaaaacctggaataccctagcgtgaccctgccacctcagcctcacaccaaggagggcgttgatgcctacaacgaagtgatcgcccgggtgcgaatgtgggtgaacctgaacctgtggcagaagctgaagctaagcagagatgatgccaagcctctgctgagactgaagggattcccttcctttcctctggtcgagagacaggccaacgaagtggactggtgggacatggtgtgtaacgtgaagaagctgatcaacgagaaaaaggaggatggcaaggtgttttggcagaatctggctggctacaagagacaggaagccctgagaccatacctgagcagcgaggaagatcggaagaagggaaagaaattcgctcggtaccagctgggcgacctgctgctgcacctggaaaagaagcacggcgaggactggggaaaggtgtacgacgaggcctgggagcggattgacaagaaagtggaaggcctgagcaagcacatcaagctggaagaggaacggagaagcgaggacgcccagagcaaggccgccctgaccgactggctgcgggctaaggccagcttcgtgatcgagggcctgaaggaggccgacaaggacgagttctgcagatgcgagctgaagctgcagaagtggtacggggacctgcggggaaagcccttcgccatcgaagccgagaacagcatcctggacatcagcggcttcagcaagcagtacaactgtgccttcatctggcagaaggacggcgtgaagaagctgaacctgtacctgatcatcaactacttcaagggcggcaagctgcggttcaagaagatcaaacctgaagccttcgaagccaacagattctacaccgtgatcaacaaaaagagcggcgagatcgtgcccatggaggtgaacttcaacttcgacgaccccaacctgatcatcctgcctctggcctttggcaagagacagggcagagaattcatctggaacgacctgctgtccctggaaaccggcagcctgaagctggccaacggaagagtgatcgagaagacactgtacaacagaagaacccggcaggatgagcctgccctgttcgtggccctgaccttcgagcggcgggaggtcctggactcctccaatatcaaaccaatgaacctgatcggcgtggcaagaggcgaaaacatccccgccgtgatcgccctgaccgaccccgagggctgcccactgagccggtttaaggatagcctgggaaacccaacccacatcctgagaatcggcgagagctataaggagaagcagcggaccatccaggccaagaaggaggtggagcagcggagagccggcggctacagccggaagtacgccagcaaagccaagaatctggcagacgatatggtgagaaacaccgctagagatctgctgtactacgccgtgacccaggatgccatgctgatcttcgccaacctgagccggggcttcggccggcagggcaagcggaccttcatggccgagagacagtacacacggatggaggactggctgaccgccaagctggcctacgagggcctgagcaagacctacctgtccaagacactggcccagtacacctccaagacatgcagcaactgtgggtttaccatcaccagcgccgactacgacagggtgctggagaagctgaagaagacagcaacaggctggatgaccacaattaacggcaaggagctgaaggtggagggccagattacctactacaacagatacaagagacagaacgtagtcaaggacctgtccgtcgagctggatagactgagcgaagaatctgtgaacaacgacatctcctcctggacaaagggcagaagcggagaagctctgagcctcctgaagaaaagattctcccatagacccgtgcaggagaagttcgtgtgcctgaactgcggcttcgagacacacgcagccgagcaagccgccctgaacatcgccagatcctggctgttcctgcggagccaggagtacaagaaataccagacaaacaagacaaccggcaacaccgataagagagccttcgtcgagacctggcagtccttttaccggaagaagcttaaggaggtgtggaaacctgccgtgcggtctggcggatctggcggaggctccagcaacaagctggtgagcttcgacgacgtggccgtggagttcagctgggaggagtggcaggagctggacatcagccagaggaccctgtacagggacgtgatgctggagacctacagcatgctggtgagcctgggccacaccggccccaagccccagctgatcgtgaagctggagcaggacgaggagagctacatgagggaggccagcgacaagaacttcagcgacgtgcagaagatgaagcacggcggcccaagcagcggcgcccctcctcccagcggcggcagcccagccggctccccaacctctaccgaggagggcacctctgagtccgccacccccgagagcggccctggcacctccaccgagcccagcgagggcagcgcacccggcagccctgccggcagccccacctccacagaggagggaaccagcaccgagcccagcgaaggcagcgccccaggcaccagcaccgagcctagtgagcaggagattaaacggatcaacaagatcagaagaagacttgtgaaagacagcaacaccaagaaggccggcaagacaggccccatgaaaaccctgctggttagagtgatgacacccgatctgagagagcggctggaaaacctgagaaagaagcctgaaaatatcccccagcccatcagcaatacatctagagccaacctgaataagctgctgaccgattacaccgaaatgaagaaggcgatcctgcatgtgtactgggaagagttccagaaggaccctgtgggcctgatgagccgggtggcccagcctgccagcaagaagatcgatcagaacaagctgaaacctgagatggacgagaagggcaacctgaccaccgccggctttgcctgctctcagtgtggccagcccctgttcgtgtacaagctggagcaggtgtctgagaagggcaaggcttacaccaactacttcggacggtgcaatgtggccgagcacgaaaagctgatcctgctggcccagctgaagcccgagaaggatagcgacgaagccgtgacatatagcctgggaaagtttgggcagagggccctggatttctacagcattcatgtgaccaaggagtccacccaccccgtgaagcccctggcccagatcgccggaaacagatacgcctccggacctgtgggaaaggccctgagcgacgcatgtatgggcacaatcgcctccttcctgtctaagtaccaggacatcatcatcgaacaccagaaggtggtgaagggcaaccagaagagactggagagcctgcgggagctggccggcaaggaaaacctggaataccctagcgtgaccctgccacctcagcctcacaccaaggagggcgttgatgcctacaacgaagtgatcgcccgggtgcgaatgtgggtgaacctgaacctgtggcagaagctgaagctaagcagagatgatgccaagcctctgctgagactgaagggattcccttcctttcctctggtcgagagacaggccaacgaagtggactggtgggacatggtgtgtaacgtgaagaagctgatcaacgagaaaaaggaggatggcaaggtgttttggcagaatctggctggctacaagagacaggaagccctgagaccatacctgagcagcgaggaagatcggaagaagggaaagaaattcgctcggtaccagctgggcgacctgctgctgcacctggaaaagaagcacggcgaggactggggaaaggtgtacgacgaggcctgggagcggattgacaagaaagtggaaggcctgagcaagcacatcaagctggaagaggaacggagaagcgaggacgcccagagcaaggccgccctgaccgactggctgcgggctaaggccagcttcgtgatcgagggcctgaaggaggccgacaaggacgagttctgcagatgcgagctgaagctgcagaagtggtacggggacctgcggggaaagcccttcgccatcgaagccgagaacagcatcctggacatcagcggcttcagcaagcagtacaactgtgccttcatctggcagaaggacggcgtgaagaagctgaacctgtacctgatcatcaactacttcaagggcggcaagctgcggttcaagaagatcaaacctgaagccttcgaagccaacagattctacaccgtgatcaacaaaaagagcggcgagatcgtgcccatggaggtgaacttcaacttcgacgaccccaacctgatcatcctgcctctggcctttggcaagagacagggcagagaattcatctggaacgacctgctgtccctggaaaccggcagcctgaagctggccaacggaagagtgatcgagaagacactgtacaacagaagaacccggcaggatgagcctgccctgttcgtggccctgaccttcgagcggcgggaggtcctggactcctccaatatcaaaccaatgaacctgatcggcgtggcaagaggcgaaaacatccccgccgtgatcgccctgaccgaccccgagggctgcccactgagccggtttaaggatagcctgggaaacccaacccacatcctgagaatcggcgagagctataaggagaagcagcggaccatccaggccaagaaggaggtggagcagcggagagccggcggctacagccggaagtacgccagcaaagccaagaatctggcagacgatatggtgagaaacaccgctagagatctgctgtactacgccgtgacccaggatgccatgctgatcttcgccaacctgagccggggcttcggccggcagggcaagcggaccttcatggccgagagacagtacacacggatggaggactggctgaccgccaagctggcctacgagggcctgagcaagacctacctgtccaagacactggcccagtacacctccaagacatgcagcaactgtgggtttaccatcaccagcgccgactacgacagggtgctggagaagctgaagaagacagcaacaggctggatgaccacaattaacggcaaggagctgaaggtggagggccagattacctactacaacagatacaagagacagaacgtagtcaaggacctgtccgtcgagctggatagactgagcgaagaatctgtgaacaacgacatctcctcctggacaaagggcagaagcggagaagctctgagcctcctgaagaaaagattctcccatagacccgtgcaggagaagttcgtgtgcctgaactgcggcttcgagacacacgcagccgagcaagccgccctgaacatcgccagatcctggctgttcctgcggagccaggagtacaagaaataccagacaaacaagacaaccggcaacaccgataagagagccttcgtcgagacctggcagtccttttaccggaagaagcttaaggaggtgtggaaacctgccgtgcggtctggcggatctggcggaggctcctagcaacaagctggtgagcttcgacgacgtggccgtggagttcagctgggaggagtggcaggagctggacatcagccagaggaccctgtacagggacgtgatgctggagacctacagcatgctggtgagcctgggccacaccggccccaagccccagctgatcgtgaagctggagcaggacgaggagagctacatgagggaggccagcgacaagaacttcagcgacgtgcagaagatgaagcacggatctggctccggcagcggccccaagaaaaagagaaaagtctaagctgccttctgcggggcttgccttctggccatgcccttcttctctcccttgcacctgtacctcttggtctttgaataaagcctgagtaggaaggctagcaaaaaaaaaaaaaaaaaaaaaaaaaaaaaaaaaaaaaaaaaaaaaaaaaaaaaaaaaaaaaaaaaaaaaaaaaaaaaaaa

SEQ ID NO: 15831 - RNA, 9485 nt, synthetic construct
  source 1..9485: mol_type = other RNA
aggaaataagagagaaaagaagagtaagaagaaatataagagccaccatggcccctaagaagaagcgtaaagtgagccggatggaacgcctcgtctacgaggtgcggcagaagtgcagaaacatcgaggacatctgcatctcctgcggatctctgaacgtgaccctggagcacccactgttcatcggcggcatgtgccagaactgtaaaaactgttttctggagtgtgcctatcaatacgacgatgacggctaccagagctactgcaccatctgttgcggcggaagagaggtgctgatgtgtggaaataacaactgctgccggtgcttctgcgtggaatgcgtggacctgctggtgggccccggcgccgcccaggccgctattaaggaagatccttggaactgctacatgtgcggccacaagggcacatacggcctgctgagacggagagaggactggcctagcagactgcagatgttcttcgccaataaccacgaccaggagttcgacccccctaaggtgtaccctcccgtccccgccgagaagagaaagcccatccgggtcctgagcctgttcgatggcatcgccaccggtctgctggtgctgaaggacctgggcatccaggtggataggtacattgcctccgaggtgtgcgaggactccatcaccgtgggaatggtgcgtcatcagggcaagatcatgtacgtgggcgacgtgcggagcgtgacacagaagcatatccaggagtggggccctttcgacctggtgatcggcggcagcccttgcaatgacctgagcatcgtgaacccagcccggaagggcctgtacgagggaaccggcagactgttcttcgagttttacagactgctgcacgacgcccggcctaaggaaggcgacgaccggcccttcttttggctgttcgagaatgtggtggccatgggagtcagcgacaagcgggatattagccggttcctggagagcaaccccgtgatgatcgatgccaaggaagtgagcgccgcccaccgggccagatacttctggggcaatctgcctggcatgaacagacccctggccagcaccgtgaacgacaagctggagctgcaggagtgcctggagcacggccggatcgccaagttcagcaaggtgagaaccatcaccacccgaagcaacagcatcaaacaaggcaaggaccagcactttcctgtgttcatgaacgagaaggaggacatcctgtggtgtaccgagatggagagagtgttcgggttcccagtccactacacagatgtcagcaacatgtctagactggccagacagagactgctgggaagaagctggtccgtccctgtgatcagacacctgttcgcccctctgaaggagtacttcgcctgcgtgagcagcggcaacagcaacgccaacagccggggccccagcttctctagcggcctggtgccactgtccctgagagggagccacatgggccccatggagatctacaaaaccgtgagcgcctggaagcggcagcctgtgcgcgtgctgagcctgtttcggaatatcgataaagtcctgaaaagcctgggattcctggagagcggctctggctccggcggtggcaccctgaagtacgtggaggatgtgacaaacgtggtcagacgggatgtggagaagtggggccccttcgatctggtgtacggcagcacccaacccctgggcagctcttgtgaccggtgccctggctggtacatgtttcagttccaccggatcctgcagtacgccctgccgagacaggagtcccagcggccattcttttggattttcatggacaacttgctgctgaccgaggatgaccaggaaactaccactcggttcctgcagaccgaagccgtgaccctgcaggacgtgagaggccgggactaccagaacgccatgcgggtgtggtccaacatccctggactgaaaagcaagcacgcacctctgacccctaaagaagaggagtacctgcaggcccaggtgcggagcagaagcaagctggacgcccctaaggtggatctgctggtgaagaattgcctcctgcccctgagagagtacttcaagtatttcagccagaatagtctgcccctgggaggcagcggcggcggcgccctggtgacatttgaggacgtcgccgtgcggttcacccaggaggaatgggctctgctggatccttctcagaaaatcctgtaccgggacgtgatgagagagacataccggaatctgacctccgtgggcatcaactgggaatgttgggaccttgaagcctgcttcagaagcctgggaagaaacctgagagtgcaggtggtgaagagaaagtgcgagctgaccaacagcggcccctgcgccgagggcggcccaagcagcggcgcccctcctcccagcggcggcagcccagccggctccccaacctctaccgaggagggcacctctgagtccgccacccccgagagcggccctggcacctccaccgagcccagcgagggcagcgcacccggcagccctgccggcagccccacctccacagaggagggaaccagcaccgagcccagcgaaggcagcgccccaggcaccagcaccgagcctagtgagcaggagattaaacggatcaacaagatcagaagaagacttgtgaaagacagcaacaccaagaaggccggcaagacaggccccatgaaaaccctgctggttagagtgatgacacccgatctgagagagcggctggaaaacctgagaaagaagcctgaaaatatcccccagcccatcagcaatacatctagagccaacctgaataagctgctgaccgattacaccgaaatgaagaaggcgatcctgcatgtgtactgggaagagttccagaaggaccctgtgggcctgatgagccgggtggcccagcctgccagcaagaagatcgatcagaacaagctgaaacctgagatggacgagaagggcaacctgaccaccgccggctttgcctgctctcagtgtggccagcccctgttcgtgtacaagctggagcaggtgtctgagaagggcaaggcttacaccaactacttcggacggtgcaatgtggccgagcacgaaaagctgatcctgctggcccagctgaagcccgagaaggatagcgacgaagccgtgacatatagcctgggaaagtttgggcagagggccctggatttctacagcattcatgtgaccaaggagtccacccaccccgtgaagcccctggcccagatcgccggaaacagatacgcctccggacctgtgggaaaggccctgagcgacgcatgtatgggcacaatcgcctccttcctgtctaagtaccaggacatcatcatcgaacaccagaaggtggtgaagggcaaccagaagagactggagagcctgcgggagctggccggcaaggaaaacctggaataccctagcgtgaccctgccacctcagcctcacaccaaggagggcgttgatgcctacaacgaagtgatcgcccgggtgcgaatgtgggtgaacctgaacctgtggcagaagctgaagctaagcagagatgatgccaagcctctgctgagactgaagggattcccttcctttcctctggtcgagagacaggccaacgaagtggactggtgggacatggtgtgtaacgtgaagaagctgatcaacgagaaaaaggaggatggcaaggtgttttggcagaatctggctggctacaagagacaggaagccctgagaccatacctgagcagcgaggaagatcggaagaagggaaagaaattcgctcggtaccagctgggcgacctgctgctgcacctggaaaagaagcacggcgaggactggggaaaggtgtacgacgaggcctgggagcggattgacaagaaagtggaaggcctgagcaagcacatcaagctggaagaggaacggagaagcgaggacgcccagagcaaggccgccctgaccgactggctgcgggctaaggccagcttcgtgatcgagggcctgaaggaggccgacaaggacgagttctgcagatgcgagctgaagctgcagaagtggtacggggacctgcggggaaagcccttcgccatcgaagccgagaacagcatcctggacatcagcggcttcagcaagcagtacaactgtgccttcatctggcagaaggacggcgtgaagaagctgaacctgtacctgatcatcaactacttcaagggcggcaagctgcggttcaagaagatcaaacctgaagccttcgaagccaacagattctacaccgtgatcaacaaaaagagcggcgagatcgtgcccatggaggtgaacttcaacttcgacgaccccaacctgatcatcctgcctctggcctttggcaagagacagggcagagaattcatctggaacgacctgctgtccctggaaaccggcagcctgaagctggccaacggaagagtgatcgagaagacactgtacaacagaagaacccggcaggatgagcctgccctgttcgtggccctgaccttcgagcggcgggaggtcctggactcctccaatatcaaaccaatgaacctgatcggcgtggcaagaggcgaaaacatccccgccgtgatcgccctgaccgaccccgagggctgcccactgagccggtttaaggatagcctgggaaacccaacccacatcctgagaatcggcgagagctataaggagaagcagcggaccatccaggccaagaaggaggtggagcagcggagagccggcggctacagccggaagtacgccagcaaagccaagaatctggcagacgatatggtgagaaacaccgctagagatctgctgtactacgccgtgacccaggatgccatgctgatcttcgccaacctgagccggggcttcggccggcagggcaagcggaccttcatggccgagagacagtacacacggatggaggactggctgaccgccaagctggcctacgagggcctgagcaagacctacctgtccaagacactggcccagtacacctccaagacatgcagcaactgtgggtttaccatcaccagcgccgactacgacagggtgctggagaagctgaagaagacagcaacaggctggatgaccacaattaacggcaaggagctgaaggtggagggccagattacctactacaacagatacaagagacagaacgtagtcaaggacctgtccgtcgagctggatagactgagcgaagaatctgtgaacaacgacatctcctcctggacaaagggcagaagcggagaagctctgagcctcctgaagaaaagattctcccatagacccgtgcaggagaagttcgtgtgcctgaactgcggcttcgagacacacgcagccgagcaagccgccctgaacatcgccagatcctggctgttcctgcggagccaggagtacaagaaataccagacaaacaagacaaccggcaacaccgataagagagccttcgtcgagacctggcagtccttttaccggaagaagcttaaggaggtgtggaaacctgccgtgcggtctggcggatctggcggaggctccatgaccaagttccaggaggccgtgaccttcaaggacgtggccgtggccttcaccgaggaggagctgggcctgctggacagcgcccagaggaagctgtacagggacgtgatgctggagaacttcaggaacctggtgagcgtgggccaccagagcttcaagcccgacatgatcagccagctggagagggaggagaagctgtggatgaaggagctgcagacccagaggggcaagcacagcggcttcggcggcccaagcagcggcgcccctcctcccagcggcggcagcccagccggctccccaacctctaccgaggagggcacctctgagtccgccacccccgagagcggccctggcacctccaccgagcccagcgagggcagcgcacccggcagccctgccggcagccccacctccacagaggagggaaccagcaccgagcccagcgaaggcagcgccccaggcaccagcaccgagcctagtgagcaggagattaaacggatcaacaagatcagaagaagacttgtgaaagacagcaacaccaagaaggccggcaagacaggccccatgaaaaccctgctggttagagtgatgacacccgatctgagagagcggctggaaaacctgagaaagaagcctgaaaatatcccccagcccatcagcaatacatctagagccaacctgaataagctgctgaccgattacaccgaaatgaagaaggcgatcctgcatgtgtactgggaagagttccagaaggaccctgtgggcctgatgagccgggtggcccagcctgccagcaagaagatcgatcagaacaagctgaaacctgagatggacgagaagggcaacctgaccaccgccggctttgcctgctctcagtgtggccagcccctgttcgtgtacaagctggagcaggtgtctgagaagggcaaggcttacaccaactacttcggacggtgcaatgtggccgagcacgaaaagctgatcctgctggcccagctgaagcccgagaaggatagcgacgaagccgtgacatatagcctgggaaagtttgggcagagggccctggatttctacagcattcatgtgaccaaggagtccacccaccccgtgaagcccctggcccagatcgccggaaacagatacgcctccggacctgtgggaaaggccctgagcgacgcatgtatgggcacaatcgcctccttcctgtctaagtaccaggacatcatcatcgaacaccagaaggtggtgaagggcaaccagaagagactggagagcctgcgggagctggccggcaaggaaaacctggaataccctagcgtgaccctgccacctcagcctcacaccaaggagggcgttgatgcctacaacgaagtgatcgcccgggtgcgaatgtgggtgaacctgaacctgtggcagaagctgaagctaagcagagatgatgccaagcctctgctgagactgaagggattcccttcctttcctctggtcgagagacaggccaacgaagtggactggtgggacatggtgtgtaacgtgaagaagctgatcaacgagaaaaaggaggatggcaaggtgttttggcagaatctggctggctacaagagacaggaagccctgagaccatacctgagcagcgaggaagatcggaagaagggaaagaaattcgctcggtaccagctgggcgacctgctgctgcacctggaaaagaagcacggcgaggactggggaaaggtgtacgacgaggcctgggagcggattgacaagaaagtggaaggcctgagcaagcacatcaagctggaagaggaacggagaagcgaggacgcccagagcaaggccgccctgaccgactggctgcgggctaaggccagcttcgtgatcgagggcctgaaggaggccgacaaggacgagttctgcagatgcgagctgaagctgcagaagtggtacggggacctgcggggaaagcccttcgccatcgaagccgagaacagcatcctggacatcagcggcttcagcaagcagtacaactgtgccttcatctggcagaaggacggcgtgaagaagctgaacctgtacctgatcatcaactacttcaagggcggcaagctgcggttcaagaagatcaaacctgaagccttcgaagccaacagattctacaccgtgatcaacaaaaagagcggcgagatcgtgcccatggaggtgaacttcaacttcgacgaccccaacctgatcatcctgcctctggcctttggcaagagacagggcagagaattcatctggaacgacctgctgtccctggaaaccggcagcctgaagctggccaacggaagagtgatcgagaagacactgtacaacagaagaacccggcaggatgagcctgccctgttcgtggccctgaccttcgagcggcgggaggtcctggactcctccaatatcaaaccaatgaacctgatcggcgtggcaagaggcgaaaacatccccgccgtgatcgccctgaccgaccccgagggctgcccactgagccggtttaaggatagcctgggaaacccaacccacatcctgagaatcggcgagagctataaggagaagcagcggaccatccaggccaagaaggaggtggagcagcggagagccggcggctacagccggaagtacgccagcaaagccaagaatctggcagacgatatggtgagaaacaccgctagagatctgctgtactacgccgtgacccaggatgccatgctgatcttcgccaacctgagccggggcttcggccggcagggcaagcggaccttcatggccgagagacagtacacacggatggaggactggctgaccgccaagctggcctacgagggcctgagcaagacctacctgtccaagacactggcccagtacacctccaagacatgcagcaactgtgggtttaccatcaccagcgccgactacgacagggtgctggagaagctgaagaagacagcaacaggctggatgaccacaattaacggcaaggagctgaaggtggagggccagattacctactacaacagatacaagagacagaacgtagtcaaggacctgtccgtcgagctggatagactgagcgaagaatctgtgaacaacgacatctcctcctggacaaagggcagaagcggagaagctctgagcctcctgaagaaaagattctcccatagacccgtgcaggagaagttcgtgtgcctgaactgcggcttcgagacacacgcagccgagcaagccgccctgaacatcgccagatcctggctgttcctgcggagccaggagtacaagaaataccagacaaacaagacaaccggcaacaccgataagagagccttcgtcgagacctggcagtccttttaccggaagaagcttaaggaggtgtggaaacctgccgtgcggtctggcggatctggcggaggctcctatgaccaagttccaggaggccgtgaccttcaaggacgtggccgtggccttcaccgaggaggagctgggcctgctggacagcgcccagaggaagctgtacagggacgtgatgctggagaacttcaggaacctggtgagcgtgggccaccagagcttcaagcccgacatgatcagccagctggagagggaggagaagctgtggatgaaggagctgcagacccagaggggcaagcacagcggcttcggatctggctccggcagcggccccaagaaaaagagaaaagtctaagctgccttctgcggggcttgccttctggccatgcccttcttctctcccttgcacctgtacctcttggtctttgaataaagcctgagtaggaaggctagcaaaaaaaaaaaaaaaaaaaaaaaaaaaaaaaaaaaaaaaaaaaaaaaaaaaaaaaaaaaaaaaaaaaaaaaaaaaaaaaa

SEQ ID NO: 15832 - RNA, 9485 nt, synthetic construct
  source 1..9485: mol_type = other RNA
aggaaataagagagaaaagaagagtaagaagaaatataagagccaccatggcccctaagaagaagcgtaaagtgagccggatggaacgcctcgtctacgaggtgcggcagaagtgcagaaacatcgaggacatctgcatctcctgcggatctctgaacgtgaccctggagcacccactgttcatcggcggcatgtgccagaactgtaaaaactgttttctggagtgtgcctatcaatacgacgatgacggctaccagagctactgcaccatctgttgcggcggaagagaggtgctgatgtgtggaaataacaactgctgccggtgcttctgcgtggaatgcgtggacctgctggtgggccccggcgccgcccaggccgctattaaggaagatccttggaactgctacatgtgcggccacaagggcacatacggcctgctgagacggagagaggactggcctagcagactgcagatgttcttcgccaataaccacgaccaggagttcgacccccctaaggtgtaccctcccgtccccgccgagaagagaaagcccatccgggtcctgagcctgttcgatggcatcgccaccggtctgctggtgctgaaggacctgggcatccaggtggataggtacattgcctccgaggtgtgcgaggactccatcaccgtgggaatggtgcgtcatcagggcaagatcatgtacgtgggcgacgtgcggagcgtgacacagaagcatatccaggagtggggccctttcgacctggtgatcggcggcagcccttgcaatgacctgagcatcgtgaacccagcccggaagggcctgtacgagggaaccggcagactgttcttcgagttttacagactgctgcacgacgcccggcctaaggaaggcgacgaccggcccttcttttggctgttcgagaatgtggtggccatgggagtcagcgacaagcgggatattagccggttcctggagagcaaccccgtgatgatcgatgccaaggaagtgagcgccgcccaccgggccagatacttctggggcaatctgcctggcatgaacagacccctggccagcaccgtgaacgacaagctggagctgcaggagtgcctggagcacggccggatcgccaagttcagcaaggtgagaaccatcaccacccgaagcaacagcatcaaacaaggcaaggaccagcactttcctgtgttcatgaacgagaaggaggacatcctgtggtgtaccgagatggagagagtgttcgggttcccagtccactacacagatgtcagcaacatgtctagactggccagacagagactgctgggaagaagctggtccgtccctgtgatcagacacctgttcgcccctctgaaggagtacttcgcctgcgtgagcagcggcaacagcaacgccaacagccggggccccagcttctctagcggcctggtgccactgtccctgagagggagccacatgggccccatggagatctacaaaaccgtgagcgcctggaagcggcagcctgtgcgcgtgctgagcctgtttcggaatatcgataaagtcctgaaaagcctgggattcctggagagcggctctggctccggcggtggcaccctgaagtacgtggaggatgtgacaaacgtggtcagacgggatgtggagaagtggggccccttcgatctggtgtacggcagcacccaacccctgggcagctcttgtgaccggtgccctggctggtacatgtttcagttccaccggatcctgcagtacgccctgccgagacaggagtcccagcggccattcttttggattttcatggacaacttgctgctgaccgaggatgaccaggaaactaccactcggttcctgcagaccgaagccgtgaccctgcaggacgtgagaggccgggactaccagaacgccatgcgggtgtggtccaacatccctggactgaaaagcaagcacgcacctctgacccctaaagaagaggagtacctgcaggcccaggtgcggagcagaagcaagctggacgcccctaaggtggatctgctggtgaagaattgcctcctgcccctgagagagtacttcaagtatttcagccagaatagtctgcccctgggaggcagcggcggcggcgccctggtgacatttgaggacgtcgccgtgcggttcacccaggaggaatgggctctgctggatccttctcagaaaatcctgtaccgggacgtgatgagagagacataccggaatctgacctccgtgggcatcaactgggaatgttgggaccttgaagcctgcttcagaagcctgggaagaaacctgagagtgcaggtggtgaagagaaagtgcgagctgaccaacagcggcccctgcgccgagggcggcccaagcagcggcgcccctcctcccagcggcggcagcccagccggctccccaacctctaccgaggagggcacctctgagtccgccacccccgagagcggccctggcacctccaccgagcccagcgagggcagcgcacccggcagccctgccggcagccccacctccacagaggagggaaccagcaccgagcccagcgaaggcagcgccccaggcaccagcaccgagcctagtgagcaggagattaaacggatcaacaagatcagaagaagacttgtgaaagacagcaacaccaagaaggccggcaagacaggccccatgaaaaccctgctggttagagtgatgacacccgatctgagagagcggctggaaaacctgagaaagaagcctgaaaatatcccccagcccatcagcaatacatctagagccaacctgaataagctgctgaccgattacaccgaaatgaagaaggcgatcctgcatgtgtactgggaagagttccagaaggaccctgtgggcctgatgagccgggtggcccagcctgccagcaagaagatcgatcagaacaagctgaaacctgagatggacgagaagggcaacctgaccaccgccggctttgcctgctctcagtgtggccagcccctgttcgtgtacaagctggagcaggtgtctgagaagggcaaggcttacaccaactacttcggacggtgcaatgtggccgagcacgaaaagctgatcctgctggcccagctgaagcccgagaaggatagcgacgaagccgtgacatatagcctgggaaagtttgggcagagggccctggatttctacagcattcatgtgaccaaggagtccacccaccccgtgaagcccctggcccagatcgccggaaacagatacgcctccggacctgtgggaaaggccctgagcgacgcatgtatgggcacaatcgcctccttcctgtctaagtaccaggacatcatcatcgaacaccagaaggtggtgaagggcaaccagaagagactggagagcctgcgggagctggccggcaaggaaaacctggaataccctagcgtgaccctgccacctcagcctcacaccaaggagggcgttgatgcctacaacgaagtgatcgcccgggtgcgaatgtgggtgaacctgaacctgtggcagaagctgaagctaagcagagatgatgccaagcctctgctgagactgaagggattcccttcctttcctctggtcgagagacaggccaacgaagtggactggtgggacatggtgtgtaacgtgaagaagctgatcaacgagaaaaaggaggatggcaaggtgttttggcagaatctggctggctacaagagacaggaagccctgagaccatacctgagcagcgaggaagatcggaagaagggaaagaaattcgctcggtaccagctgggcgacctgctgctgcacctggaaaagaagcacggcgaggactggggaaaggtgtacgacgaggcctgggagcggattgacaagaaagtggaaggcctgagcaagcacatcaagctggaagaggaacggagaagcgaggacgcccagagcaaggccgccctgaccgactggctgcgggctaaggccagcttcgtgatcgagggcctgaaggaggccgacaaggacgagttctgcagatgcgagctgaagctgcagaagtggtacggggacctgcggggaaagcccttcgccatcgaagccgagaacagcatcctggacatcagcggcttcagcaagcagtacaactgtgccttcatctggcagaaggacggcgtgaagaagctgaacctgtacctgatcatcaactacttcaagggcggcaagctgcggttcaagaagatcaaacctgaagccttcgaagccaacagattctacaccgtgatcaacaaaaagagcggcgagatcgtgcccatggaggtgaacttcaacttcgacgaccccaacctgatcatcctgcctctggcctttggcaagagacagggcagagaattcatctggaacgacctgctgtccctggaaaccggcagcctgaagctggccaacggaagagtgatcgagaagacactgtacaacagaagaacccggcaggatgagcctgccctgttcgtggccctgaccttcgagcggcgggaggtcctggactcctccaatatcaaaccaatgaacctgatcggcgtggcaagaggcgaaaacatccccgccgtgatcgccctgaccgaccccgagggctgcccactgagccggtttaaggatagcctgggaaacccaacccacatcctgagaatcggcgagagctataaggagaagcagcggaccatccaggccaagaaggaggtggagcagcggagagccggcggctacagccggaagtacgccagcaaagccaagaatctggcagacgatatggtgagaaacaccgctagagatctgctgtactacgccgtgacccaggatgccatgctgatcttcgccaacctgagccggggcttcggccggcagggcaagcggaccttcatggccgagagacagtacacacggatggaggactggctgaccgccaagctggcctacgagggcctgagcaagacctacctgtccaagacactggcccagtacacctccaagacatgcagcaactgtgggtttaccatcaccagcgccgactacgacagggtgctggagaagctgaagaagacagcaacaggctggatgaccacaattaacggcaaggagctgaaggtggagggccagattacctactacaacagatacaagagacagaacgtagtcaaggacctgtccgtcgagctggatagactgagcgaagaatctgtgaacaacgacatctcctcctggacaaagggcagaagcggagaagctctgagcctcctgaagaaaagattctcccatagacccgtgcaggagaagttcgtgtgcctgaactgcggcttcgagacacacgcagccgagcaagccgccctgaacatcgccagatcctggctgttcctgcggagccaggagtacaagaaataccagacaaacaagacaaccggcaacaccgataagagagccttcgtcgagacctggcagtccttttaccggaagaagcttaaggaggtgtggaaacctgccgtgcggtctggcggatctggcggaggctccttccagggcagcctgagcatcgaggacgtgaccgtgggcttcacccaggaggagtggcagcacctggaccccgcccagaggaccctgtacagggacgtgatgctggagaactacagccacctggtgagcgtgggctactgcatccccaagcccgaggtgatcttcaagctggagaggggcgagcagctgtggatcctggaggaggagagcagcagccagagccaccccgaggtgtgcaaggtgggcggcccaagcagcggcgcccctcctcccagcggcggcagcccagccggctccccaacctctaccgaggagggcacctctgagtccgccacccccgagagcggccctggcacctccaccgagcccagcgagggcagcgcacccggcagccctgccggcagccccacctccacagaggagggaaccagcaccgagcccagcgaaggcagcgccccaggcaccagcaccgagcctagtgagcaggagattaaacggatcaacaagatcagaagaagacttgtgaaagacagcaacaccaagaaggccggcaagacaggccccatgaaaaccctgctggttagagtgatgacacccgatctgagagagcggctggaaaacctgagaaagaagcctgaaaatatcccccagcccatcagcaatacatctagagccaacctgaataagctgctgaccgattacaccgaaatgaagaaggcgatcctgcatgtgtactgggaagagttccagaaggaccctgtgggcctgatgagccgggtggcccagcctgccagcaagaagatcgatcagaacaagctgaaacctgagatggacgagaagggcaacctgaccaccgccggctttgcctgctctcagtgtggccagcccctgttcgtgtacaagctggagcaggtgtctgagaagggcaaggcttacaccaactacttcggacggtgcaatgtggccgagcacgaaaagctgatcctgctggcccagctgaagcccgagaaggatagcgacgaagccgtgacatatagcctgggaaagtttgggcagagggccctggatttctacagcattcatgtgaccaaggagtccacccaccccgtgaagcccctggcccagatcgccggaaacagatacgcctccggacctgtgggaaaggccctgagcgacgcatgtatgggcacaatcgcctccttcctgtctaagtaccaggacatcatcatcgaacaccagaaggtggtgaagggcaaccagaagagactggagagcctgcgggagctggccggcaaggaaaacctggaataccctagcgtgaccctgccacctcagcctcacaccaaggagggcgttgatgcctacaacgaagtgatcgcccgggtgcgaatgtgggtgaacctgaacctgtggcagaagctgaagctaagcagagatgatgccaagcctctgctgagactgaagggattcccttcctttcctctggtcgagagacaggccaacgaagtggactggtgggacatggtgtgtaacgtgaagaagctgatcaacgagaaaaaggaggatggcaaggtgttttggcagaatctggctggctacaagagacaggaagccctgagaccatacctgagcagcgaggaagatcggaagaagggaaagaaattcgctcggtaccagctgggcgacctgctgctgcacctggaaaagaagcacggcgaggactggggaaaggtgtacgacgaggcctgggagcggattgacaagaaagtggaaggcctgagcaagcacatcaagctggaagaggaacggagaagcgaggacgcccagagcaaggccgccctgaccgactggctgcgggctaaggccagcttcgtgatcgagggcctgaaggaggccgacaaggacgagttctgcagatgcgagctgaagctgcagaagtggtacggggacctgcggggaaagcccttcgccatcgaagccgagaacagcatcctggacatcagcggcttcagcaagcagtacaactgtgccttcatctggcagaaggacggcgtgaagaagctgaacctgtacctgatcatcaactacttcaagggcggcaagctgcggttcaagaagatcaaacctgaagccttcgaagccaacagattctacaccgtgatcaacaaaaagagcggcgagatcgtgcccatggaggtgaacttcaacttcgacgaccccaacctgatcatcctgcctctggcctttggcaagagacagggcagagaattcatctggaacgacctgctgtccctggaaaccggcagcctgaagctggccaacggaagagtgatcgagaagacactgtacaacagaagaacccggcaggatgagcctgccctgttcgtggccctgaccttcgagcggcgggaggtcctggactcctccaatatcaaaccaatgaacctgatcggcgtggcaagaggcgaaaacatccccgccgtgatcgccctgaccgaccccgagggctgcccactgagccggtttaaggatagcctgggaaacccaacccacatcctgagaatcggcgagagctataaggagaagcagcggaccatccaggccaagaaggaggtggagcagcggagagccggcggctacagccggaagtacgccagcaaagccaagaatctggcagacgatatggtgagaaacaccgctagagatctgctgtactacgccgtgacccaggatgccatgctgatcttcgccaacctgagccggggcttcggccggcagggcaagcggaccttcatggccgagagacagtacacacggatggaggactggctgaccgccaagctggcctacgagggcctgagcaagacctacctgtccaagacactggcccagtacacctccaagacatgcagcaactgtgggtttaccatcaccagcgccgactacgacagggtgctggagaagctgaagaagacagcaacaggctggatgaccacaattaacggcaaggagctgaaggtggagggccagattacctactacaacagatacaagagacagaacgtagtcaaggacctgtccgtcgagctggatagactgagcgaagaatctgtgaacaacgacatctcctcctggacaaagggcagaagcggagaagctctgagcctcctgaagaaaagattctcccatagacccgtgcaggagaagttcgtgtgcctgaactgcggcttcgagacacacgcagccgagcaagccgccctgaacatcgccagatcctggctgttcctgcggagccaggagtacaagaaataccagacaaacaagacaaccggcaacaccgataagagagccttcgtcgagacctggcagtccttttaccggaagaagcttaaggaggtgtggaaacctgccgtgcggtctggcggatctggcggaggctcctttccagggcagcctgagcatcgaggacgtgaccgtgggcttcacccaggaggagtggcagcacctggaccccgcccagaggaccctgtacagggacgtgatgctggagaactacagccacctggtgagcgtgggctactgcatccccaagcccgaggtgatcttcaagctggagaggggcgagcagctgtggatcctggaggaggagagcagcagccagagccaccccgaggtgtgcaaggtgggatctggctccggcagcggccccaagaaaaagagaaaagtctaagctgccttctgcggggcttgccttctggccatgcccttcttctctcccttgcacctgtacctcttggtctttgaataaagcctgagtaggaaggctagcaaaaaaaaaaaaaaaaaaaaaaaaaaaaaaaaaaaaaaaaaaaaaaaaaaaaaaaaaaaaaaaaaaaaaaaaaaaaaaaa

SEQ ID NO: 15833 - RNA, 9485 nt, synthetic construct
  source 1..9485: mol_type = other RNA
aggaaataagagagaaaagaagagtaagaagaaatataagagccaccatggcccctaagaagaagcgtaaagtgagccggatggaacgcctcgtctacgaggtgcggcagaagtgcagaaacatcgaggacatctgcatctcctgcggatctctgaacgtgaccctggagcacccactgttcatcggcggcatgtgccagaactgtaaaaactgttttctggagtgtgcctatcaatacgacgatgacggctaccagagctactgcaccatctgttgcggcggaagagaggtgctgatgtgtggaaataacaactgctgccggtgcttctgcgtggaatgcgtggacctgctggtgggccccggcgccgcccaggccgctattaaggaagatccttggaactgctacatgtgcggccacaagggcacatacggcctgctgagacggagagaggactggcctagcagactgcagatgttcttcgccaataaccacgaccaggagttcgacccccctaaggtgtaccctcccgtccccgccgagaagagaaagcccatccgggtcctgagcctgttcgatggcatcgccaccggtctgctggtgctgaaggacctgggcatccaggtggataggtacattgcctccgaggtgtgcgaggactccatcaccgtgggaatggtgcgtcatcagggcaagatcatgtacgtgggcgacgtgcggagcgtgacacagaagcatatccaggagtggggccctttcgacctggtgatcggcggcagcccttgcaatgacctgagcatcgtgaacccagcccggaagggcctgtacgagggaaccggcagactgttcttcgagttttacagactgctgcacgacgcccggcctaaggaaggcgacgaccggcccttcttttggctgttcgagaatgtggtggccatgggagtcagcgacaagcgggatattagccggttcctggagagcaaccccgtgatgatcgatgccaaggaagtgagcgccgcccaccgggccagatacttctggggcaatctgcctggcatgaacagacccctggccagcaccgtgaacgacaagctggagctgcaggagtgcctggagcacggccggatcgccaagttcagcaaggtgagaaccatcaccacccgaagcaacagcatcaaacaaggcaaggaccagcactttcctgtgttcatgaacgagaaggaggacatcctgtggtgtaccgagatggagagagtgttcgggttcccagtccactacacagatgtcagcaacatgtctagactggccagacagagactgctgggaagaagctggtccgtccctgtgatcagacacctgttcgcccctctgaaggagtacttcgcctgcgtgagcagcggcaacagcaacgccaacagccggggccccagcttctctagcggcctggtgccactgtccctgagagggagccacatgggccccatggagatctacaaaaccgtgagcgcctggaagcggcagcctgtgcgcgtgctgagcctgtttcggaatatcgataaagtcctgaaaagcctgggattcctggagagcggctctggctccggcggtggcaccctgaagtacgtggaggatgtgacaaacgtggtcagacgggatgtggagaagtggggccccttcgatctggtgtacggcagcacccaacccctgggcagctcttgtgaccggtgccctggctggtacatgtttcagttccaccggatcctgcagtacgccctgccgagacaggagtcccagcggccattcttttggattttcatggacaacttgctgctgaccgaggatgaccaggaaactaccactcggttcctgcagaccgaagccgtgaccctgcaggacgtgagaggccgggactaccagaacgccatgcgggtgtggtccaacatccctggactgaaaagcaagcacgcacctctgacccctaaagaagaggagtacctgcaggcccaggtgcggagcagaagcaagctggacgcccctaaggtggatctgctggtgaagaattgcctcctgcccctgagagagtacttcaagtatttcagccagaatagtctgcccctgggaggcagcggcggcggcgccctggtgacatttgaggacgtcgccgtgcggttcacccaggaggaatgggctctgctggatccttctcagaaaatcctgtaccgggacgtgatgagagagacataccggaatctgacctccgtgggcatcaactgggaatgttgggaccttgaagcctgcttcagaagcctgggaagaaacctgagagtgcaggtggtgaagagaaagtgcgagctgaccaacagcggcccctgcgccgagggcggcccaagcagcggcgcccctcctcccagcggcggcagcccagccggctccccaacctctaccgaggagggcacctctgagtccgccacccccgagagcggccctggcacctccaccgagcccagcgagggcagcgcacccggcagccctgccggcagccccacctccacagaggagggaaccagcaccgagcccagcgaaggcagcgccccaggcaccagcaccgagcctagtgagcaggagattaaacggatcaacaagatcagaagaagacttgtgaaagacagcaacaccaagaaggccggcaagacaggccccatgaaaaccctgctggttagagtgatgacacccgatctgagagagcggctggaaaacctgagaaagaagcctgaaaatatcccccagcccatcagcaatacatctagagccaacctgaataagctgctgaccgattacaccgaaatgaagaaggcgatcctgcatgtgtactgggaagagttccagaaggaccctgtgggcctgatgagccgggtggcccagcctgccagcaagaagatcgatcagaacaagctgaaacctgagatggacgagaagggcaacctgaccaccgccggctttgcctgctctcagtgtggccagcccctgttcgtgtacaagctggagcaggtgtctgagaagggcaaggcttacaccaactacttcggacggtgcaatgtggccgagcacgaaaagctgatcctgctggcccagctgaagcccgagaaggatagcgacgaagccgtgacatatagcctgggaaagtttgggcagagggccctggatttctacagcattcatgtgaccaaggagtccacccaccccgtgaagcccctggcccagatcgccggaaacagatacgcctccggacctgtgggaaaggccctgagcgacgcatgtatgggcacaatcgcctccttcctgtctaagtaccaggacatcatcatcgaacaccagaaggtggtgaagggcaaccagaagagactggagagcctgcgggagctggccggcaaggaaaacctggaataccctagcgtgaccctgccacctcagcctcacaccaaggagggcgttgatgcctacaacgaagtgatcgcccgggtgcgaatgtgggtgaacctgaacctgtggcagaagctgaagctaagcagagatgatgccaagcctctgctgagactgaagggattcccttcctttcctctggtcgagagacaggccaacgaagtggactggtgggacatggtgtgtaacgtgaagaagctgatcaacgagaaaaaggaggatggcaaggtgttttggcagaatctggctggctacaagagacaggaagccctgagaccatacctgagcagcgaggaagatcggaagaagggaaagaaattcgctcggtaccagctgggcgacctgctgctgcacctggaaaagaagcacggcgaggactggggaaaggtgtacgacgaggcctgggagcggattgacaagaaagtggaaggcctgagcaagcacatcaagctggaagaggaacggagaagcgaggacgcccagagcaaggccgccctgaccgactggctgcgggctaaggccagcttcgtgatcgagggcctgaaggaggccgacaaggacgagttctgcagatgcgagctgaagctgcagaagtggtacggggacctgcggggaaagcccttcgccatcgaagccgagaacagcatcctggacatcagcggcttcagcaagcagtacaactgtgccttcatctggcagaaggacggcgtgaagaagctgaacctgtacctgatcatcaactacttcaagggcggcaagctgcggttcaagaagatcaaacctgaagccttcgaagccaacagattctacaccgtgatcaacaaaaagagcggcgagatcgtgcccatggaggtgaacttcaacttcgacgaccccaacctgatcatcctgcctctggcctttggcaagagacagggcagagaattcatctggaacgacctgctgtccctggaaaccggcagcctgaagctggccaacggaagagtgatcgagaagacactgtacaacagaagaacccggcaggatgagcctgccctgttcgtggccctgaccttcgagcggcgggaggtcctggactcctccaatatcaaaccaatgaacctgatcggcgtggcaagaggcgaaaacatccccgccgtgatcgccctgaccgaccccgagggctgcccactgagccggtttaaggatagcctgggaaacccaacccacatcctgagaatcggcgagagctataaggagaagcagcggaccatccaggccaagaaggaggtggagcagcggagagccggcggctacagccggaagtacgccagcaaagccaagaatctggcagacgatatggtgagaaacaccgctagagatctgctgtactacgccgtgacccaggatgccatgctgatcttcgccaacctgagccggggcttcggccggcagggcaagcggaccttcatggccgagagacagtacacacggatggaggactggctgaccgccaagctggcctacgagggcctgagcaagacctacctgtccaagacactggcccagtacacctccaagacatgcagcaactgtgggtttaccatcaccagcgccgactacgacagggtgctggagaagctgaagaagacagcaacaggctggatgaccacaattaacggcaaggagctgaaggtggagggccagattacctactacaacagatacaagagacagaacgtagtcaaggacctgtccgtcgagctggatagactgagcgaagaatctgtgaacaacgacatctcctcctggacaaagggcagaagcggagaagctctgagcctcctgaagaaaagattctcccatagacccgtgcaggagaagttcgtgtgcctgaactgcggcttcgagacacacgcagccgagcaagccgccctgaacatcgccagatcctggctgttcctgcggagccaggagtacaagaaataccagacaaacaagacaaccggcaacaccgataagagagccttcgtcgagacctggcagtccttttaccggaagaagcttaaggaggtgtggaaacctgccgtgcggtctggcggatctggcggaggctccagccagggcagcatcaccttcaaggacgtggccgtggacttcacccaggaggagtggtgcctgctggaccacagccagaaggccctgcacctggaggtgatgctggagaacgtgcagaacctgctgagcgtgggcctgcccgtgcccagggagaacttcatcagctgcttccagcagggcaaggccccctacctgctgcagcagaacgaccccaagagcagcagccccgaggccgagaccaacggcggcccaagcagcggcgcccctcctcccagcggcggcagcccagccggctccccaacctctaccgaggagggcacctctgagtccgccacccccgagagcggccctggcacctccaccgagcccagcgagggcagcgcacccggcagccctgccggcagccccacctccacagaggagggaaccagcaccgagcccagcgaaggcagcgccccaggcaccagcaccgagcctagtgagcaggagattaaacggatcaacaagatcagaagaagacttgtgaaagacagcaacaccaagaaggccggcaagacaggccccatgaaaaccctgctggttagagtgatgacacccgatctgagagagcggctggaaaacctgagaaagaagcctgaaaatatcccccagcccatcagcaatacatctagagccaacctgaataagctgctgaccgattacaccgaaatgaagaaggcgatcctgcatgtgtactgggaagagttccagaaggaccctgtgggcctgatgagccgggtggcccagcctgccagcaagaagatcgatcagaacaagctgaaacctgagatggacgagaagggcaacctgaccaccgccggctttgcctgctctcagtgtggccagcccctgttcgtgtacaagctggagcaggtgtctgagaagggcaaggcttacaccaactacttcggacggtgcaatgtggccgagcacgaaaagctgatcctgctggcccagctgaagcccgagaaggatagcgacgaagccgtgacatatagcctgggaaagtttgggcagagggccctggatttctacagcattcatgtgaccaaggagtccacccaccccgtgaagcccctggcccagatcgccggaaacagatacgcctccggacctgtgggaaaggccctgagcgacgcatgtatgggcacaatcgcctccttcctgtctaagtaccaggacatcatcatcgaacaccagaaggtggtgaagggcaaccagaagagactggagagcctgcgggagctggccggcaaggaaaacctggaataccctagcgtgaccctgccacctcagcctcacaccaaggagggcgttgatgcctacaacgaagtgatcgcccgggtgcgaatgtgggtgaacctgaacctgtggcagaagctgaagctaagcagagatgatgccaagcctctgctgagactgaagggattcccttcctttcctctggtcgagagacaggccaacgaagtggactggtgggacatggtgtgtaacgtgaagaagctgatcaacgagaaaaaggaggatggcaaggtgttttggcagaatctggctggctacaagagacaggaagccctgagaccatacctgagcagcgaggaagatcggaagaagggaaagaaattcgctcggtaccagctgggcgacctgctgctgcacctggaaaagaagcacggcgaggactggggaaaggtgtacgacgaggcctgggagcggattgacaagaaagtggaaggcctgagcaagcacatcaagctggaagaggaacggagaagcgaggacgcccagagcaaggccgccctgaccgactggctgcgggctaaggccagcttcgtgatcgagggcctgaaggaggccgacaaggacgagttctgcagatgcgagctgaagctgcagaagtggtacggggacctgcggggaaagcccttcgccatcgaagccgagaacagcatcctggacatcagcggcttcagcaagcagtacaactgtgccttcatctggcagaaggacggcgtgaagaagctgaacctgtacctgatcatcaactacttcaagggcggcaagctgcggttcaagaagatcaaacctgaagccttcgaagccaacagattctacaccgtgatcaacaaaaagagcggcgagatcgtgcccatggaggtgaacttcaacttcgacgaccccaacctgatcatcctgcctctggcctttggcaagagacagggcagagaattcatctggaacgacctgctgtccctggaaaccggcagcctgaagctggccaacggaagagtgatcgagaagacactgtacaacagaagaacccggcaggatgagcctgccctgttcgtggccctgaccttcgagcggcgggaggtcctggactcctccaatatcaaaccaatgaacctgatcggcgtggcaagaggcgaaaacatccccgccgtgatcgccctgaccgaccccgagggctgcccactgagccggtttaaggatagcctgggaaacccaacccacatcctgagaatcggcgagagctataaggagaagcagcggaccatccaggccaagaaggaggtggagcagcggagagccggcggctacagccggaagtacgccagcaaagccaagaatctggcagacgatatggtgagaaacaccgctagagatctgctgtactacgccgtgacccaggatgccatgctgatcttcgccaacctgagccggggcttcggccggcagggcaagcggaccttcatggccgagagacagtacacacggatggaggactggctgaccgccaagctggcctacgagggcctgagcaagacctacctgtccaagacactggcccagtacacctccaagacatgcagcaactgtgggtttaccatcaccagcgccgactacgacagggtgctggagaagctgaagaagacagcaacaggctggatgaccacaattaacggcaaggagctgaaggtggagggccagattacctactacaacagatacaagagacagaacgtagtcaaggacctgtccgtcgagctggatagactgagcgaagaatctgtgaacaacgacatctcctcctggacaaagggcagaagcggagaagctctgagcctcctgaagaaaagattctcccatagacccgtgcaggagaagttcgtgtgcctgaactgcggcttcgagacacacgcagccgagcaagccgccctgaacatcgccagatcctggctgttcctgcggagccaggagtacaagaaataccagacaaacaagacaaccggcaacaccgataagagagccttcgtcgagacctggcagtccttttaccggaagaagcttaaggaggtgtggaaacctgccgtgcggtctggcggatctggcggaggctcctagccagggcagcatcaccttcaaggacgtggccgtggacttcacccaggaggagtggtgcctgctggaccacagccagaaggccctgcacctggaggtgatgctggagaacgtgcagaacctgctgagcgtgggcctgcccgtgcccagggagaacttcatcagctgcttccagcagggcaaggccccctacctgctgcagcagaacgaccccaagagcagcagccccgaggccgagaccaacggatctggctccggcagcggccccaagaaaaagagaaaagtctaagctgccttctgcggggcttgccttctggccatgcccttcttctctcccttgcacctgtacctcttggtctttgaataaagcctgagtaggaaggctagcaaaaaaaaaaaaaaaaaaaaaaaaaaaaaaaaaaaaaaaaaaaaaaaaaaaaaaaaaaaaaaaaaaaaaaaaaaaaaaaa

SEQ ID NO: 15834 - RNA, 9485 nt, synthetic construct
  source 1..9485: mol_type = other RNA
aggaaataagagagaaaagaagagtaagaagaaatataagagccaccatggcccctaagaagaagcgtaaagtgagccggatggaacgcctcgtctacgaggtgcggcagaagtgcagaaacatcgaggacatctgcatctcctgcggatctctgaacgtgaccctggagcacccactgttcatcggcggcatgtgccagaactgtaaaaactgttttctggagtgtgcctatcaatacgacgatgacggctaccagagctactgcaccatctgttgcggcggaagagaggtgctgatgtgtggaaataacaactgctgccggtgcttctgcgtggaatgcgtggacctgctggtgggccccggcgccgcccaggccgctattaaggaagatccttggaactgctacatgtgcggccacaagggcacatacggcctgctgagacggagagaggactggcctagcagactgcagatgttcttcgccaataaccacgaccaggagttcgacccccctaaggtgtaccctcccgtccccgccgagaagagaaagcccatccgggtcctgagcctgttcgatggcatcgccaccggtctgctggtgctgaaggacctgggcatccaggtggataggtacattgcctccgaggtgtgcgaggactccatcaccgtgggaatggtgcgtcatcagggcaagatcatgtacgtgggcgacgtgcggagcgtgacacagaagcatatccaggagtggggccctttcgacctggtgatcggcggcagcccttgcaatgacctgagcatcgtgaacccagcccggaagggcctgtacgagggaaccggcagactgttcttcgagttttacagactgctgcacgacgcccggcctaaggaaggcgacgaccggcccttcttttggctgttcgagaatgtggtggccatgggagtcagcgacaagcgggatattagccggttcctggagagcaaccccgtgatgatcgatgccaaggaagtgagcgccgcccaccgggccagatacttctggggcaatctgcctggcatgaacagacccctggccagcaccgtgaacgacaagctggagctgcaggagtgcctggagcacggccggatcgccaagttcagcaaggtgagaaccatcaccacccgaagcaacagcatcaaacaaggcaaggaccagcactttcctgtgttcatgaacgagaaggaggacatcctgtggtgtaccgagatggagagagtgttcgggttcccagtccactacacagatgtcagcaacatgtctagactggccagacagagactgctgggaagaagctggtccgtccctgtgatcagacacctgttcgcccctctgaaggagtacttcgcctgcgtgagcagcggcaacagcaacgccaacagccggggccccagcttctctagcggcctggtgccactgtccctgagagggagccacatgggccccatggagatctacaaaaccgtgagcgcctggaagcggcagcctgtgcgcgtgctgagcctgtttcggaatatcgataaagtcctgaaaagcctgggattcctggagagcggctctggctccggcggtggcaccctgaagtacgtggaggatgtgacaaacgtggtcagacgggatgtggagaagtggggccccttcgatctggtgtacggcagcacccaacccctgggcagctcttgtgaccggtgccctggctggtacatgtttcagttccaccggatcctgcagtacgccctgccgagacaggagtcccagcggccattcttttggattttcatggacaacttgctgctgaccgaggatgaccaggaaactaccactcggttcctgcagaccgaagccgtgaccctgcaggacgtgagaggccgggactaccagaacgccatgcgggtgtggtccaacatccctggactgaaaagcaagcacgcacctctgacccctaaagaagaggagtacctgcaggcccaggtgcggagcagaagcaagctggacgcccctaaggtggatctgctggtgaagaattgcctcctgcccctgagagagtacttcaagtatttcagccagaatagtctgcccctgggaggcagcggcggcggcgccctggtgacatttgaggacgtcgccgtgcggttcacccaggaggaatgggctctgctggatccttctcagaaaatcctgtaccgggacgtgatgagagagacataccggaatctgacctccgtgggcatcaactgggaatgttgggaccttgaagcctgcttcagaagcctgggaagaaacctgagagtgcaggtggtgaagagaaagtgcgagctgaccaacagcggcccctgcgccgagggcggcccaagcagcggcgcccctcctcccagcggcggcagcccagccggctccccaacctctaccgaggagggcacctctgagtccgccacccccgagagcggccctggcacctccaccgagcccagcgagggcagcgcacccggcagccctgccggcagccccacctccacagaggagggaaccagcaccgagcccagcgaaggcagcgccccaggcaccagcaccgagcctagtgagcaggagattaaacggatcaacaagatcagaagaagacttgtgaaagacagcaacaccaagaaggccggcaagacaggccccatgaaaaccctgctggttagagtgatgacacccgatctgagagagcggctggaaaacctgagaaagaagcctgaaaatatcccccagcccatcagcaatacatctagagccaacctgaataagctgctgaccgattacaccgaaatgaagaaggcgatcctgcatgtgtactgggaagagttccagaaggaccctgtgggcctgatgagccgggtggcccagcctgccagcaagaagatcgatcagaacaagctgaaacctgagatggacgagaagggcaacctgaccaccgccggctttgcctgctctcagtgtggccagcccctgttcgtgtacaagctggagcaggtgtctgagaagggcaaggcttacaccaactacttcggacggtgcaatgtggccgagcacgaaaagctgatcctgctggcccagctgaagcccgagaaggatagcgacgaagccgtgacatatagcctgggaaagtttgggcagagggccctggatttctacagcattcatgtgaccaaggagtccacccaccccgtgaagcccctggcccagatcgccggaaacagatacgcctccggacctgtgggaaaggccctgagcgacgcatgtatgggcacaatcgcctccttcctgtctaagtaccaggacatcatcatcgaacaccagaaggtggtgaagggcaaccagaagagactggagagcctgcgggagctggccggcaaggaaaacctggaataccctagcgtgaccctgccacctcagcctcacaccaaggagggcgttgatgcctacaacgaagtgatcgcccgggtgcgaatgtgggtgaacctgaacctgtggcagaagctgaagctaagcagagatgatgccaagcctctgctgagactgaagggattcccttcctttcctctggtcgagagacaggccaacgaagtggactggtgggacatggtgtgtaacgtgaagaagctgatcaacgagaaaaaggaggatggcaaggtgttttggcagaatctggctggctacaagagacaggaagccctgagaccatacctgagcagcgaggaagatcggaagaagggaaagaaattcgctcggtaccagctgggcgacctgctgctgcacctggaaaagaagcacggcgaggactggggaaaggtgtacgacgaggcctgggagcggattgacaagaaagtggaaggcctgagcaagcacatcaagctggaagaggaacggagaagcgaggacgcccagagcaaggccgccctgaccgactggctgcgggctaaggccagcttcgtgatcgagggcctgaaggaggccgacaaggacgagttctgcagatgcgagctgaagctgcagaagtggtacggggacctgcggggaaagcccttcgccatcgaagccgagaacagcatcctggacatcagcggcttcagcaagcagtacaactgtgccttcatctggcagaaggacggcgtgaagaagctgaacctgtacctgatcatcaactacttcaagggcggcaagctgcggttcaagaagatcaaacctgaagccttcgaagccaacagattctacaccgtgatcaacaaaaagagcggcgagatcgtgcccatggaggtgaacttcaacttcgacgaccccaacctgatcatcctgcctctggcctttggcaagagacagggcagagaattcatctggaacgacctgctgtccctggaaaccggcagcctgaagctggccaacggaagagtgatcgagaagacactgtacaacagaagaacccggcaggatgagcctgccctgttcgtggccctgaccttcgagcggcgggaggtcctggactcctccaatatcaaaccaatgaacctgatcggcgtggcaagaggcgaaaacatccccgccgtgatcgccctgaccgaccccgagggctgcccactgagccggtttaaggatagcctgggaaacccaacccacatcctgagaatcggcgagagctataaggagaagcagcggaccatccaggccaagaaggaggtggagcagcggagagccggcggctacagccggaagtacgccagcaaagccaagaatctggcagacgatatggtgagaaacaccgctagagatctgctgtactacgccgtgacccaggatgccatgctgatcttcgccaacctgagccggggcttcggccggcagggcaagcggaccttcatggccgagagacagtacacacggatggaggactggctgaccgccaagctggcctacgagggcctgagcaagacctacctgtccaagacactggcccagtacacctccaagacatgcagcaactgtgggtttaccatcaccagcgccgactacgacagggtgctggagaagctgaagaagacagcaacaggctggatgaccacaattaacggcaaggagctgaaggtggagggccagattacctactacaacagatacaagagacagaacgtagtcaaggacctgtccgtcgagctggatagactgagcgaagaatctgtgaacaacgacatctcctcctggacaaagggcagaagcggagaagctctgagcctcctgaagaaaagattctcccatagacccgtgcaggagaagttcgtgtgcctgaactgcggcttcgagacacacgcagccgagcaagccgccctgaacatcgccagatcctggctgttcctgcggagccaggagtacaagaaataccagacaaacaagacaaccggcaacaccgataagagagccttcgtcgagacctggcagtccttttaccggaagaagcttaaggaggtgtggaaacctgccgtgcggtctggcggatctggcggaggctccgcccaggagagcgtgaccttcagggacgtggccgtggtgttcagcagggacgagtggctgtgcctggaccccgcccagaggagcctgtacagggaggtgatgctggagaactacggcaccctggtgagcctgggcatcctgttcagcaagcccaaggtgatcttccagctgcagcagggcgaggacccctggatggtggagagcggcgtgagccagggcccctgcgtgggctgggagagcatgggcggcccaagcagcggcgcccctcctcccagcggcggcagcccagccggctccccaacctctaccgaggagggcacctctgagtccgccacccccgagagcggccctggcacctccaccgagcccagcgagggcagcgcacccggcagccctgccggcagccccacctccacagaggagggaaccagcaccgagcccagcgaaggcagcgccccaggcaccagcaccgagcctagtgagcaggagattaaacggatcaacaagatcagaagaagacttgtgaaagacagcaacaccaagaaggccggcaagacaggccccatgaaaaccctgctggttagagtgatgacacccgatctgagagagcggctggaaaacctgagaaagaagcctgaaaatatcccccagcccatcagcaatacatctagagccaacctgaataagctgctgaccgattacaccgaaatgaagaaggcgatcctgcatgtgtactgggaagagttccagaaggaccctgtgggcctgatgagccgggtggcccagcctgccagcaagaagatcgatcagaacaagctgaaacctgagatggacgagaagggcaacctgaccaccgccggctttgcctgctctcagtgtggccagcccctgttcgtgtacaagctggagcaggtgtctgagaagggcaaggcttacaccaactacttcggacggtgcaatgtggccgagcacgaaaagctgatcctgctggcccagctgaagcccgagaaggatagcgacgaagccgtgacatatagcctgggaaagtttgggcagagggccctggatttctacagcattcatgtgaccaaggagtccacccaccccgtgaagcccctggcccagatcgccggaaacagatacgcctccggacctgtgggaaaggccctgagcgacgcatgtatgggcacaatcgcctccttcctgtctaagtaccaggacatcatcatcgaacaccagaaggtggtgaagggcaaccagaagagactggagagcctgcgggagctggccggcaaggaaaacctggaataccctagcgtgaccctgccacctcagcctcacaccaaggagggcgttgatgcctacaacgaagtgatcgcccgggtgcgaatgtgggtgaacctgaacctgtggcagaagctgaagctaagcagagatgatgccaagcctctgctgagactgaagggattcccttcctttcctctggtcgagagacaggccaacgaagtggactggtgggacatggtgtgtaacgtgaagaagctgatcaacgagaaaaaggaggatggcaaggtgttttggcagaatctggctggctacaagagacaggaagccctgagaccatacctgagcagcgaggaagatcggaagaagggaaagaaattcgctcggtaccagctgggcgacctgctgctgcacctggaaaagaagcacggcgaggactggggaaaggtgtacgacgaggcctgggagcggattgacaagaaagtggaaggcctgagcaagcacatcaagctggaagaggaacggagaagcgaggacgcccagagcaaggccgccctgaccgactggctgcgggctaaggccagcttcgtgatcgagggcctgaaggaggccgacaaggacgagttctgcagatgcgagctgaagctgcagaagtggtacggggacctgcggggaaagcccttcgccatcgaagccgagaacagcatcctggacatcagcggcttcagcaagcagtacaactgtgccttcatctggcagaaggacggcgtgaagaagctgaacctgtacctgatcatcaactacttcaagggcggcaagctgcggttcaagaagatcaaacctgaagccttcgaagccaacagattctacaccgtgatcaacaaaaagagcggcgagatcgtgcccatggaggtgaacttcaacttcgacgaccccaacctgatcatcctgcctctggcctttggcaagagacagggcagagaattcatctggaacgacctgctgtccctggaaaccggcagcctgaagctggccaacggaagagtgatcgagaagacactgtacaacagaagaacccggcaggatgagcctgccctgttcgtggccctgaccttcgagcggcgggaggtcctggactcctccaatatcaaaccaatgaacctgatcggcgtggcaagaggcgaaaacatccccgccgtgatcgccctgaccgaccccgagggctgcccactgagccggtttaaggatagcctgggaaacccaacccacatcctgagaatcggcgagagctataaggagaagcagcggaccatccaggccaagaaggaggtggagcagcggagagccggcggctacagccggaagtacgccagcaaagccaagaatctggcagacgatatggtgagaaacaccgctagagatctgctgtactacgccgtgacccaggatgccatgctgatcttcgccaacctgagccggggcttcggccggcagggcaagcggaccttcatggccgagagacagtacacacggatggaggactggctgaccgccaagctggcctacgagggcctgagcaagacctacctgtccaagacactggcccagtacacctccaagacatgcagcaactgtgggtttaccatcaccagcgccgactacgacagggtgctggagaagctgaagaagacagcaacaggctggatgaccacaattaacggcaaggagctgaaggtggagggccagattacctactacaacagatacaagagacagaacgtagtcaaggacctgtccgtcgagctggatagactgagcgaagaatctgtgaacaacgacatctcctcctggacaaagggcagaagcggagaagctctgagcctcctgaagaaaagattctcccatagacccgtgcaggagaagttcgtgtgcctgaactgcggcttcgagacacacgcagccgagcaagccgccctgaacatcgccagatcctggctgttcctgcggagccaggagtacaagaaataccagacaaacaagacaaccggcaacaccgataagagagccttcgtcgagacctggcagtccttttaccggaagaagcttaaggaggtgtggaaacctgccgtgcggtctggcggatctggcggaggctcctgcccaggagagcgtgaccttcagggacgtggccgtggtgttcagcagggacgagtggctgtgcctggaccccgcccagaggagcctgtacagggaggtgatgctggagaactacggcaccctggtgagcctgggcatcctgttcagcaagcccaaggtgatcttccagctgcagcagggcgaggacccctggatggtggagagcggcgtgagccagggcccctgcgtgggctgggagagcatgggatctggctccggcagcggccccaagaaaaagagaaaagtctaagctgccttctgcggggcttgccttctggccatgcccttcttctctcccttgcacctgtacctcttggtctttgaataaagcctgagtaggaaggctagcaaaaaaaaaaaaaaaaaaaaaaaaaaaaaaaaaaaaaaaaaaaaaaaaaaaaaaaaaaaaaaaaaaaaaaaaaaaaaaaa

SEQ ID NO: 15835 - RNA, 9485 nt, synthetic construct
  source 1..9485: mol_type = other RNA
aggaaataagagagaaaagaagagtaagaagaaatataagagccaccatggcccctaagaagaagcgtaaagtgagccggatggaacgcctcgtctacgaggtgcggcagaagtgcagaaacatcgaggacatctgcatctcctgcggatctctgaacgtgaccctggagcacccactgttcatcggcggcatgtgccagaactgtaaaaactgttttctggagtgtgcctatcaatacgacgatgacggctaccagagctactgcaccatctgttgcggcggaagagaggtgctgatgtgtggaaataacaactgctgccggtgcttctgcgtggaatgcgtggacctgctggtgggccccggcgccgcccaggccgctattaaggaagatccttggaactgctacatgtgcggccacaagggcacatacggcctgctgagacggagagaggactggcctagcagactgcagatgttcttcgccaataaccacgaccaggagttcgacccccctaaggtgtaccctcccgtccccgccgagaagagaaagcccatccgggtcctgagcctgttcgatggcatcgccaccggtctgctggtgctgaaggacctgggcatccaggtggataggtacattgcctccgaggtgtgcgaggactccatcaccgtgggaatggtgcgtcatcagggcaagatcatgtacgtgggcgacgtgcggagcgtgacacagaagcatatccaggagtggggccctttcgacctggtgatcggcggcagcccttgcaatgacctgagcatcgtgaacccagcccggaagggcctgtacgagggaaccggcagactgttcttcgagttttacagactgctgcacgacgcccggcctaaggaaggcgacgaccggcccttcttttggctgttcgagaatgtggtggccatgggagtcagcgacaagcgggatattagccggttcctggagagcaaccccgtgatgatcgatgccaaggaagtgagcgccgcccaccgggccagatacttctggggcaatctgcctggcatgaacagacccctggccagcaccgtgaacgacaagctggagctgcaggagtgcctggagcacggccggatcgccaagttcagcaaggtgagaaccatcaccacccgaagcaacagcatcaaacaaggcaaggaccagcactttcctgtgttcatgaacgagaaggaggacatcctgtggtgtaccgagatggagagagtgttcgggttcccagtccactacacagatgtcagcaacatgtctagactggccagacagagactgctgggaagaagctggtccgtccctgtgatcagacacctgttcgcccctctgaaggagtacttcgcctgcgtgagcagcggcaacagcaacgccaacagccggggccccagcttctctagcggcctggtgccactgtccctgagagggagccacatgggccccatggagatctacaaaaccgtgagcgcctggaagcggcagcctgtgcgcgtgctgagcctgtttcggaatatcgataaagtcctgaaaagcctgggattcctggagagcggctctggctccggcggtggcaccctgaagtacgtggaggatgtgacaaacgtggtcagacgggatgtggagaagtggggccccttcgatctggtgtacggcagcacccaacccctgggcagctcttgtgaccggtgccctggctggtacatgtttcagttccaccggatcctgcagtacgccctgccgagacaggagtcccagcggccattcttttggattttcatggacaacttgctgctgaccgaggatgaccaggaaactaccactcggttcctgcagaccgaagccgtgaccctgcaggacgtgagaggccgggactaccagaacgccatgcgggtgtggtccaacatccctggactgaaaagcaagcacgcacctctgacccctaaagaagaggagtacctgcaggcccaggtgcggagcagaagcaagctggacgcccctaaggtggatctgctggtgaagaattgcctcctgcccctgagagagtacttcaagtatttcagccagaatagtctgcccctgggaggcagcggcggcggcgccctggtgacatttgaggacgtcgccgtgcggttcacccaggaggaatgggctctgctggatccttctcagaaaatcctgtaccgggacgtgatgagagagacataccggaatctgacctccgtgggcatcaactgggaatgttgggaccttgaagcctgcttcagaagcctgggaagaaacctgagagtgcaggtggtgaagagaaagtgcgagctgaccaacagcggcccctgcgccgagggcggcccaagcagcggcgcccctcctcccagcggcggcagcccagccggctccccaacctctaccgaggagggcacctctgagtccgccacccccgagagcggccctggcacctccaccgagcccagcgagggcagcgcacccggcagccctgccggcagccccacctccacagaggagggaaccagcaccgagcccagcgaaggcagcgccccaggcaccagcaccgagcctagtgagcaggagattaaacggatcaacaagatcagaagaagacttgtgaaagacagcaacaccaagaaggccggcaagacaggccccatgaaaaccctgctggttagagtgatgacacccgatctgagagagcggctggaaaacctgagaaagaagcctgaaaatatcccccagcccatcagcaatacatctagagccaacctgaataagctgctgaccgattacaccgaaatgaagaaggcgatcctgcatgtgtactgggaagagttccagaaggaccctgtgggcctgatgagccgggtggcccagcctgccagcaagaagatcgatcagaacaagctgaaacctgagatggacgagaagggcaacctgaccaccgccggctttgcctgctctcagtgtggccagcccctgttcgtgtacaagctggagcaggtgtctgagaagggcaaggcttacaccaactacttcggacggtgcaatgtggccgagcacgaaaagctgatcctgctggcccagctgaagcccgagaaggatagcgacgaagccgtgacatatagcctgggaaagtttgggcagagggccctggatttctacagcattcatgtgaccaaggagtccacccaccccgtgaagcccctggcccagatcgccggaaacagatacgcctccggacctgtgggaaaggccctgagcgacgcatgtatgggcacaatcgcctccttcctgtctaagtaccaggacatcatcatcgaacaccagaaggtggtgaagggcaaccagaagagactggagagcctgcgggagctggccggcaaggaaaacctggaataccctagcgtgaccctgccacctcagcctcacaccaaggagggcgttgatgcctacaacgaagtgatcgcccgggtgcgaatgtgggtgaacctgaacctgtggcagaagctgaagctaagcagagatgatgccaagcctctgctgagactgaagggattcccttcctttcctctggtcgagagacaggccaacgaagtggactggtgggacatggtgtgtaacgtgaagaagctgatcaacgagaaaaaggaggatggcaaggtgttttggcagaatctggctggctacaagagacaggaagccctgagaccatacctgagcagcgaggaagatcggaagaagggaaagaaattcgctcggtaccagctgggcgacctgctgctgcacctggaaaagaagcacggcgaggactggggaaaggtgtacgacgaggcctgggagcggattgacaagaaagtggaaggcctgagcaagcacatcaagctggaagaggaacggagaagcgaggacgcccagagcaaggccgccctgaccgactggctgcgggctaaggccagcttcgtgatcgagggcctgaaggaggccgacaaggacgagttctgcagatgcgagctgaagctgcagaagtggtacggggacctgcggggaaagcccttcgccatcgaagccgagaacagcatcctggacatcagcggcttcagcaagcagtacaactgtgccttcatctggcagaaggacggcgtgaagaagctgaacctgtacctgatcatcaactacttcaagggcggcaagctgcggttcaagaagatcaaacctgaagccttcgaagccaacagattctacaccgtgatcaacaaaaagagcggcgagatcgtgcccatggaggtgaacttcaacttcgacgaccccaacctgatcatcctgcctctggcctttggcaagagacagggcagagaattcatctggaacgacctgctgtccctggaaaccggcagcctgaagctggccaacggaagagtgatcgagaagacactgtacaacagaagaacccggcaggatgagcctgccctgttcgtggccctgaccttcgagcggcgggaggtcctggactcctccaatatcaaaccaatgaacctgatcggcgtggcaagaggcgaaaacatccccgccgtgatcgccctgaccgaccccgagggctgcccactgagccggtttaaggatagcctgggaaacccaacccacatcctgagaatcggcgagagctataaggagaagcagcggaccatccaggccaagaaggaggtggagcagcggagagccggcggctacagccggaagtacgccagcaaagccaagaatctggcagacgatatggtgagaaacaccgctagagatctgctgtactacgccgtgacccaggatgccatgctgatcttcgccaacctgagccggggcttcggccggcagggcaagcggaccttcatggccgagagacagtacacacggatggaggactggctgaccgccaagctggcctacgagggcctgagcaagacctacctgtccaagacactggcccagtacacctccaagacatgcagcaactgtgggtttaccatcaccagcgccgactacgacagggtgctggagaagctgaagaagacagcaacaggctggatgaccacaattaacggcaaggagctgaaggtggagggccagattacctactacaacagatacaagagacagaacgtagtcaaggacctgtccgtcgagctggatagactgagcgaagaatctgtgaacaacgacatctcctcctggacaaagggcagaagcggagaagctctgagcctcctgaagaaaagattctcccatagacccgtgcaggagaagttcgtgtgcctgaactgcggcttcgagacacacgcagccgagcaagccgccctgaacatcgccagatcctggctgttcctgcggagccaggagtacaagaaataccagacaaacaagacaaccggcaacaccgataagagagccttcgtcgagacctggcagtccttttaccggaagaagcttaaggaggtgtggaaacctgccgtgcggtctggcggatctggcggaggctccatgagggtgctgaccttcagggacgtggccgtggagttcagccccgaggagtgggagtgcctggacagcgcccagcagcacctgtacagggacgtgatgctggagaactacggcaacctgttcagcctgggcctggccatcttcaagcccgacctgatcacctacctggagcagaggaaggagccctggaacgccaggaggcagaagaccgtggccaagcaccccgccggcagcctgcacttcggcggcccaagcagcggcgcccctcctcccagcggcggcagcccagccggctccccaacctctaccgaggagggcacctctgagtccgccacccccgagagcggccctggcacctccaccgagcccagcgagggcagcgcacccggcagccctgccggcagccccacctccacagaggagggaaccagcaccgagcccagcgaaggcagcgccccaggcaccagcaccgagcctagtgagcaggagattaaacggatcaacaagatcagaagaagacttgtgaaagacagcaacaccaagaaggccggcaagacaggccccatgaaaaccctgctggttagagtgatgacacccgatctgagagagcggctggaaaacctgagaaagaagcctgaaaatatcccccagcccatcagcaatacatctagagccaacctgaataagctgctgaccgattacaccgaaatgaagaaggcgatcctgcatgtgtactgggaagagttccagaaggaccctgtgggcctgatgagccgggtggcccagcctgccagcaagaagatcgatcagaacaagctgaaacctgagatggacgagaagggcaacctgaccaccgccggctttgcctgctctcagtgtggccagcccctgttcgtgtacaagctggagcaggtgtctgagaagggcaaggcttacaccaactacttcggacggtgcaatgtggccgagcacgaaaagctgatcctgctggcccagctgaagcccgagaaggatagcgacgaagccgtgacatatagcctgggaaagtttgggcagagggccctggatttctacagcattcatgtgaccaaggagtccacccaccccgtgaagcccctggcccagatcgccggaaacagatacgcctccggacctgtgggaaaggccctgagcgacgcatgtatgggcacaatcgcctccttcctgtctaagtaccaggacatcatcatcgaacaccagaaggtggtgaagggcaaccagaagagactggagagcctgcgggagctggccggcaaggaaaacctggaataccctagcgtgaccctgccacctcagcctcacaccaaggagggcgttgatgcctacaacgaagtgatcgcccgggtgcgaatgtgggtgaacctgaacctgtggcagaagctgaagctaagcagagatgatgccaagcctctgctgagactgaagggattcccttcctttcctctggtcgagagacaggccaacgaagtggactggtgggacatggtgtgtaacgtgaagaagctgatcaacgagaaaaaggaggatggcaaggtgttttggcagaatctggctggctacaagagacaggaagccctgagaccatacctgagcagcgaggaagatcggaagaagggaaagaaattcgctcggtaccagctgggcgacctgctgctgcacctggaaaagaagcacggcgaggactggggaaaggtgtacgacgaggcctgggagcggattgacaagaaagtggaaggcctgagcaagcacatcaagctggaagaggaacggagaagcgaggacgcccagagcaaggccgccctgaccgactggctgcgggctaaggccagcttcgtgatcgagggcctgaaggaggccgacaaggacgagttctgcagatgcgagctgaagctgcagaagtggtacggggacctgcggggaaagcccttcgccatcgaagccgagaacagcatcctggacatcagcggcttcagcaagcagtacaactgtgccttcatctggcagaaggacggcgtgaagaagctgaacctgtacctgatcatcaactacttcaagggcggcaagctgcggttcaagaagatcaaacctgaagccttcgaagccaacagattctacaccgtgatcaacaaaaagagcggcgagatcgtgcccatggaggtgaacttcaacttcgacgaccccaacctgatcatcctgcctctggcctttggcaagagacagggcagagaattcatctggaacgacctgctgtccctggaaaccggcagcctgaagctggccaacggaagagtgatcgagaagacactgtacaacagaagaacccggcaggatgagcctgccctgttcgtggccctgaccttcgagcggcgggaggtcctggactcctccaatatcaaaccaatgaacctgatcggcgtggcaagaggcgaaaacatccccgccgtgatcgccctgaccgaccccgagggctgcccactgagccggtttaaggatagcctgggaaacccaacccacatcctgagaatcggcgagagctataaggagaagcagcggaccatccaggccaagaaggaggtggagcagcggagagccggcggctacagccggaagtacgccagcaaagccaagaatctggcagacgatatggtgagaaacaccgctagagatctgctgtactacgccgtgacccaggatgccatgctgatcttcgccaacctgagccggggcttcggccggcagggcaagcggaccttcatggccgagagacagtacacacggatggaggactggctgaccgccaagctggcctacgagggcctgagcaagacctacctgtccaagacactggcccagtacacctccaagacatgcagcaactgtgggtttaccatcaccagcgccgactacgacagggtgctggagaagctgaagaagacagcaacaggctggatgaccacaattaacggcaaggagctgaaggtggagggccagattacctactacaacagatacaagagacagaacgtagtcaaggacctgtccgtcgagctggatagactgagcgaagaatctgtgaacaacgacatctcctcctggacaaagggcagaagcggagaagctctgagcctcctgaagaaaagattctcccatagacccgtgcaggagaagttcgtgtgcctgaactgcggcttcgagacacacgcagccgagcaagccgccctgaacatcgccagatcctggctgttcctgcggagccaggagtacaagaaataccagacaaacaagacaaccggcaacaccgataagagagccttcgtcgagacctggcagtccttttaccggaagaagcttaaggaggtgtggaaacctgccgtgcggtctggcggatctggcggaggctcctatgagggtgctgaccttcagggacgtggccgtggagttcagccccgaggagtgggagtgcctggacagcgcccagcagcacctgtacagggacgtgatgctggagaactacggcaacctgttcagcctgggcctggccatcttcaagcccgacctgatcacctacctggagcagaggaaggagccctggaacgccaggaggcagaagaccgtggccaagcaccccgccggcagcctgcacttcggatctggctccggcagcggccccaagaaaaagagaaaagtctaagctgccttctgcggggcttgccttctggccatgcccttcttctctcccttgcacctgtacctcttggtctttgaataaagcctgagtaggaaggctagcaaaaaaaaaaaaaaaaaaaaaaaaaaaaaaaaaaaaaaaaaaaaaaaaaaaaaaaaaaaaaaaaaaaaaaaaaaaaaaaa

SEQ ID NO: 15836 - RNA, 9485 nt, synthetic construct
  source 1..9485: mol_type = other RNA
aggaaataagagagaaaagaagagtaagaagaaatataagagccaccatggcccctaagaagaagcgtaaagtgagccggatggaacgcctcgtctacgaggtgcggcagaagtgcagaaacatcgaggacatctgcatctcctgcggatctctgaacgtgaccctggagcacccactgttcatcggcggcatgtgccagaactgtaaaaactgttttctggagtgtgcctatcaatacgacgatgacggctaccagagctactgcaccatctgttgcggcggaagagaggtgctgatgtgtggaaataacaactgctgccggtgcttctgcgtggaatgcgtggacctgctggtgggccccggcgccgcccaggccgctattaaggaagatccttggaactgctacatgtgcggccacaagggcacatacggcctgctgagacggagagaggactggcctagcagactgcagatgttcttcgccaataaccacgaccaggagttcgacccccctaaggtgtaccctcccgtccccgccgagaagagaaagcccatccgggtcctgagcctgttcgatggcatcgccaccggtctgctggtgctgaaggacctgggcatccaggtggataggtacattgcctccgaggtgtgcgaggactccatcaccgtgggaatggtgcgtcatcagggcaagatcatgtacgtgggcgacgtgcggagcgtgacacagaagcatatccaggagtggggccctttcgacctggtgatcggcggcagcccttgcaatgacctgagcatcgtgaacccagcccggaagggcctgtacgagggaaccggcagactgttcttcgagttttacagactgctgcacgacgcccggcctaaggaaggcgacgaccggcccttcttttggctgttcgagaatgtggtggccatgggagtcagcgacaagcgggatattagccggttcctggagagcaaccccgtgatgatcgatgccaaggaagtgagcgccgcccaccgggccagatacttctggggcaatctgcctggcatgaacagacccctggccagcaccgtgaacgacaagctggagctgcaggagtgcctggagcacggccggatcgccaagttcagcaaggtgagaaccatcaccacccgaagcaacagcatcaaacaaggcaaggaccagcactttcctgtgttcatgaacgagaaggaggacatcctgtggtgtaccgagatggagagagtgttcgggttcccagtccactacacagatgtcagcaacatgtctagactggccagacagagactgctgggaagaagctggtccgtccctgtgatcagacacctgttcgcccctctgaaggagtacttcgcctgcgtgagcagcggcaacagcaacgccaacagccggggccccagcttctctagcggcctggtgccactgtccctgagagggagccacatgggccccatggagatctacaaaaccgtgagcgcctggaagcggcagcctgtgcgcgtgctgagcctgtttcggaatatcgataaagtcctgaaaagcctgggattcctggagagcggctctggctccggcggtggcaccctgaagtacgtggaggatgtgacaaacgtggtcagacgggatgtggagaagtggggccccttcgatctggtgtacggcagcacccaacccctgggcagctcttgtgaccggtgccctggctggtacatgtttcagttccaccggatcctgcagtacgccctgccgagacaggagtcccagcggccattcttttggattttcatggacaacttgctgctgaccgaggatgaccaggaaactaccactcggttcctgcagaccgaagccgtgaccctgcaggacgtgagaggccgggactaccagaacgccatgcgggtgtggtccaacatccctggactgaaaagcaagcacgcacctctgacccctaaagaagaggagtacctgcaggcccaggtgcggagcagaagcaagctggacgcccctaaggtggatctgctggtgaagaattgcctcctgcccctgagagagtacttcaagtatttcagccagaatagtctgcccctgggaggcagcggcggcggcgccctggtgacatttgaggacgtcgccgtgcggttcacccaggaggaatgggctctgctggatccttctcagaaaatcctgtaccgggacgtgatgagagagacataccggaatctgacctccgtgggcatcaactgggaatgttgggaccttgaagcctgcttcagaagcctgggaagaaacctgagagtgcaggtggtgaagagaaagtgcgagctgaccaacagcggcccctgcgccgagggcggcccaagcagcggcgcccctcctcccagcggcggcagcccagccggctccccaacctctaccgaggagggcacctctgagtccgccacccccgagagcggccctggcacctccaccgagcccagcgagggcagcgcacccggcagccctgccggcagccccacctccacagaggagggaaccagcaccgagcccagcgaaggcagcgccccaggcaccagcaccgagcctagtgagcaggagattaaacggatcaacaagatcagaagaagacttgtgaaagacagcaacaccaagaaggccggcaagacaggccccatgaaaaccctgctggttagagtgatgacacccgatctgagagagcggctggaaaacctgagaaagaagcctgaaaatatcccccagcccatcagcaatacatctagagccaacctgaataagctgctgaccgattacaccgaaatgaagaaggcgatcctgcatgtgtactgggaagagttccagaaggaccctgtgggcctgatgagccgggtggcccagcctgccagcaagaagatcgatcagaacaagctgaaacctgagatggacgagaagggcaacctgaccaccgccggctttgcctgctctcagtgtggccagcccctgttcgtgtacaagctggagcaggtgtctgagaagggcaaggcttacaccaactacttcggacggtgcaatgtggccgagcacgaaaagctgatcctgctggcccagctgaagcccgagaaggatagcgacgaagccgtgacatatagcctgggaaagtttgggcagagggccctggatttctacagcattcatgtgaccaaggagtccacccaccccgtgaagcccctggcccagatcgccggaaacagatacgcctccggacctgtgggaaaggccctgagcgacgcatgtatgggcacaatcgcctccttcctgtctaagtaccaggacatcatcatcgaacaccagaaggtggtgaagggcaaccagaagagactggagagcctgcgggagctggccggcaaggaaaacctggaataccctagcgtgaccctgccacctcagcctcacaccaaggagggcgttgatgcctacaacgaagtgatcgcccgggtgcgaatgtgggtgaacctgaacctgtggcagaagctgaagctaagcagagatgatgccaagcctctgctgagactgaagggattcccttcctttcctctggtcgagagacaggccaacgaagtggactggtgggacatggtgtgtaacgtgaagaagctgatcaacgagaaaaaggaggatggcaaggtgttttggcagaatctggctggctacaagagacaggaagccctgagaccatacctgagcagcgaggaagatcggaagaagggaaagaaattcgctcggtaccagctgggcgacctgctgctgcacctggaaaagaagcacggcgaggactggggaaaggtgtacgacgaggcctgggagcggattgacaagaaagtggaaggcctgagcaagcacatcaagctggaagaggaacggagaagcgaggacgcccagagcaaggccgccctgaccgactggctgcgggctaaggccagcttcgtgatcgagggcctgaaggaggccgacaaggacgagttctgcagatgcgagctgaagctgcagaagtggtacggggacctgcggggaaagcccttcgccatcgaagccgagaacagcatcctggacatcagcggcttcagcaagcagtacaactgtgccttcatctggcagaaggacggcgtgaagaagctgaacctgtacctgatcatcaactacttcaagggcggcaagctgcggttcaagaagatcaaacctgaagccttcgaagccaacagattctacaccgtgatcaacaaaaagagcggcgagatcgtgcccatggaggtgaacttcaacttcgacgaccccaacctgatcatcctgcctctggcctttggcaagagacagggcagagaattcatctggaacgacctgctgtccctggaaaccggcagcctgaagctggccaacggaagagtgatcgagaagacactgtacaacagaagaacccggcaggatgagcctgccctgttcgtggccctgaccttcgagcggcgggaggtcctggactcctccaatatcaaaccaatgaacctgatcggcgtggcaagaggcgaaaacatccccgccgtgatcgccctgaccgaccccgagggctgcccactgagccggtttaaggatagcctgggaaacccaacccacatcctgagaatcggcgagagctataaggagaagcagcggaccatccaggccaagaaggaggtggagcagcggagagccggcggctacagccggaagtacgccagcaaagccaagaatctggcagacgatatggtgagaaacaccgctagagatctgctgtactacgccgtgacccaggatgccatgctgatcttcgccaacctgagccggggcttcggccggcagggcaagcggaccttcatggccgagagacagtacacacggatggaggactggctgaccgccaagctggcctacgagggcctgagcaagacctacctgtccaagacactggcccagtacacctccaagacatgcagcaactgtgggtttaccatcaccagcgccgactacgacagggtgctggagaagctgaagaagacagcaacaggctggatgaccacaattaacggcaaggagctgaaggtggagggccagattacctactacaacagatacaagagacagaacgtagtcaaggacctgtccgtcgagctggatagactgagcgaagaatctgtgaacaacgacatctcctcctggacaaagggcagaagcggagaagctctgagcctcctgaagaaaagattctcccatagacccgtgcaggagaagttcgtgtgcctgaactgcggcttcgagacacacgcagccgagcaagccgccctgaacatcgccagatcctggctgttcctgcggagccaggagtacaagaaataccagacaaacaagacaaccggcaacaccgataagagagccttcgtcgagacctggcagtccttttaccggaagaagcttaaggaggtgtggaaacctgccgtgcggtctggcggatctggcggaggctccagccaggagagcctgaccttcaaggacgtggccgtggacttcacccccgaggagtggggccagctgtaccccgcccagagggacctgtacagggaggtgatgctggagaactacaggaacctggtgagcctgggccaccaggtgagcaagccccacctgatcagccagctggagcagaggaaggagccctggatgatggagaggaagatccccaggggcaacttccccgactgggagaccaggggcggcccaagcagcggcgcccctcctcccagcggcggcagcccagccggctccccaacctctaccgaggagggcacctctgagtccgccacccccgagagcggccctggcacctccaccgagcccagcgagggcagcgcacccggcagccctgccggcagccccacctccacagaggagggaaccagcaccgagcccagcgaaggcagcgccccaggcaccagcaccgagcctagtgagcaggagattaaacggatcaacaagatcagaagaagacttgtgaaagacagcaacaccaagaaggccggcaagacaggccccatgaaaaccctgctggttagagtgatgacacccgatctgagagagcggctggaaaacctgagaaagaagcctgaaaatatcccccagcccatcagcaatacatctagagccaacctgaataagctgctgaccgattacaccgaaatgaagaaggcgatcctgcatgtgtactgggaagagttccagaaggaccctgtgggcctgatgagccgggtggcccagcctgccagcaagaagatcgatcagaacaagctgaaacctgagatggacgagaagggcaacctgaccaccgccggctttgcctgctctcagtgtggccagcccctgttcgtgtacaagctggagcaggtgtctgagaagggcaaggcttacaccaactacttcggacggtgcaatgtggccgagcacgaaaagctgatcctgctggcccagctgaagcccgagaaggatagcgacgaagccgtgacatatagcctgggaaagtttgggcagagggccctggatttctacagcattcatgtgaccaaggagtccacccaccccgtgaagcccctggcccagatcgccggaaacagatacgcctccggacctgtgggaaaggccctgagcgacgcatgtatgggcacaatcgcctccttcctgtctaagtaccaggacatcatcatcgaacaccagaaggtggtgaagggcaaccagaagagactggagagcctgcgggagctggccggcaaggaaaacctggaataccctagcgtgaccctgccacctcagcctcacaccaaggagggcgttgatgcctacaacgaagtgatcgcccgggtgcgaatgtgggtgaacctgaacctgtggcagaagctgaagctaagcagagatgatgccaagcctctgctgagactgaagggattcccttcctttcctctggtcgagagacaggccaacgaagtggactggtgggacatggtgtgtaacgtgaagaagctgatcaacgagaaaaaggaggatggcaaggtgttttggcagaatctggctggctacaagagacaggaagccctgagaccatacctgagcagcgaggaagatcggaagaagggaaagaaattcgctcggtaccagctgggcgacctgctgctgcacctggaaaagaagcacggcgaggactggggaaaggtgtacgacgaggcctgggagcggattgacaagaaagtggaaggcctgagcaagcacatcaagctggaagaggaacggagaagcgaggacgcccagagcaaggccgccctgaccgactggctgcgggctaaggccagcttcgtgatcgagggcctgaaggaggccgacaaggacgagttctgcagatgcgagctgaagctgcagaagtggtacggggacctgcggggaaagcccttcgccatcgaagccgagaacagcatcctggacatcagcggcttcagcaagcagtacaactgtgccttcatctggcagaaggacggcgtgaagaagctgaacctgtacctgatcatcaactacttcaagggcggcaagctgcggttcaagaagatcaaacctgaagccttcgaagccaacagattctacaccgtgatcaacaaaaagagcggcgagatcgtgcccatggaggtgaacttcaacttcgacgaccccaacctgatcatcctgcctctggcctttggcaagagacagggcagagaattcatctggaacgacctgctgtccctggaaaccggcagcctgaagctggccaacggaagagtgatcgagaagacactgtacaacagaagaacccggcaggatgagcctgccctgttcgtggccctgaccttcgagcggcgggaggtcctggactcctccaatatcaaaccaatgaacctgatcggcgtggcaagaggcgaaaacatccccgccgtgatcgccctgaccgaccccgagggctgcccactgagccggtttaaggatagcctgggaaacccaacccacatcctgagaatcggcgagagctataaggagaagcagcggaccatccaggccaagaaggaggtggagcagcggagagccggcggctacagccggaagtacgccagcaaagccaagaatctggcagacgatatggtgagaaacaccgctagagatctgctgtactacgccgtgacccaggatgccatgctgatcttcgccaacctgagccggggcttcggccggcagggcaagcggaccttcatggccgagagacagtacacacggatggaggactggctgaccgccaagctggcctacgagggcctgagcaagacctacctgtccaagacactggcccagtacacctccaagacatgcagcaactgtgggtttaccatcaccagcgccgactacgacagggtgctggagaagctgaagaagacagcaacaggctggatgaccacaattaacggcaaggagctgaaggtggagggccagattacctactacaacagatacaagagacagaacgtagtcaaggacctgtccgtcgagctggatagactgagcgaagaatctgtgaacaacgacatctcctcctggacaaagggcagaagcggagaagctctgagcctcctgaagaaaagattctcccatagacccgtgcaggagaagttcgtgtgcctgaactgcggcttcgagacacacgcagccgagcaagccgccctgaacatcgccagatcctggctgttcctgcggagccaggagtacaagaaataccagacaaacaagacaaccggcaacaccgataagagagccttcgtcgagacctggcagtccttttaccggaagaagcttaaggaggtgtggaaacctgccgtgcggtctggcggatctggcggaggctcctagccaggagagcctgaccttcaaggacgtggccgtggacttcacccccgaggagtggggccagctgtaccccgcccagagggacctgtacagggaggtgatgctggagaactacaggaacctggtgagcctgggccaccaggtgagcaagccccacctgatcagccagctggagcagaggaaggagccctggatgatggagaggaagatccccaggggcaacttccccgactgggagaccaggggatctggctccggcagcggccccaagaaaaagagaaaagtctaagctgccttctgcggggcttgccttctggccatgcccttcttctctcccttgcacctgtacctcttggtctttgaataaagcctgagtaggaaggctagcaaaaaaaaaaaaaaaaaaaaaaaaaaaaaaaaaaaaaaaaaaaaaaaaaaaaaaaaaaaaaaaaaaaaaaaaaaaaaaaa

SEQ ID NO: 15837 - RNA, 9485 nt, synthetic construct
  source 1..9485: mol_type = other RNA
aggaaataagagagaaaagaagagtaagaagaaatataagagccaccatggcccctaagaagaagcgtaaagtgagccggatggaacgcctcgtctacgaggtgcggcagaagtgcagaaacatcgaggacatctgcatctcctgcggatctctgaacgtgaccctggagcacccactgttcatcggcggcatgtgccagaactgtaaaaactgttttctggagtgtgcctatcaatacgacgatgacggctaccagagctactgcaccatctgttgcggcggaagagaggtgctgatgtgtggaaataacaactgctgccggtgcttctgcgtggaatgcgtggacctgctggtgggccccggcgccgcccaggccgctattaaggaagatccttggaactgctacatgtgcggccacaagggcacatacggcctgctgagacggagagaggactggcctagcagactgcagatgttcttcgccaataaccacgaccaggagttcgacccccctaaggtgtaccctcccgtccccgccgagaagagaaagcccatccgggtcctgagcctgttcgatggcatcgccaccggtctgctggtgctgaaggacctgggcatccaggtggataggtacattgcctccgaggtgtgcgaggactccatcaccgtgggaatggtgcgtcatcagggcaagatcatgtacgtgggcgacgtgcggagcgtgacacagaagcatatccaggagtggggccctttcgacctggtgatcggcggcagcccttgcaatgacctgagcatcgtgaacccagcccggaagggcctgtacgagggaaccggcagactgttcttcgagttttacagactgctgcacgacgcccggcctaaggaaggcgacgaccggcccttcttttggctgttcgagaatgtggtggccatgggagtcagcgacaagcgggatattagccggttcctggagagcaaccccgtgatgatcgatgccaaggaagtgagcgccgcccaccgggccagatacttctggggcaatctgcctggcatgaacagacccctggccagcaccgtgaacgacaagctggagctgcaggagtgcctggagcacggccggatcgccaagttcagcaaggtgagaaccatcaccacccgaagcaacagcatcaaacaaggcaaggaccagcactttcctgtgttcatgaacgagaaggaggacatcctgtggtgtaccgagatggagagagtgttcgggttcccagtccactacacagatgtcagcaacatgtctagactggccagacagagactgctgggaagaagctggtccgtccctgtgatcagacacctgttcgcccctctgaaggagtacttcgcctgcgtgagcagcggcaacagcaacgccaacagccggggccccagcttctctagcggcctggtgccactgtccctgagagggagccacatgggccccatggagatctacaaaaccgtgagcgcctggaagcggcagcctgtgcgcgtgctgagcctgtttcggaatatcgataaagtcctgaaaagcctgggattcctggagagcggctctggctccggcggtggcaccctgaagtacgtggaggatgtgacaaacgtggtcagacgggatgtggagaagtggggccccttcgatctggtgtacggcagcacccaacccctgggcagctcttgtgaccggtgccctggctggtacatgtttcagttccaccggatcctgcagtacgccctgccgagacaggagtcccagcggccattcttttggattttcatggacaacttgctgctgaccgaggatgaccaggaaactaccactcggttcctgcagaccgaagccgtgaccctgcaggacgtgagaggccgggactaccagaacgccatgcgggtgtggtccaacatccctggactgaaaagcaagcacgcacctctgacccctaaagaagaggagtacctgcaggcccaggtgcggagcagaagcaagctggacgcccctaaggtggatctgctggtgaagaattgcctcctgcccctgagagagtacttcaagtatttcagccagaatagtctgcccctgggaggcagcggcggcggcgccctggtgacatttgaggacgtcgccgtgcggttcacccaggaggaatgggctctgctggatccttctcagaaaatcctgtaccgggacgtgatgagagagacataccggaatctgacctccgtgggcatcaactgggaatgttgggaccttgaagcctgcttcagaagcctgggaagaaacctgagagtgcaggtggtgaagagaaagtgcgagctgaccaacagcggcccctgcgccgagggcggcccaagcagcggcgcccctcctcccagcggcggcagcccagccggctccccaacctctaccgaggagggcacctctgagtccgccacccccgagagcggccctggcacctccaccgagcccagcgagggcagcgcacccggcagccctgccggcagccccacctccacagaggagggaaccagcaccgagcccagcgaaggcagcgccccaggcaccagcaccgagcctagtgagcaggagattaaacggatcaacaagatcagaagaagacttgtgaaagacagcaacaccaagaaggccggcaagacaggccccatgaaaaccctgctggttagagtgatgacacccgatctgagagagcggctggaaaacctgagaaagaagcctgaaaatatcccccagcccatcagcaatacatctagagccaacctgaataagctgctgaccgattacaccgaaatgaagaaggcgatcctgcatgtgtactgggaagagttccagaaggaccctgtgggcctgatgagccgggtggcccagcctgccagcaagaagatcgatcagaacaagctgaaacctgagatggacgagaagggcaacctgaccaccgccggctttgcctgctctcagtgtggccagcccctgttcgtgtacaagctggagcaggtgtctgagaagggcaaggcttacaccaactacttcggacggtgcaatgtggccgagcacgaaaagctgatcctgctggcccagctgaagcccgagaaggatagcgacgaagccgtgacatatagcctgggaaagtttgggcagagggccctggatttctacagcattcatgtgaccaaggagtccacccaccccgtgaagcccctggcccagatcgccggaaacagatacgcctccggacctgtgggaaaggccctgagcgacgcatgtatgggcacaatcgcctccttcctgtctaagtaccaggacatcatcatcgaacaccagaaggtggtgaagggcaaccagaagagactggagagcctgcgggagctggccggcaaggaaaacctggaataccctagcgtgaccctgccacctcagcctcacaccaaggagggcgttgatgcctacaacgaagtgatcgcccgggtgcgaatgtgggtgaacctgaacctgtggcagaagctgaagctaagcagagatgatgccaagcctctgctgagactgaagggattcccttcctttcctctggtcgagagacaggccaacgaagtggactggtgggacatggtgtgtaacgtgaagaagctgatcaacgagaaaaaggaggatggcaaggtgttttggcagaatctggctggctacaagagacaggaagccctgagaccatacctgagcagcgaggaagatcggaagaagggaaagaaattcgctcggtaccagctgggcgacctgctgctgcacctggaaaagaagcacggcgaggactggggaaaggtgtacgacgaggcctgggagcggattgacaagaaagtggaaggcctgagcaagcacatcaagctggaagaggaacggagaagcgaggacgcccagagcaaggccgccctgaccgactggctgcgggctaaggccagcttcgtgatcgagggcctgaaggaggccgacaaggacgagttctgcagatgcgagctgaagctgcagaagtggtacggggacctgcggggaaagcccttcgccatcgaagccgagaacagcatcctggacatcagcggcttcagcaagcagtacaactgtgccttcatctggcagaaggacggcgtgaagaagctgaacctgtacctgatcatcaactacttcaagggcggcaagctgcggttcaagaagatcaaacctgaagccttcgaagccaacagattctacaccgtgatcaacaaaaagagcggcgagatcgtgcccatggaggtgaacttcaacttcgacgaccccaacctgatcatcctgcctctggcctttggcaagagacagggcagagaattcatctggaacgacctgctgtccctggaaaccggcagcctgaagctggccaacggaagagtgatcgagaagacactgtacaacagaagaacccggcaggatgagcctgccctgttcgtggccctgaccttcgagcggcgggaggtcctggactcctccaatatcaaaccaatgaacctgatcggcgtggcaagaggcgaaaacatccccgccgtgatcgccctgaccgaccccgagggctgcccactgagccggtttaaggatagcctgggaaacccaacccacatcctgagaatcggcgagagctataaggagaagcagcggaccatccaggccaagaaggaggtggagcagcggagagccggcggctacagccggaagtacgccagcaaagccaagaatctggcagacgatatggtgagaaacaccgctagagatctgctgtactacgccgtgacccaggatgccatgctgatcttcgccaacctgagccggggcttcggccggcagggcaagcggaccttcatggccgagagacagtacacacggatggaggactggctgaccgccaagctggcctacgagggcctgagcaagacctacctgtccaagacactggcccagtacacctccaagacatgcagcaactgtgggtttaccatcaccagcgccgactacgacagggtgctggagaagctgaagaagacagcaacaggctggatgaccacaattaacggcaaggagctgaaggtggagggccagattacctactacaacagatacaagagacagaacgtagtcaaggacctgtccgtcgagctggatagactgagcgaagaatctgtgaacaacgacatctcctcctggacaaagggcagaagcggagaagctctgagcctcctgaagaaaagattctcccatagacccgtgcaggagaagttcgtgtgcctgaactgcggcttcgagacacacgcagccgagcaagccgccctgaacatcgccagatcctggctgttcctgcggagccaggagtacaagaaataccagacaaacaagacaaccggcaacaccgataagagagccttcgtcgagacctggcagtccttttaccggaagaagcttaaggaggtgtggaaacctgccgtgcggtctggcggatctggcggaggctccccccagggcctggtgaccttcggcgacgtggccgtggacttcagccaggaggagtgggagtggctggactgcgcccagaggaccctgtacaggagcgtgatgctggagaactacaggagcctggtgagcctgggcctgtgcgtgagcaagcccgagatgatcagcagcctggagcagaggaaggagccctggaccgtgaagaggaagtgcaccaggggccagtgccccgacagcgaggccgtgggcggcccaagcagcggcgcccctcctcccagcggcggcagcccagccggctccccaacctctaccgaggagggcacctctgagtccgccacccccgagagcggccctggcacctccaccgagcccagcgagggcagcgcacccggcagccctgccggcagccccacctccacagaggagggaaccagcaccgagcccagcgaaggcagcgccccaggcaccagcaccgagcctagtgagcaggagattaaacggatcaacaagatcagaagaagacttgtgaaagacagcaacaccaagaaggccggcaagacaggccccatgaaaaccctgctggttagagtgatgacacccgatctgagagagcggctggaaaacctgagaaagaagcctgaaaatatcccccagcccatcagcaatacatctagagccaacctgaataagctgctgaccgattacaccgaaatgaagaaggcgatcctgcatgtgtactgggaagagttccagaaggaccctgtgggcctgatgagccgggtggcccagcctgccagcaagaagatcgatcagaacaagctgaaacctgagatggacgagaagggcaacctgaccaccgccggctttgcctgctctcagtgtggccagcccctgttcgtgtacaagctggagcaggtgtctgagaagggcaaggcttacaccaactacttcggacggtgcaatgtggccgagcacgaaaagctgatcctgctggcccagctgaagcccgagaaggatagcgacgaagccgtgacatatagcctgggaaagtttgggcagagggccctggatttctacagcattcatgtgaccaaggagtccacccaccccgtgaagcccctggcccagatcgccggaaacagatacgcctccggacctgtgggaaaggccctgagcgacgcatgtatgggcacaatcgcctccttcctgtctaagtaccaggacatcatcatcgaacaccagaaggtggtgaagggcaaccagaagagactggagagcctgcgggagctggccggcaaggaaaacctggaataccctagcgtgaccctgccacctcagcctcacaccaaggagggcgttgatgcctacaacgaagtgatcgcccgggtgcgaatgtgggtgaacctgaacctgtggcagaagctgaagctaagcagagatgatgccaagcctctgctgagactgaagggattcccttcctttcctctggtcgagagacaggccaacgaagtggactggtgggacatggtgtgtaacgtgaagaagctgatcaacgagaaaaaggaggatggcaaggtgttttggcagaatctggctggctacaagagacaggaagccctgagaccatacctgagcagcgaggaagatcggaagaagggaaagaaattcgctcggtaccagctgggcgacctgctgctgcacctggaaaagaagcacggcgaggactggggaaaggtgtacgacgaggcctgggagcggattgacaagaaagtggaaggcctgagcaagcacatcaagctggaagaggaacggagaagcgaggacgcccagagcaaggccgccctgaccgactggctgcgggctaaggccagcttcgtgatcgagggcctgaaggaggccgacaaggacgagttctgcagatgcgagctgaagctgcagaagtggtacggggacctgcggggaaagcccttcgccatcgaagccgagaacagcatcctggacatcagcggcttcagcaagcagtacaactgtgccttcatctggcagaaggacggcgtgaagaagctgaacctgtacctgatcatcaactacttcaagggcggcaagctgcggttcaagaagatcaaacctgaagccttcgaagccaacagattctacaccgtgatcaacaaaaagagcggcgagatcgtgcccatggaggtgaacttcaacttcgacgaccccaacctgatcatcctgcctctggcctttggcaagagacagggcagagaattcatctggaacgacctgctgtccctggaaaccggcagcctgaagctggccaacggaagagtgatcgagaagacactgtacaacagaagaacccggcaggatgagcctgccctgttcgtggccctgaccttcgagcggcgggaggtcctggactcctccaatatcaaaccaatgaacctgatcggcgtggcaagaggcgaaaacatccccgccgtgatcgccctgaccgaccccgagggctgcccactgagccggtttaaggatagcctgggaaacccaacccacatcctgagaatcggcgagagctataaggagaagcagcggaccatccaggccaagaaggaggtggagcagcggagagccggcggctacagccggaagtacgccagcaaagccaagaatctggcagacgatatggtgagaaacaccgctagagatctgctgtactacgccgtgacccaggatgccatgctgatcttcgccaacctgagccggggcttcggccggcagggcaagcggaccttcatggccgagagacagtacacacggatggaggactggctgaccgccaagctggcctacgagggcctgagcaagacctacctgtccaagacactggcccagtacacctccaagacatgcagcaactgtgggtttaccatcaccagcgccgactacgacagggtgctggagaagctgaagaagacagcaacaggctggatgaccacaattaacggcaaggagctgaaggtggagggccagattacctactacaacagatacaagagacagaacgtagtcaaggacctgtccgtcgagctggatagactgagcgaagaatctgtgaacaacgacatctcctcctggacaaagggcagaagcggagaagctctgagcctcctgaagaaaagattctcccatagacccgtgcaggagaagttcgtgtgcctgaactgcggcttcgagacacacgcagccgagcaagccgccctgaacatcgccagatcctggctgttcctgcggagccaggagtacaagaaataccagacaaacaagacaaccggcaacaccgataagagagccttcgtcgagacctggcagtccttttaccggaagaagcttaaggaggtgtggaaacctgccgtgcggtctggcggatctggcggaggctcctccccagggcctggtgaccttcggcgacgtggccgtggacttcagccaggaggagtgggagtggctggactgcgcccagaggaccctgtacaggagcgtgatgctggagaactacaggagcctggtgagcctgggcctgtgcgtgagcaagcccgagatgatcagcagcctggagcagaggaaggagccctggaccgtgaagaggaagtgcaccaggggccagtgccccgacagcgaggccgtgggatctggctccggcagcggccccaagaaaaagagaaaagtctaagctgccttctgcggggcttgccttctggccatgcccttcttctctcccttgcacctgtacctcttggtctttgaataaagcctgagtaggaaggctagcaaaaaaaaaaaaaaaaaaaaaaaaaaaaaaaaaaaaaaaaaaaaaaaaaaaaaaaaaaaaaaaaaaaaaaaaaaaaaaaa

SEQ ID NO: 15838 - RNA, 9485 nt, synthetic construct
  source 1..9485: mol_type = other RNA
aggaaataagagagaaaagaagagtaagaagaaatataagagccaccatggcccctaagaagaagcgtaaagtgagccggatggaacgcctcgtctacgaggtgcggcagaagtgcagaaacatcgaggacatctgcatctcctgcggatctctgaacgtgaccctggagcacccactgttcatcggcggcatgtgccagaactgtaaaaactgttttctggagtgtgcctatcaatacgacgatgacggctaccagagctactgcaccatctgttgcggcggaagagaggtgctgatgtgtggaaataacaactgctgccggtgcttctgcgtggaatgcgtggacctgctggtgggccccggcgccgcccaggccgctattaaggaagatccttggaactgctacatgtgcggccacaagggcacatacggcctgctgagacggagagaggactggcctagcagactgcagatgttcttcgccaataaccacgaccaggagttcgacccccctaaggtgtaccctcccgtccccgccgagaagagaaagcccatccgggtcctgagcctgttcgatggcatcgccaccggtctgctggtgctgaaggacctgggcatccaggtggataggtacattgcctccgaggtgtgcgaggactccatcaccgtgggaatggtgcgtcatcagggcaagatcatgtacgtgggcgacgtgcggagcgtgacacagaagcatatccaggagtggggccctttcgacctggtgatcggcggcagcccttgcaatgacctgagcatcgtgaacccagcccggaagggcctgtacgagggaaccggcagactgttcttcgagttttacagactgctgcacgacgcccggcctaaggaaggcgacgaccggcccttcttttggctgttcgagaatgtggtggccatgggagtcagcgacaagcgggatattagccggttcctggagagcaaccccgtgatgatcgatgccaaggaagtgagcgccgcccaccgggccagatacttctggggcaatctgcctggcatgaacagacccctggccagcaccgtgaacgacaagctggagctgcaggagtgcctggagcacggccggatcgccaagttcagcaaggtgagaaccatcaccacccgaagcaacagcatcaaacaaggcaaggaccagcactttcctgtgttcatgaacgagaaggaggacatcctgtggtgtaccgagatggagagagtgttcgggttcccagtccactacacagatgtcagcaacatgtctagactggccagacagagactgctgggaagaagctggtccgtccctgtgatcagacacctgttcgcccctctgaaggagtacttcgcctgcgtgagcagcggcaacagcaacgccaacagccggggccccagcttctctagcggcctggtgccactgtccctgagagggagccacatgggccccatggagatctacaaaaccgtgagcgcctggaagcggcagcctgtgcgcgtgctgagcctgtttcggaatatcgataaagtcctgaaaagcctgggattcctggagagcggctctggctccggcggtggcaccctgaagtacgtggaggatgtgacaaacgtggtcagacgggatgtggagaagtggggccccttcgatctggtgtacggcagcacccaacccctgggcagctcttgtgaccggtgccctggctggtacatgtttcagttccaccggatcctgcagtacgccctgccgagacaggagtcccagcggccattcttttggattttcatggacaacttgctgctgaccgaggatgaccaggaaactaccactcggttcctgcagaccgaagccgtgaccctgcaggacgtgagaggccgggactaccagaacgccatgcgggtgtggtccaacatccctggactgaaaagcaagcacgcacctctgacccctaaagaagaggagtacctgcaggcccaggtgcggagcagaagcaagctggacgcccctaaggtggatctgctggtgaagaattgcctcctgcccctgagagagtacttcaagtatttcagccagaatagtctgcccctgggaggcagcggcggcggcgccctggtgacatttgaggacgtcgccgtgcggttcacccaggaggaatgggctctgctggatccttctcagaaaatcctgtaccgggacgtgatgagagagacataccggaatctgacctccgtgggcatcaactgggaatgttgggaccttgaagcctgcttcagaagcctgggaagaaacctgagagtgcaggtggtgaagagaaagtgcgagctgaccaacagcggcccctgcgccgagggcggcccaagcagcggcgcccctcctcccagcggcggcagcccagccggctccccaacctctaccgaggagggcacctctgagtccgccacccccgagagcggccctggcacctccaccgagcccagcgagggcagcgcacccggcagccctgccggcagccccacctccacagaggagggaaccagcaccgagcccagcgaaggcagcgccccaggcaccagcaccgagcctagtgagcaggagattaaacggatcaacaagatcagaagaagacttgtgaaagacagcaacaccaagaaggccggcaagacaggccccatgaaaaccctgctggttagagtgatgacacccgatctgagagagcggctggaaaacctgagaaagaagcctgaaaatatcccccagcccatcagcaatacatctagagccaacctgaataagctgctgaccgattacaccgaaatgaagaaggcgatcctgcatgtgtactgggaagagttccagaaggaccctgtgggcctgatgagccgggtggcccagcctgccagcaagaagatcgatcagaacaagctgaaacctgagatggacgagaagggcaacctgaccaccgccggctttgcctgctctcagtgtggccagcccctgttcgtgtacaagctggagcaggtgtctgagaagggcaaggcttacaccaactacttcggacggtgcaatgtggccgagcacgaaaagctgatcctgctggcccagctgaagcccgagaaggatagcgacgaagccgtgacatatagcctgggaaagtttgggcagagggccctggatttctacagcattcatgtgaccaaggagtccacccaccccgtgaagcccctggcccagatcgccggaaacagatacgcctccggacctgtgggaaaggccctgagcgacgcatgtatgggcacaatcgcctccttcctgtctaagtaccaggacatcatcatcgaacaccagaaggtggtgaagggcaaccagaagagactggagagcctgcgggagctggccggcaaggaaaacctggaataccctagcgtgaccctgccacctcagcctcacaccaaggagggcgttgatgcctacaacgaagtgatcgcccgggtgcgaatgtgggtgaacctgaacctgtggcagaagctgaagctaagcagagatgatgccaagcctctgctgagactgaagggattcccttcctttcctctggtcgagagacaggccaacgaagtggactggtgggacatggtgtgtaacgtgaagaagctgatcaacgagaaaaaggaggatggcaaggtgttttggcagaatctggctggctacaagagacaggaagccctgagaccatacctgagcagcgaggaagatcggaagaagggaaagaaattcgctcggtaccagctgggcgacctgctgctgcacctggaaaagaagcacggcgaggactggggaaaggtgtacgacgaggcctgggagcggattgacaagaaagtggaaggcctgagcaagcacatcaagctggaagaggaacggagaagcgaggacgcccagagcaaggccgccctgaccgactggctgcgggctaaggccagcttcgtgatcgagggcctgaaggaggccgacaaggacgagttctgcagatgcgagctgaagctgcagaagtggtacggggacctgcggggaaagcccttcgccatcgaagccgagaacagcatcctggacatcagcggcttcagcaagcagtacaactgtgccttcatctggcagaaggacggcgtgaagaagctgaacctgtacctgatcatcaactacttcaagggcggcaagctgcggttcaagaagatcaaacctgaagccttcgaagccaacagattctacaccgtgatcaacaaaaagagcggcgagatcgtgcccatggaggtgaacttcaacttcgacgaccccaacctgatcatcctgcctctggcctttggcaagagacagggcagagaattcatctggaacgacctgctgtccctggaaaccggcagcctgaagctggccaacggaagagtgatcgagaagacactgtacaacagaagaacccggcaggatgagcctgccctgttcgtggccctgaccttcgagcggcgggaggtcctggactcctccaatatcaaaccaatgaacctgatcggcgtggcaagaggcgaaaacatccccgccgtgatcgccctgaccgaccccgagggctgcccactgagccggtttaaggatagcctgggaaacccaacccacatcctgagaatcggcgagagctataaggagaagcagcggaccatccaggccaagaaggaggtggagcagcggagagccggcggctacagccggaagtacgccagcaaagccaagaatctggcagacgatatggtgagaaacaccgctagagatctgctgtactacgccgtgacccaggatgccatgctgatcttcgccaacctgagccggggcttcggccggcagggcaagcggaccttcatggccgagagacagtacacacggatggaggactggctgaccgccaagctggcctacgagggcctgagcaagacctacctgtccaagacactggcccagtacacctccaagacatgcagcaactgtgggtttaccatcaccagcgccgactacgacagggtgctggagaagctgaagaagacagcaacaggctggatgaccacaattaacggcaaggagctgaaggtggagggccagattacctactacaacagatacaagagacagaacgtagtcaaggacctgtccgtcgagctggatagactgagcgaagaatctgtgaacaacgacatctcctcctggacaaagggcagaagcggagaagctctgagcctcctgaagaaaagattctcccatagacccgtgcaggagaagttcgtgtgcctgaactgcggcttcgagacacacgcagccgagcaagccgccctgaacatcgccagatcctggctgttcctgcggagccaggagtacaagaaataccagacaaacaagacaaccggcaacaccgataagagagccttcgtcgagacctggcagtccttttaccggaagaagcttaaggaggtgtggaaacctgccgtgcggtctggcggatctggcggaggctcctgcaacagctggatcagccccagcgacgtggccatcaacttcagcaaggaggagtgggagtgcctgcaccccagccagaaggacctgtacagggacgtgatgctggagaactacagcaacctggtgagcgtgggcctgagcgagagcaagcccgagctggtgacctgcctggaggagaacaaggagccctggatggtgaacatcgacgaggccgagggcctgggccagggcgtgttctgctacggcggcccaagcagcggcgcccctcctcccagcggcggcagcccagccggctccccaacctctaccgaggagggcacctctgagtccgccacccccgagagcggccctggcacctccaccgagcccagcgagggcagcgcacccggcagccctgccggcagccccacctccacagaggagggaaccagcaccgagcccagcgaaggcagcgccccaggcaccagcaccgagcctagtgagcaggagattaaacggatcaacaagatcagaagaagacttgtgaaagacagcaacaccaagaaggccggcaagacaggccccatgaaaaccctgctggttagagtgatgacacccgatctgagagagcggctggaaaacctgagaaagaagcctgaaaatatcccccagcccatcagcaatacatctagagccaacctgaataagctgctgaccgattacaccgaaatgaagaaggcgatcctgcatgtgtactgggaagagttccagaaggaccctgtgggcctgatgagccgggtggcccagcctgccagcaagaagatcgatcagaacaagctgaaacctgagatggacgagaagggcaacctgaccaccgccggctttgcctgctctcagtgtggccagcccctgttcgtgtacaagctggagcaggtgtctgagaagggcaaggcttacaccaactacttcggacggtgcaatgtggccgagcacgaaaagctgatcctgctggcccagctgaagcccgagaaggatagcgacgaagccgtgacatatagcctgggaaagtttgggcagagggccctggatttctacagcattcatgtgaccaaggagtccacccaccccgtgaagcccctggcccagatcgccggaaacagatacgcctccggacctgtgggaaaggccctgagcgacgcatgtatgggcacaatcgcctccttcctgtctaagtaccaggacatcatcatcgaacaccagaaggtggtgaagggcaaccagaagagactggagagcctgcgggagctggccggcaaggaaaacctggaataccctagcgtgaccctgccacctcagcctcacaccaaggagggcgttgatgcctacaacgaagtgatcgcccgggtgcgaatgtgggtgaacctgaacctgtggcagaagctgaagctaagcagagatgatgccaagcctctgctgagactgaagggattcccttcctttcctctggtcgagagacaggccaacgaagtggactggtgggacatggtgtgtaacgtgaagaagctgatcaacgagaaaaaggaggatggcaaggtgttttggcagaatctggctggctacaagagacaggaagccctgagaccatacctgagcagcgaggaagatcggaagaagggaaagaaattcgctcggtaccagctgggcgacctgctgctgcacctggaaaagaagcacggcgaggactggggaaaggtgtacgacgaggcctgggagcggattgacaagaaagtggaaggcctgagcaagcacatcaagctggaagaggaacggagaagcgaggacgcccagagcaaggccgccctgaccgactggctgcgggctaaggccagcttcgtgatcgagggcctgaaggaggccgacaaggacgagttctgcagatgcgagctgaagctgcagaagtggtacggggacctgcggggaaagcccttcgccatcgaagccgagaacagcatcctggacatcagcggcttcagcaagcagtacaactgtgccttcatctggcagaaggacggcgtgaagaagctgaacctgtacctgatcatcaactacttcaagggcggcaagctgcggttcaagaagatcaaacctgaagccttcgaagccaacagattctacaccgtgatcaacaaaaagagcggcgagatcgtgcccatggaggtgaacttcaacttcgacgaccccaacctgatcatcctgcctctggcctttggcaagagacagggcagagaattcatctggaacgacctgctgtccctggaaaccggcagcctgaagctggccaacggaagagtgatcgagaagacactgtacaacagaagaacccggcaggatgagcctgccctgttcgtggccctgaccttcgagcggcgggaggtcctggactcctccaatatcaaaccaatgaacctgatcggcgtggcaagaggcgaaaacatccccgccgtgatcgccctgaccgaccccgagggctgcccactgagccggtttaaggatagcctgggaaacccaacccacatcctgagaatcggcgagagctataaggagaagcagcggaccatccaggccaagaaggaggtggagcagcggagagccggcggctacagccggaagtacgccagcaaagccaagaatctggcagacgatatggtgagaaacaccgctagagatctgctgtactacgccgtgacccaggatgccatgctgatcttcgccaacctgagccggggcttcggccggcagggcaagcggaccttcatggccgagagacagtacacacggatggaggactggctgaccgccaagctggcctacgagggcctgagcaagacctacctgtccaagacactggcccagtacacctccaagacatgcagcaactgtgggtttaccatcaccagcgccgactacgacagggtgctggagaagctgaagaagacagcaacaggctggatgaccacaattaacggcaaggagctgaaggtggagggccagattacctactacaacagatacaagagacagaacgtagtcaaggacctgtccgtcgagctggatagactgagcgaagaatctgtgaacaacgacatctcctcctggacaaagggcagaagcggagaagctctgagcctcctgaagaaaagattctcccatagacccgtgcaggagaagttcgtgtgcctgaactgcggcttcgagacacacgcagccgagcaagccgccctgaacatcgccagatcctggctgttcctgcggagccaggagtacaagaaataccagacaaacaagacaaccggcaacaccgataagagagccttcgtcgagacctggcagtccttttaccggaagaagcttaaggaggtgtggaaacctgccgtgcggtctggcggatctggcggaggctccttgcaacagctggatcagccccagcgacgtggccatcaacttcagcaaggaggagtgggagtgcctgcaccccagccagaaggacctgtacagggacgtgatgctggagaactacagcaacctggtgagcgtgggcctgagcgagagcaagcccgagctggtgacctgcctggaggagaacaaggagccctggatggtgaacatcgacgaggccgagggcctgggccagggcgtgttctgctacggatctggctccggcagcggccccaagaaaaagagaaaagtctaagctgccttctgcggggcttgccttctggccatgcccttcttctctcccttgcacctgtacctcttggtctttgaataaagcctgagtaggaaggctagcaaaaaaaaaaaaaaaaaaaaaaaaaaaaaaaaaaaaaaaaaaaaaaaaaaaaaaaaaaaaaaaaaaaaaaaaaaaaaaaa

SEQ ID NO: 15839 - RNA, 9485 nt, synthetic construct
  source 1..9485: mol_type = other RNA
aggaaataagagagaaaagaagagtaagaagaaatataagagccaccatggcccctaagaagaagcgtaaagtgagccggatggaacgcctcgtctacgaggtgcggcagaagtgcagaaacatcgaggacatctgcatctcctgcggatctctgaacgtgaccctggagcacccactgttcatcggcggcatgtgccagaactgtaaaaactgttttctggagtgtgcctatcaatacgacgatgacggctaccagagctactgcaccatctgttgcggcggaagagaggtgctgatgtgtggaaataacaactgctgccggtgcttctgcgtggaatgcgtggacctgctggtgggccccggcgccgcccaggccgctattaaggaagatccttggaactgctacatgtgcggccacaagggcacatacggcctgctgagacggagagaggactggcctagcagactgcagatgttcttcgccaataaccacgaccaggagttcgacccccctaaggtgtaccctcccgtccccgccgagaagagaaagcccatccgggtcctgagcctgttcgatggcatcgccaccggtctgctggtgctgaaggacctgggcatccaggtggataggtacattgcctccgaggtgtgcgaggactccatcaccgtgggaatggtgcgtcatcagggcaagatcatgtacgtgggcgacgtgcggagcgtgacacagaagcatatccaggagtggggccctttcgacctggtgatcggcggcagcccttgcaatgacctgagcatcgtgaacccagcccggaagggcctgtacgagggaaccggcagactgttcttcgagttttacagactgctgcacgacgcccggcctaaggaaggcgacgaccggcccttcttttggctgttcgagaatgtggtggccatgggagtcagcgacaagcgggatattagccggttcctggagagcaaccccgtgatgatcgatgccaaggaagtgagcgccgcccaccgggccagatacttctggggcaatctgcctggcatgaacagacccctggccagcaccgtgaacgacaagctggagctgcaggagtgcctggagcacggccggatcgccaagttcagcaaggtgagaaccatcaccacccgaagcaacagcatcaaacaaggcaaggaccagcactttcctgtgttcatgaacgagaaggaggacatcctgtggtgtaccgagatggagagagtgttcgggttcccagtccactacacagatgtcagcaacatgtctagactggccagacagagactgctgggaagaagctggtccgtccctgtgatcagacacctgttcgcccctctgaaggagtacttcgcctgcgtgagcagcggcaacagcaacgccaacagccggggccccagcttctctagcggcctggtgccactgtccctgagagggagccacatgggccccatggagatctacaaaaccgtgagcgcctggaagcggcagcctgtgcgcgtgctgagcctgtttcggaatatcgataaagtcctgaaaagcctgggattcctggagagcggctctggctccggcggtggcaccctgaagtacgtggaggatgtgacaaacgtggtcagacgggatgtggagaagtggggccccttcgatctggtgtacggcagcacccaacccctgggcagctcttgtgaccggtgccctggctggtacatgtttcagttccaccggatcctgcagtacgccctgccgagacaggagtcccagcggccattcttttggattttcatggacaacttgctgctgaccgaggatgaccaggaaactaccactcggttcctgcagaccgaagccgtgaccctgcaggacgtgagaggccgggactaccagaacgccatgcgggtgtggtccaacatccctggactgaaaagcaagcacgcacctctgacccctaaagaagaggagtacctgcaggcccaggtgcggagcagaagcaagctggacgcccctaaggtggatctgctggtgaagaattgcctcctgcccctgagagagtacttcaagtatttcagccagaatagtctgcccctgggaggcagcggcggcggcgccctggtgacatttgaggacgtcgccgtgcggttcacccaggaggaatgggctctgctggatccttctcagaaaatcctgtaccgggacgtgatgagagagacataccggaatctgacctccgtgggcatcaactgggaatgttgggaccttgaagcctgcttcagaagcctgggaagaaacctgagagtgcaggtggtgaagagaaagtgcgagctgaccaacagcggcccctgcgccgagggcggcccaagcagcggcgcccctcctcccagcggcggcagcccagccggctccccaacctctaccgaggagggcacctctgagtccgccacccccgagagcggccctggcacctccaccgagcccagcgagggcagcgcacccggcagccctgccggcagccccacctccacagaggagggaaccagcaccgagcccagcgaaggcagcgccccaggcaccagcaccgagcctagtgagcaggagattaaacggatcaacaagatcagaagaagacttgtgaaagacagcaacaccaagaaggccggcaagacaggccccatgaaaaccctgctggttagagtgatgacacccgatctgagagagcggctggaaaacctgagaaagaagcctgaaaatatcccccagcccatcagcaatacatctagagccaacctgaataagctgctgaccgattacaccgaaatgaagaaggcgatcctgcatgtgtactgggaagagttccagaaggaccctgtgggcctgatgagccgggtggcccagcctgccagcaagaagatcgatcagaacaagctgaaacctgagatggacgagaagggcaacctgaccaccgccggctttgcctgctctcagtgtggccagcccctgttcgtgtacaagctggagcaggtgtctgagaagggcaaggcttacaccaactacttcggacggtgcaatgtggccgagcacgaaaagctgatcctgctggcccagctgaagcccgagaaggatagcgacgaagccgtgacatatagcctgggaaagtttgggcagagggccctggatttctacagcattcatgtgaccaaggagtccacccaccccgtgaagcccctggcccagatcgccggaaacagatacgcctccggacctgtgggaaaggccctgagcgacgcatgtatgggcacaatcgcctccttcctgtctaagtaccaggacatcatcatcgaacaccagaaggtggtgaagggcaaccagaagagactggagagcctgcgggagctggccggcaaggaaaacctggaataccctagcgtgaccctgccacctcagcctcacaccaaggagggcgttgatgcctacaacgaagtgatcgcccgggtgcgaatgtgggtgaacctgaacctgtggcagaagctgaagctaagcagagatgatgccaagcctctgctgagactgaagggattcccttcctttcctctggtcgagagacaggccaacgaagtggactggtgggacatggtgtgtaacgtgaagaagctgatcaacgagaaaaaggaggatggcaaggtgttttggcagaatctggctggctacaagagacaggaagccctgagaccatacctgagcagcgaggaagatcggaagaagggaaagaaattcgctcggtaccagctgggcgacctgctgctgcacctggaaaagaagcacggcgaggactggggaaaggtgtacgacgaggcctgggagcggattgacaagaaagtggaaggcctgagcaagcacatcaagctggaagaggaacggagaagcgaggacgcccagagcaaggccgccctgaccgactggctgcgggctaaggccagcttcgtgatcgagggcctgaaggaggccgacaaggacgagttctgcagatgcgagctgaagctgcagaagtggtacggggacctgcggggaaagcccttcgccatcgaagccgagaacagcatcctggacatcagcggcttcagcaagcagtacaactgtgccttcatctggcagaaggacggcgtgaagaagctgaacctgtacctgatcatcaactacttcaagggcggcaagctgcggttcaagaagatcaaacctgaagccttcgaagccaacagattctacaccgtgatcaacaaaaagagcggcgagatcgtgcccatggaggtgaacttcaacttcgacgaccccaacctgatcatcctgcctctggcctttggcaagagacagggcagagaattcatctggaacgacctgctgtccctggaaaccggcagcctgaagctggccaacggaagagtgatcgagaagacactgtacaacagaagaacccggcaggatgagcctgccctgttcgtggccctgaccttcgagcggcgggaggtcctggactcctccaatatcaaaccaatgaacctgatcggcgtggcaagaggcgaaaacatccccgccgtgatcgccctgaccgaccccgagggctgcccactgagccggtttaaggatagcctgggaaacccaacccacatcctgagaatcggcgagagctataaggagaagcagcggaccatccaggccaagaaggaggtggagcagcggagagccggcggctacagccggaagtacgccagcaaagccaagaatctggcagacgatatggtgagaaacaccgctagagatctgctgtactacgccgtgacccaggatgccatgctgatcttcgccaacctgagccggggcttcggccggcagggcaagcggaccttcatggccgagagacagtacacacggatggaggactggctgaccgccaagctggcctacgagggcctgagcaagacctacctgtccaagacactggcccagtacacctccaagacatgcagcaactgtgggtttaccatcaccagcgccgactacgacagggtgctggagaagctgaagaagacagcaacaggctggatgaccacaattaacggcaaggagctgaaggtggagggccagattacctactacaacagatacaagagacagaacgtagtcaaggacctgtccgtcgagctggatagactgagcgaagaatctgtgaacaacgacatctcctcctggacaaagggcagaagcggagaagctctgagcctcctgaagaaaagattctcccatagacccgtgcaggagaagttcgtgtgcctgaactgcggcttcgagacacacgcagccgagcaagccgccctgaacatcgccagatcctggctgttcctgcggagccaggagtacaagaaataccagacaaacaagacaaccggcaacaccgataagagagccttcgtcgagacctggcagtccttttaccggaagaagcttaaggaggtgtggaaacctgccgtgcggtctggcggatctggcggaggctccgcccacgagagcctggccttcagggacgtggccatcgacctgagccaggaggagtgggagtgcctggacaccgcccagagggacctgtacagggaggtgatgctggagaactacagcaacctgatcagcctgggctgcatcatccccaagcccgacgtgatcgtgctgctggagcaggagaaggacccctggctggagaccagggaggagaccaggaggaggagcagcgacttcaccaagaagggcggcccaagcagcggcgcccctcctcccagcggcggcagcccagccggctccccaacctctaccgaggagggcacctctgagtccgccacccccgagagcggccctggcacctccaccgagcccagcgagggcagcgcacccggcagccctgccggcagccccacctccacagaggagggaaccagcaccgagcccagcgaaggcagcgccccaggcaccagcaccgagcctagtgagcaggagattaaacggatcaacaagatcagaagaagacttgtgaaagacagcaacaccaagaaggccggcaagacaggccccatgaaaaccctgctggttagagtgatgacacccgatctgagagagcggctggaaaacctgagaaagaagcctgaaaatatcccccagcccatcagcaatacatctagagccaacctgaataagctgctgaccgattacaccgaaatgaagaaggcgatcctgcatgtgtactgggaagagttccagaaggaccctgtgggcctgatgagccgggtggcccagcctgccagcaagaagatcgatcagaacaagctgaaacctgagatggacgagaagggcaacctgaccaccgccggctttgcctgctctcagtgtggccagcccctgttcgtgtacaagctggagcaggtgtctgagaagggcaaggcttacaccaactacttcggacggtgcaatgtggccgagcacgaaaagctgatcctgctggcccagctgaagcccgagaaggatagcgacgaagccgtgacatatagcctgggaaagtttgggcagagggccctggatttctacagcattcatgtgaccaaggagtccacccaccccgtgaagcccctggcccagatcgccggaaacagatacgcctccggacctgtgggaaaggccctgagcgacgcatgtatgggcacaatcgcctccttcctgtctaagtaccaggacatcatcatcgaacaccagaaggtggtgaagggcaaccagaagagactggagagcctgcgggagctggccggcaaggaaaacctggaataccctagcgtgaccctgccacctcagcctcacaccaaggagggcgttgatgcctacaacgaagtgatcgcccgggtgcgaatgtgggtgaacctgaacctgtggcagaagctgaagctaagcagagatgatgccaagcctctgctgagactgaagggattcccttcctttcctctggtcgagagacaggccaacgaagtggactggtgggacatggtgtgtaacgtgaagaagctgatcaacgagaaaaaggaggatggcaaggtgttttggcagaatctggctggctacaagagacaggaagccctgagaccatacctgagcagcgaggaagatcggaagaagggaaagaaattcgctcggtaccagctgggcgacctgctgctgcacctggaaaagaagcacggcgaggactggggaaaggtgtacgacgaggcctgggagcggattgacaagaaagtggaaggcctgagcaagcacatcaagctggaagaggaacggagaagcgaggacgcccagagcaaggccgccctgaccgactggctgcgggctaaggccagcttcgtgatcgagggcctgaaggaggccgacaaggacgagttctgcagatgcgagctgaagctgcagaagtggtacggggacctgcggggaaagcccttcgccatcgaagccgagaacagcatcctggacatcagcggcttcagcaagcagtacaactgtgccttcatctggcagaaggacggcgtgaagaagctgaacctgtacctgatcatcaactacttcaagggcggcaagctgcggttcaagaagatcaaacctgaagccttcgaagccaacagattctacaccgtgatcaacaaaaagagcggcgagatcgtgcccatggaggtgaacttcaacttcgacgaccccaacctgatcatcctgcctctggcctttggcaagagacagggcagagaattcatctggaacgacctgctgtccctggaaaccggcagcctgaagctggccaacggaagagtgatcgagaagacactgtacaacagaagaacccggcaggatgagcctgccctgttcgtggccctgaccttcgagcggcgggaggtcctggactcctccaatatcaaaccaatgaacctgatcggcgtggcaagaggcgaaaacatccccgccgtgatcgccctgaccgaccccgagggctgcccactgagccggtttaaggatagcctgggaaacccaacccacatcctgagaatcggcgagagctataaggagaagcagcggaccatccaggccaagaaggaggtggagcagcggagagccggcggctacagccggaagtacgccagcaaagccaagaatctggcagacgatatggtgagaaacaccgctagagatctgctgtactacgccgtgacccaggatgccatgctgatcttcgccaacctgagccggggcttcggccggcagggcaagcggaccttcatggccgagagacagtacacacggatggaggactggctgaccgccaagctggcctacgagggcctgagcaagacctacctgtccaagacactggcccagtacacctccaagacatgcagcaactgtgggtttaccatcaccagcgccgactacgacagggtgctggagaagctgaagaagacagcaacaggctggatgaccacaattaacggcaaggagctgaaggtggagggccagattacctactacaacagatacaagagacagaacgtagtcaaggacctgtccgtcgagctggatagactgagcgaagaatctgtgaacaacgacatctcctcctggacaaagggcagaagcggagaagctctgagcctcctgaagaaaagattctcccatagacccgtgcaggagaagttcgtgtgcctgaactgcggcttcgagacacacgcagccgagcaagccgccctgaacatcgccagatcctggctgttcctgcggagccaggagtacaagaaataccagacaaacaagacaaccggcaacaccgataagagagccttcgtcgagacctggcagtccttttaccggaagaagcttaaggaggtgtggaaacctgccgtgcggtctggcggatctggcggaggctcctgcccacgagagcctggccttcagggacgtggccatcgacctgagccaggaggagtgggagtgcctggacaccgcccagagggacctgtacagggaggtgatgctggagaactacagcaacctgatcagcctgggctgcatcatccccaagcccgacgtgatcgtgctgctggagcaggagaaggacccctggctggagaccagggaggagaccaggaggaggagcagcgacttcaccaagaagggatctggctccggcagcggccccaagaaaaagagaaaagtctaagctgccttctgcggggcttgccttctggccatgcccttcttctctcccttgcacctgtacctcttggtctttgaataaagcctgagtaggaaggctagcaaaaaaaaaaaaaaaaaaaaaaaaaaaaaaaaaaaaaaaaaaaaaaaaaaaaaaaaaaaaaaaaaaaaaaaaaaaaaaaa

SEQ ID NO: 15840 - RNA, 9485 nt, synthetic construct
  source 1..9485: mol_type = other RNA
aggaaataagagagaaaagaagagtaagaagaaatataagagccaccatggcccctaagaagaagcgtaaagtgagccggatggaacgcctcgtctacgaggtgcggcagaagtgcagaaacatcgaggacatctgcatctcctgcggatctctgaacgtgaccctggagcacccactgttcatcggcggcatgtgccagaactgtaaaaactgttttctggagtgtgcctatcaatacgacgatgacggctaccagagctactgcaccatctgttgcggcggaagagaggtgctgatgtgtggaaataacaactgctgccggtgcttctgcgtggaatgcgtggacctgctggtgggccccggcgccgcccaggccgctattaaggaagatccttggaactgctacatgtgcggccacaagggcacatacggcctgctgagacggagagaggactggcctagcagactgcagatgttcttcgccaataaccacgaccaggagttcgacccccctaaggtgtaccctcccgtccccgccgagaagagaaagcccatccgggtcctgagcctgttcgatggcatcgccaccggtctgctggtgctgaaggacctgggcatccaggtggataggtacattgcctccgaggtgtgcgaggactccatcaccgtgggaatggtgcgtcatcagggcaagatcatgtacgtgggcgacgtgcggagcgtgacacagaagcatatccaggagtggggccctttcgacctggtgatcggcggcagcccttgcaatgacctgagcatcgtgaacccagcccggaagggcctgtacgagggaaccggcagactgttcttcgagttttacagactgctgcacgacgcccggcctaaggaaggcgacgaccggcccttcttttggctgttcgagaatgtggtggccatgggagtcagcgacaagcgggatattagccggttcctggagagcaaccccgtgatgatcgatgccaaggaagtgagcgccgcccaccgggccagatacttctggggcaatctgcctggcatgaacagacccctggccagcaccgtgaacgacaagctggagctgcaggagtgcctggagcacggccggatcgccaagttcagcaaggtgagaaccatcaccacccgaagcaacagcatcaaacaaggcaaggaccagcactttcctgtgttcatgaacgagaaggaggacatcctgtggtgtaccgagatggagagagtgttcgggttcccagtccactacacagatgtcagcaacatgtctagactggccagacagagactgctgggaagaagctggtccgtccctgtgatcagacacctgttcgcccctctgaaggagtacttcgcctgcgtgagcagcggcaacagcaacgccaacagccggggccccagcttctctagcggcctggtgccactgtccctgagagggagccacatgggccccatggagatctacaaaaccgtgagcgcctggaagcggcagcctgtgcgcgtgctgagcctgtttcggaatatcgataaagtcctgaaaagcctgggattcctggagagcggctctggctccggcggtggcaccctgaagtacgtggaggatgtgacaaacgtggtcagacgggatgtggagaagtggggccccttcgatctggtgtacggcagcacccaacccctgggcagctcttgtgaccggtgccctggctggtacatgtttcagttccaccggatcctgcagtacgccctgccgagacaggagtcccagcggccattcttttggattttcatggacaacttgctgctgaccgaggatgaccaggaaactaccactcggttcctgcagaccgaagccgtgaccctgcaggacgtgagaggccgggactaccagaacgccatgcgggtgtggtccaacatccctggactgaaaagcaagcacgcacctctgacccctaaagaagaggagtacctgcaggcccaggtgcggagcagaagcaagctggacgcccctaaggtggatctgctggtgaagaattgcctcctgcccctgagagagtacttcaagtatttcagccagaatagtctgcccctgggaggcagcggcggcggcgccctggtgacatttgaggacgtcgccgtgcggttcacccaggaggaatgggctctgctggatccttctcagaaaatcctgtaccgggacgtgatgagagagacataccggaatctgacctccgtgggcatcaactgggaatgttgggaccttgaagcctgcttcagaagcctgggaagaaacctgagagtgcaggtggtgaagagaaagtgcgagctgaccaacagcggcccctgcgccgagggcggcccaagcagcggcgcccctcctcccagcggcggcagcccagccggctccccaacctctaccgaggagggcacctctgagtccgccacccccgagagcggccctggcacctccaccgagcccagcgagggcagcgcacccggcagccctgccggcagccccacctccacagaggagggaaccagcaccgagcccagcgaaggcagcgccccaggcaccagcaccgagcctagtgagcaggagattaaacggatcaacaagatcagaagaagacttgtgaaagacagcaacaccaagaaggccggcaagacaggccccatgaaaaccctgctggttagagtgatgacacccgatctgagagagcggctggaaaacctgagaaagaagcctgaaaatatcccccagcccatcagcaatacatctagagccaacctgaataagctgctgaccgattacaccgaaatgaagaaggcgatcctgcatgtgtactgggaagagttccagaaggaccctgtgggcctgatgagccgggtggcccagcctgccagcaagaagatcgatcagaacaagctgaaacctgagatggacgagaagggcaacctgaccaccgccggctttgcctgctctcagtgtggccagcccctgttcgtgtacaagctggagcaggtgtctgagaagggcaaggcttacaccaactacttcggacggtgcaatgtggccgagcacgaaaagctgatcctgctggcccagctgaagcccgagaaggatagcgacgaagccgtgacatatagcctgggaaagtttgggcagagggccctggatttctacagcattcatgtgaccaaggagtccacccaccccgtgaagcccctggcccagatcgccggaaacagatacgcctccggacctgtgggaaaggccctgagcgacgcatgtatgggcacaatcgcctccttcctgtctaagtaccaggacatcatcatcgaacaccagaaggtggtgaagggcaaccagaagagactggagagcctgcgggagctggccggcaaggaaaacctggaataccctagcgtgaccctgccacctcagcctcacaccaaggagggcgttgatgcctacaacgaagtgatcgcccgggtgcgaatgtgggtgaacctgaacctgtggcagaagctgaagctaagcagagatgatgccaagcctctgctgagactgaagggattcccttcctttcctctggtcgagagacaggccaacgaagtggactggtgggacatggtgtgtaacgtgaagaagctgatcaacgagaaaaaggaggatggcaaggtgttttggcagaatctggctggctacaagagacaggaagccctgagaccatacctgagcagcgaggaagatcggaagaagggaaagaaattcgctcggtaccagctgggcgacctgctgctgcacctggaaaagaagcacggcgaggactggggaaaggtgtacgacgaggcctgggagcggattgacaagaaagtggaaggcctgagcaagcacatcaagctggaagaggaacggagaagcgaggacgcccagagcaaggccgccctgaccgactggctgcgggctaaggccagcttcgtgatcgagggcctgaaggaggccgacaaggacgagttctgcagatgcgagctgaagctgcagaagtggtacggggacctgcggggaaagcccttcgccatcgaagccgagaacagcatcctggacatcagcggcttcagcaagcagtacaactgtgccttcatctggcagaaggacggcgtgaagaagctgaacctgtacctgatcatcaactacttcaagggcggcaagctgcggttcaagaagatcaaacctgaagccttcgaagccaacagattctacaccgtgatcaacaaaaagagcggcgagatcgtgcccatggaggtgaacttcaacttcgacgaccccaacctgatcatcctgcctctggcctttggcaagagacagggcagagaattcatctggaacgacctgctgtccctggaaaccggcagcctgaagctggccaacggaagagtgatcgagaagacactgtacaacagaagaacccggcaggatgagcctgccctgttcgtggccctgaccttcgagcggcgggaggtcctggactcctccaatatcaaaccaatgaacctgatcggcgtggcaagaggcgaaaacatccccgccgtgatcgccctgaccgaccccgagggctgcccactgagccggtttaaggatagcctgggaaacccaacccacatcctgagaatcggcgagagctataaggagaagcagcggaccatccaggccaagaaggaggtggagcagcggagagccggcggctacagccggaagtacgccagcaaagccaagaatctggcagacgatatggtgagaaacaccgctagagatctgctgtactacgccgtgacccaggatgccatgctgatcttcgccaacctgagccggggcttcggccggcagggcaagcggaccttcatggccgagagacagtacacacggatggaggactggctgaccgccaagctggcctacgagggcctgagcaagacctacctgtccaagacactggcccagtacacctccaagacatgcagcaactgtgggtttaccatcaccagcgccgactacgacagggtgctggagaagctgaagaagacagcaacaggctggatgaccacaattaacggcaaggagctgaaggtggagggccagattacctactacaacagatacaagagacagaacgtagtcaaggacctgtccgtcgagctggatagactgagcgaagaatctgtgaacaacgacatctcctcctggacaaagggcagaagcggagaagctctgagcctcctgaagaaaagattctcccatagacccgtgcaggagaagttcgtgtgcctgaactgcggcttcgagacacacgcagccgagcaagccgccctgaacatcgccagatcctggctgttcctgcggagccaggagtacaagaaataccagacaaacaagacaaccggcaacaccgataagagagccttcgtcgagacctggcagtccttttaccggaagaagcttaaggaggtgtggaaacctgccgtgcggtctggcggatctggcggaggctccaggcccggcgccgtgagcttcgccgacgtggccgtgtacttcagccccgaggagtggggctgcctgaggcccgcccagagggccctgtacagggaggtgatgagggagacctacggccacctgggcgccctgggcttccccggccccaagcccgccctgatcagctggatggagcaggagagcgaggcctggagccccgacgcccaggaccccgaggagggcgagagcctgggcggcgccctgggcggcccaagcagcggcgcccctcctcccagcggcggcagcccagccggctccccaacctctaccgaggagggcacctctgagtccgccacccccgagagcggccctggcacctccaccgagcccagcgagggcagcgcacccggcagccctgccggcagccccacctccacagaggagggaaccagcaccgagcccagcgaaggcagcgccccaggcaccagcaccgagcctagtgagcaggagattaaacggatcaacaagatcagaagaagacttgtgaaagacagcaacaccaagaaggccggcaagacaggccccatgaaaaccctgctggttagagtgatgacacccgatctgagagagcggctggaaaacctgagaaagaagcctgaaaatatcccccagcccatcagcaatacatctagagccaacctgaataagctgctgaccgattacaccgaaatgaagaaggcgatcctgcatgtgtactgggaagagttccagaaggaccctgtgggcctgatgagccgggtggcccagcctgccagcaagaagatcgatcagaacaagctgaaacctgagatggacgagaagggcaacctgaccaccgccggctttgcctgctctcagtgtggccagcccctgttcgtgtacaagctggagcaggtgtctgagaagggcaaggcttacaccaactacttcggacggtgcaatgtggccgagcacgaaaagctgatcctgctggcccagctgaagcccgagaaggatagcgacgaagccgtgacatatagcctgggaaagtttgggcagagggccctggatttctacagcattcatgtgaccaaggagtccacccaccccgtgaagcccctggcccagatcgccggaaacagatacgcctccggacctgtgggaaaggccctgagcgacgcatgtatgggcacaatcgcctccttcctgtctaagtaccaggacatcatcatcgaacaccagaaggtggtgaagggcaaccagaagagactggagagcctgcgggagctggccggcaaggaaaacctggaataccctagcgtgaccctgccacctcagcctcacaccaaggagggcgttgatgcctacaacgaagtgatcgcccgggtgcgaatgtgggtgaacctgaacctgtggcagaagctgaagctaagcagagatgatgccaagcctctgctgagactgaagggattcccttcctttcctctggtcgagagacaggccaacgaagtggactggtgggacatggtgtgtaacgtgaagaagctgatcaacgagaaaaaggaggatggcaaggtgttttggcagaatctggctggctacaagagacaggaagccctgagaccatacctgagcagcgaggaagatcggaagaagggaaagaaattcgctcggtaccagctgggcgacctgctgctgcacctggaaaagaagcacggcgaggactggggaaaggtgtacgacgaggcctgggagcggattgacaagaaagtggaaggcctgagcaagcacatcaagctggaagaggaacggagaagcgaggacgcccagagcaaggccgccctgaccgactggctgcgggctaaggccagcttcgtgatcgagggcctgaaggaggccgacaaggacgagttctgcagatgcgagctgaagctgcagaagtggtacggggacctgcggggaaagcccttcgccatcgaagccgagaacagcatcctggacatcagcggcttcagcaagcagtacaactgtgccttcatctggcagaaggacggcgtgaagaagctgaacctgtacctgatcatcaactacttcaagggcggcaagctgcggttcaagaagatcaaacctgaagccttcgaagccaacagattctacaccgtgatcaacaaaaagagcggcgagatcgtgcccatggaggtgaacttcaacttcgacgaccccaacctgatcatcctgcctctggcctttggcaagagacagggcagagaattcatctggaacgacctgctgtccctggaaaccggcagcctgaagctggccaacggaagagtgatcgagaagacactgtacaacagaagaacccggcaggatgagcctgccctgttcgtggccctgaccttcgagcggcgggaggtcctggactcctccaatatcaaaccaatgaacctgatcggcgtggcaagaggcgaaaacatccccgccgtgatcgccctgaccgaccccgagggctgcccactgagccggtttaaggatagcctgggaaacccaacccacatcctgagaatcggcgagagctataaggagaagcagcggaccatccaggccaagaaggaggtggagcagcggagagccggcggctacagccggaagtacgccagcaaagccaagaatctggcagacgatatggtgagaaacaccgctagagatctgctgtactacgccgtgacccaggatgccatgctgatcttcgccaacctgagccggggcttcggccggcagggcaagcggaccttcatggccgagagacagtacacacggatggaggactggctgaccgccaagctggcctacgagggcctgagcaagacctacctgtccaagacactggcccagtacacctccaagacatgcagcaactgtgggtttaccatcaccagcgccgactacgacagggtgctggagaagctgaagaagacagcaacaggctggatgaccacaattaacggcaaggagctgaaggtggagggccagattacctactacaacagatacaagagacagaacgtagtcaaggacctgtccgtcgagctggatagactgagcgaagaatctgtgaacaacgacatctcctcctggacaaagggcagaagcggagaagctctgagcctcctgaagaaaagattctcccatagacccgtgcaggagaagttcgtgtgcctgaactgcggcttcgagacacacgcagccgagcaagccgccctgaacatcgccagatcctggctgttcctgcggagccaggagtacaagaaataccagacaaacaagacaaccggcaacaccgataagagagccttcgtcgagacctggcagtccttttaccggaagaagcttaaggaggtgtggaaacctgccgtgcggtctggcggatctggcggaggctcctaggcccggcgccgtgagcttcgccgacgtggccgtgtacttcagccccgaggagtggggctgcctgaggcccgcccagagggccctgtacagggaggtgatgagggagacctacggccacctgggcgccctgggcttccccggccccaagcccgccctgatcagctggatggagcaggagagcgaggcctggagccccgacgcccaggaccccgaggagggcgagagcctgggcggcgccctgggatctggctccggcagcggccccaagaaaaagagaaaagtctaagctgccttctgcggggcttgccttctggccatgcccttcttctctcccttgcacctgtacctcttggtctttgaataaagcctgagtaggaaggctagcaaaaaaaaaaaaaaaaaaaaaaaaaaaaaaaaaaaaaaaaaaaaaaaaaaaaaaaaaaaaaaaaaaaaaaaaaaaaaaaa

SEQ ID NO: 15841 - RNA, 9485 nt, synthetic construct
  source 1..9485: mol_type = other RNA
aggaaataagagagaaaagaagagtaagaagaaatataagagccaccatggcccctaagaagaagcgtaaagtgagccggatggaacgcctcgtctacgaggtgcggcagaagtgcagaaacatcgaggacatctgcatctcctgcggatctctgaacgtgaccctggagcacccactgttcatcggcggcatgtgccagaactgtaaaaactgttttctggagtgtgcctatcaatacgacgatgacggctaccagagctactgcaccatctgttgcggcggaagagaggtgctgatgtgtggaaataacaactgctgccggtgcttctgcgtggaatgcgtggacctgctggtgggccccggcgccgcccaggccgctattaaggaagatccttggaactgctacatgtgcggccacaagggcacatacggcctgctgagacggagagaggactggcctagcagactgcagatgttcttcgccaataaccacgaccaggagttcgacccccctaaggtgtaccctcccgtccccgccgagaagagaaagcccatccgggtcctgagcctgttcgatggcatcgccaccggtctgctggtgctgaaggacctgggcatccaggtggataggtacattgcctccgaggtgtgcgaggactccatcaccgtgggaatggtgcgtcatcagggcaagatcatgtacgtgggcgacgtgcggagcgtgacacagaagcatatccaggagtggggccctttcgacctggtgatcggcggcagcccttgcaatgacctgagcatcgtgaacccagcccggaagggcctgtacgagggaaccggcagactgttcttcgagttttacagactgctgcacgacgcccggcctaaggaaggcgacgaccggcccttcttttggctgttcgagaatgtggtggccatgggagtcagcgacaagcgggatattagccggttcctggagagcaaccccgtgatgatcgatgccaaggaagtgagcgccgcccaccgggccagatacttctggggcaatctgcctggcatgaacagacccctggccagcaccgtgaacgacaagctggagctgcaggagtgcctggagcacggccggatcgccaagttcagcaaggtgagaaccatcaccacccgaagcaacagcatcaaacaaggcaaggaccagcactttcctgtgttcatgaacgagaaggaggacatcctgtggtgtaccgagatggagagagtgttcgggttcccagtccactacacagatgtcagcaacatgtctagactggccagacagagactgctgggaagaagctggtccgtccctgtgatcagacacctgttcgcccctctgaaggagtacttcgcctgcgtgagcagcggcaacagcaacgccaacagccggggccccagcttctctagcggcctggtgccactgtccctgagagggagccacatgggccccatggagatctacaaaaccgtgagcgcctggaagcggcagcctgtgcgcgtgctgagcctgtttcggaatatcgataaagtcctgaaaagcctgggattcctggagagcggctctggctccggcggtggcaccctgaagtacgtggaggatgtgacaaacgtggtcagacgggatgtggagaagtggggccccttcgatctggtgtacggcagcacccaacccctgggcagctcttgtgaccggtgccctggctggtacatgtttcagttccaccggatcctgcagtacgccctgccgagacaggagtcccagcggccattcttttggattttcatggacaacttgctgctgaccgaggatgaccaggaaactaccactcggttcctgcagaccgaagccgtgaccctgcaggacgtgagaggccgggactaccagaacgccatgcgggtgtggtccaacatccctggactgaaaagcaagcacgcacctctgacccctaaagaagaggagtacctgcaggcccaggtgcggagcagaagcaagctggacgcccctaaggtggatctgctggtgaagaattgcctcctgcccctgagagagtacttcaagtatttcagccagaatagtctgcccctgggaggcagcggcggcggcgccctggtgacatttgaggacgtcgccgtgcggttcacccaggaggaatgggctctgctggatccttctcagaaaatcctgtaccgggacgtgatgagagagacataccggaatctgacctccgtgggcatcaactgggaatgttgggaccttgaagcctgcttcagaagcctgggaagaaacctgagagtgcaggtggtgaagagaaagtgcgagctgaccaacagcggcccctgcgccgagggcggcccaagcagcggcgcccctcctcccagcggcggcagcccagccggctccccaacctctaccgaggagggcacctctgagtccgccacccccgagagcggccctggcacctccaccgagcccagcgagggcagcgcacccggcagccctgccggcagccccacctccacagaggagggaaccagcaccgagcccagcgaaggcagcgccccaggcaccagcaccgagcctagtgagcaggagattaaacggatcaacaagatcagaagaagacttgtgaaagacagcaacaccaagaaggccggcaagacaggccccatgaaaaccctgctggttagagtgatgacacccgatctgagagagcggctggaaaacctgagaaagaagcctgaaaatatcccccagcccatcagcaatacatctagagccaacctgaataagctgctgaccgattacaccgaaatgaagaaggcgatcctgcatgtgtactgggaagagttccagaaggaccctgtgggcctgatgagccgggtggcccagcctgccagcaagaagatcgatcagaacaagctgaaacctgagatggacgagaagggcaacctgaccaccgccggctttgcctgctctcagtgtggccagcccctgttcgtgtacaagctggagcaggtgtctgagaagggcaaggcttacaccaactacttcggacggtgcaatgtggccgagcacgaaaagctgatcctgctggcccagctgaagcccgagaaggatagcgacgaagccgtgacatatagcctgggaaagtttgggcagagggccctggatttctacagcattcatgtgaccaaggagtccacccaccccgtgaagcccctggcccagatcgccggaaacagatacgcctccggacctgtgggaaaggccctgagcgacgcatgtatgggcacaatcgcctccttcctgtctaagtaccaggacatcatcatcgaacaccagaaggtggtgaagggcaaccagaagagactggagagcctgcgggagctggccggcaaggaaaacctggaataccctagcgtgaccctgccacctcagcctcacaccaaggagggcgttgatgcctacaacgaagtgatcgcccgggtgcgaatgtgggtgaacctgaacctgtggcagaagctgaagctaagcagagatgatgccaagcctctgctgagactgaagggattcccttcctttcctctggtcgagagacaggccaacgaagtggactggtgggacatggtgtgtaacgtgaagaagctgatcaacgagaaaaaggaggatggcaaggtgttttggcagaatctggctggctacaagagacaggaagccctgagaccatacctgagcagcgaggaagatcggaagaagggaaagaaattcgctcggtaccagctgggcgacctgctgctgcacctggaaaagaagcacggcgaggactggggaaaggtgtacgacgaggcctgggagcggattgacaagaaagtggaaggcctgagcaagcacatcaagctggaagaggaacggagaagcgaggacgcccagagcaaggccgccctgaccgactggctgcgggctaaggccagcttcgtgatcgagggcctgaaggaggccgacaaggacgagttctgcagatgcgagctgaagctgcagaagtggtacggggacctgcggggaaagcccttcgccatcgaagccgagaacagcatcctggacatcagcggcttcagcaagcagtacaactgtgccttcatctggcagaaggacggcgtgaagaagctgaacctgtacctgatcatcaactacttcaagggcggcaagctgcggttcaagaagatcaaacctgaagccttcgaagccaacagattctacaccgtgatcaacaaaaagagcggcgagatcgtgcccatggaggtgaacttcaacttcgacgaccccaacctgatcatcctgcctctggcctttggcaagagacagggcagagaattcatctggaacgacctgctgtccctggaaaccggcagcctgaagctggccaacggaagagtgatcgagaagacactgtacaacagaagaacccggcaggatgagcctgccctgttcgtggccctgaccttcgagcggcgggaggtcctggactcctccaatatcaaaccaatgaacctgatcggcgtggcaagaggcgaaaacatccccgccgtgatcgccctgaccgaccccgagggctgcccactgagccggtttaaggatagcctgggaaacccaacccacatcctgagaatcggcgagagctataaggagaagcagcggaccatccaggccaagaaggaggtggagcagcggagagccggcggctacagccggaagtacgccagcaaagccaagaatctggcagacgatatggtgagaaacaccgctagagatctgctgtactacgccgtgacccaggatgccatgctgatcttcgccaacctgagccggggcttcggccggcagggcaagcggaccttcatggccgagagacagtacacacggatggaggactggctgaccgccaagctggcctacgagggcctgagcaagacctacctgtccaagacactggcccagtacacctccaagacatgcagcaactgtgggtttaccatcaccagcgccgactacgacagggtgctggagaagctgaagaagacagcaacaggctggatgaccacaattaacggcaaggagctgaaggtggagggccagattacctactacaacagatacaagagacagaacgtagtcaaggacctgtccgtcgagctggatagactgagcgaagaatctgtgaacaacgacatctcctcctggacaaagggcagaagcggagaagctctgagcctcctgaagaaaagattctcccatagacccgtgcaggagaagttcgtgtgcctgaactgcggcttcgagacacacgcagccgagcaagccgccctgaacatcgccagatcctggctgttcctgcggagccaggagtacaagaaataccagacaaacaagacaaccggcaacaccgataagagagccttcgtcgagacctggcagtccttttaccggaagaagcttaaggaggtgtggaaacctgccgtgcggtctggcggatctggcggaggctccttccagggcagcgtgaccttccaggacgtggccgtggtgttcacccccgaggagtggggccacctggagcccagccagaaggagctgtacagggaggtgatgctggagaacttcaggaacctggtgtgcctgggcctggtggtgtacaagcccagcgtgatctaccagctggagaggggcggcgccccctggaagcccggcggcggcggcaggaggagcggcagcagcgactgggagaccctgggcggcccaagcagcggcgcccctcctcccagcggcggcagcccagccggctccccaacctctaccgaggagggcacctctgagtccgccacccccgagagcggccctggcacctccaccgagcccagcgagggcagcgcacccggcagccctgccggcagccccacctccacagaggagggaaccagcaccgagcccagcgaaggcagcgccccaggcaccagcaccgagcctagtgagcaggagattaaacggatcaacaagatcagaagaagacttgtgaaagacagcaacaccaagaaggccggcaagacaggccccatgaaaaccctgctggttagagtgatgacacccgatctgagagagcggctggaaaacctgagaaagaagcctgaaaatatcccccagcccatcagcaatacatctagagccaacctgaataagctgctgaccgattacaccgaaatgaagaaggcgatcctgcatgtgtactgggaagagttccagaaggaccctgtgggcctgatgagccgggtggcccagcctgccagcaagaagatcgatcagaacaagctgaaacctgagatggacgagaagggcaacctgaccaccgccggctttgcctgctctcagtgtggccagcccctgttcgtgtacaagctggagcaggtgtctgagaagggcaaggcttacaccaactacttcggacggtgcaatgtggccgagcacgaaaagctgatcctgctggcccagctgaagcccgagaaggatagcgacgaagccgtgacatatagcctgggaaagtttgggcagagggccctggatttctacagcattcatgtgaccaaggagtccacccaccccgtgaagcccctggcccagatcgccggaaacagatacgcctccggacctgtgggaaaggccctgagcgacgcatgtatgggcacaatcgcctccttcctgtctaagtaccaggacatcatcatcgaacaccagaaggtggtgaagggcaaccagaagagactggagagcctgcgggagctggccggcaaggaaaacctggaataccctagcgtgaccctgccacctcagcctcacaccaaggagggcgttgatgcctacaacgaagtgatcgcccgggtgcgaatgtgggtgaacctgaacctgtggcagaagctgaagctaagcagagatgatgccaagcctctgctgagactgaagggattcccttcctttcctctggtcgagagacaggccaacgaagtggactggtgggacatggtgtgtaacgtgaagaagctgatcaacgagaaaaaggaggatggcaaggtgttttggcagaatctggctggctacaagagacaggaagccctgagaccatacctgagcagcgaggaagatcggaagaagggaaagaaattcgctcggtaccagctgggcgacctgctgctgcacctggaaaagaagcacggcgaggactggggaaaggtgtacgacgaggcctgggagcggattgacaagaaagtggaaggcctgagcaagcacatcaagctggaagaggaacggagaagcgaggacgcccagagcaaggccgccctgaccgactggctgcgggctaaggccagcttcgtgatcgagggcctgaaggaggccgacaaggacgagttctgcagatgcgagctgaagctgcagaagtggtacggggacctgcggggaaagcccttcgccatcgaagccgagaacagcatcctggacatcagcggcttcagcaagcagtacaactgtgccttcatctggcagaaggacggcgtgaagaagctgaacctgtacctgatcatcaactacttcaagggcggcaagctgcggttcaagaagatcaaacctgaagccttcgaagccaacagattctacaccgtgatcaacaaaaagagcggcgagatcgtgcccatggaggtgaacttcaacttcgacgaccccaacctgatcatcctgcctctggcctttggcaagagacagggcagagaattcatctggaacgacctgctgtccctggaaaccggcagcctgaagctggccaacggaagagtgatcgagaagacactgtacaacagaagaacccggcaggatgagcctgccctgttcgtggccctgaccttcgagcggcgggaggtcctggactcctccaatatcaaaccaatgaacctgatcggcgtggcaagaggcgaaaacatccccgccgtgatcgccctgaccgaccccgagggctgcccactgagccggtttaaggatagcctgggaaacccaacccacatcctgagaatcggcgagagctataaggagaagcagcggaccatccaggccaagaaggaggtggagcagcggagagccggcggctacagccggaagtacgccagcaaagccaagaatctggcagacgatatggtgagaaacaccgctagagatctgctgtactacgccgtgacccaggatgccatgctgatcttcgccaacctgagccggggcttcggccggcagggcaagcggaccttcatggccgagagacagtacacacggatggaggactggctgaccgccaagctggcctacgagggcctgagcaagacctacctgtccaagacactggcccagtacacctccaagacatgcagcaactgtgggtttaccatcaccagcgccgactacgacagggtgctggagaagctgaagaagacagcaacaggctggatgaccacaattaacggcaaggagctgaaggtggagggccagattacctactacaacagatacaagagacagaacgtagtcaaggacctgtccgtcgagctggatagactgagcgaagaatctgtgaacaacgacatctcctcctggacaaagggcagaagcggagaagctctgagcctcctgaagaaaagattctcccatagacccgtgcaggagaagttcgtgtgcctgaactgcggcttcgagacacacgcagccgagcaagccgccctgaacatcgccagatcctggctgttcctgcggagccaggagtacaagaaataccagacaaacaagacaaccggcaacaccgataagagagccttcgtcgagacctggcagtccttttaccggaagaagcttaaggaggtgtggaaacctgccgtgcggtctggcggatctggcggaggctcctttccagggcagcgtgaccttccaggacgtggccgtggtgttcacccccgaggagtggggccacctggagcccagccagaaggagctgtacagggaggtgatgctggagaacttcaggaacctggtgtgcctgggcctggtggtgtacaagcccagcgtgatctaccagctggagaggggcggcgccccctggaagcccggcggcggcggcaggaggagcggcagcagcgactgggagaccctgggatctggctccggcagcggccccaagaaaaagagaaaagtctaagctgccttctgcggggcttgccttctggccatgcccttcttctctcccttgcacctgtacctcttggtctttgaataaagcctgagtaggaaggctagcaaaaaaaaaaaaaaaaaaaaaaaaaaaaaaaaaaaaaaaaaaaaaaaaaaaaaaaaaaaaaaaaaaaaaaaaaaaaaaaa

SEQ ID NO: 15842 - RNA, 9485 nt, synthetic construct
  source 1..9485: mol_type = other RNA
aggaaataagagagaaaagaagagtaagaagaaatataagagccaccatggcccctaagaagaagcgtaaagtgagccggatggaacgcctcgtctacgaggtgcggcagaagtgcagaaacatcgaggacatctgcatctcctgcggatctctgaacgtgaccctggagcacccactgttcatcggcggcatgtgccagaactgtaaaaactgttttctggagtgtgcctatcaatacgacgatgacggctaccagagctactgcaccatctgttgcggcggaagagaggtgctgatgtgtggaaataacaactgctgccggtgcttctgcgtggaatgcgtggacctgctggtgggccccggcgccgcccaggccgctattaaggaagatccttggaactgctacatgtgcggccacaagggcacatacggcctgctgagacggagagaggactggcctagcagactgcagatgttcttcgccaataaccacgaccaggagttcgacccccctaaggtgtaccctcccgtccccgccgagaagagaaagcccatccgggtcctgagcctgttcgatggcatcgccaccggtctgctggtgctgaaggacctgggcatccaggtggataggtacattgcctccgaggtgtgcgaggactccatcaccgtgggaatggtgcgtcatcagggcaagatcatgtacgtgggcgacgtgcggagcgtgacacagaagcatatccaggagtggggccctttcgacctggtgatcggcggcagcccttgcaatgacctgagcatcgtgaacccagcccggaagggcctgtacgagggaaccggcagactgttcttcgagttttacagactgctgcacgacgcccggcctaaggaaggcgacgaccggcccttcttttggctgttcgagaatgtggtggccatgggagtcagcgacaagcgggatattagccggttcctggagagcaaccccgtgatgatcgatgccaaggaagtgagcgccgcccaccgggccagatacttctggggcaatctgcctggcatgaacagacccctggccagcaccgtgaacgacaagctggagctgcaggagtgcctggagcacggccggatcgccaagttcagcaaggtgagaaccatcaccacccgaagcaacagcatcaaacaaggcaaggaccagcactttcctgtgttcatgaacgagaaggaggacatcctgtggtgtaccgagatggagagagtgttcgggttcccagtccactacacagatgtcagcaacatgtctagactggccagacagagactgctgggaagaagctggtccgtccctgtgatcagacacctgttcgcccctctgaaggagtacttcgcctgcgtgagcagcggcaacagcaacgccaacagccggggccccagcttctctagcggcctggtgccactgtccctgagagggagccacatgggccccatggagatctacaaaaccgtgagcgcctggaagcggcagcctgtgcgcgtgctgagcctgtttcggaatatcgataaagtcctgaaaagcctgggattcctggagagcggctctggctccggcggtggcaccctgaagtacgtggaggatgtgacaaacgtggtcagacgggatgtggagaagtggggccccttcgatctggtgtacggcagcacccaacccctgggcagctcttgtgaccggtgccctggctggtacatgtttcagttccaccggatcctgcagtacgccctgccgagacaggagtcccagcggccattcttttggattttcatggacaacttgctgctgaccgaggatgaccaggaaactaccactcggttcctgcagaccgaagccgtgaccctgcaggacgtgagaggccgggactaccagaacgccatgcgggtgtggtccaacatccctggactgaaaagcaagcacgcacctctgacccctaaagaagaggagtacctgcaggcccaggtgcggagcagaagcaagctggacgcccctaaggtggatctgctggtgaagaattgcctcctgcccctgagagagtacttcaagtatttcagccagaatagtctgcccctgggaggcagcggcggcggcgccctggtgacatttgaggacgtcgccgtgcggttcacccaggaggaatgggctctgctggatccttctcagaaaatcctgtaccgggacgtgatgagagagacataccggaatctgacctccgtgggcatcaactgggaatgttgggaccttgaagcctgcttcagaagcctgggaagaaacctgagagtgcaggtggtgaagagaaagtgcgagctgaccaacagcggcccctgcgccgagggcggcccaagcagcggcgcccctcctcccagcggcggcagcccagccggctccccaacctctaccgaggagggcacctctgagtccgccacccccgagagcggccctggcacctccaccgagcccagcgagggcagcgcacccggcagccctgccggcagccccacctccacagaggagggaaccagcaccgagcccagcgaaggcagcgccccaggcaccagcaccgagcctagtgagcaggagattaaacggatcaacaagatcagaagaagacttgtgaaagacagcaacaccaagaaggccggcaagacaggccccatgaaaaccctgctggttagagtgatgacacccgatctgagagagcggctggaaaacctgagaaagaagcctgaaaatatcccccagcccatcagcaatacatctagagccaacctgaataagctgctgaccgattacaccgaaatgaagaaggcgatcctgcatgtgtactgggaagagttccagaaggaccctgtgggcctgatgagccgggtggcccagcctgccagcaagaagatcgatcagaacaagctgaaacctgagatggacgagaagggcaacctgaccaccgccggctttgcctgctctcagtgtggccagcccctgttcgtgtacaagctggagcaggtgtctgagaagggcaaggcttacaccaactacttcggacggtgcaatgtggccgagcacgaaaagctgatcctgctggcccagctgaagcccgagaaggatagcgacgaagccgtgacatatagcctgggaaagtttgggcagagggccctggatttctacagcattcatgtgaccaaggagtccacccaccccgtgaagcccctggcccagatcgccggaaacagatacgcctccggacctgtgggaaaggccctgagcgacgcatgtatgggcacaatcgcctccttcctgtctaagtaccaggacatcatcatcgaacaccagaaggtggtgaagggcaaccagaagagactggagagcctgcgggagctggccggcaaggaaaacctggaataccctagcgtgaccctgccacctcagcctcacaccaaggagggcgttgatgcctacaacgaagtgatcgcccgggtgcgaatgtgggtgaacctgaacctgtggcagaagctgaagctaagcagagatgatgccaagcctctgctgagactgaagggattcccttcctttcctctggtcgagagacaggccaacgaagtggactggtgggacatggtgtgtaacgtgaagaagctgatcaacgagaaaaaggaggatggcaaggtgttttggcagaatctggctggctacaagagacaggaagccctgagaccatacctgagcagcgaggaagatcggaagaagggaaagaaattcgctcggtaccagctgggcgacctgctgctgcacctggaaaagaagcacggcgaggactggggaaaggtgtacgacgaggcctgggagcggattgacaagaaagtggaaggcctgagcaagcacatcaagctggaagaggaacggagaagcgaggacgcccagagcaaggccgccctgaccgactggctgcgggctaaggccagcttcgtgatcgagggcctgaaggaggccgacaaggacgagttctgcagatgcgagctgaagctgcagaagtggtacggggacctgcggggaaagcccttcgccatcgaagccgagaacagcatcctggacatcagcggcttcagcaagcagtacaactgtgccttcatctggcagaaggacggcgtgaagaagctgaacctgtacctgatcatcaactacttcaagggcggcaagctgcggttcaagaagatcaaacctgaagccttcgaagccaacagattctacaccgtgatcaacaaaaagagcggcgagatcgtgcccatggaggtgaacttcaacttcgacgaccccaacctgatcatcctgcctctggcctttggcaagagacagggcagagaattcatctggaacgacctgctgtccctggaaaccggcagcctgaagctggccaacggaagagtgatcgagaagacactgtacaacagaagaacccggcaggatgagcctgccctgttcgtggccctgaccttcgagcggcgggaggtcctggactcctccaatatcaaaccaatgaacctgatcggcgtggcaagaggcgaaaacatccccgccgtgatcgccctgaccgaccccgagggctgcccactgagccggtttaaggatagcctgggaaacccaacccacatcctgagaatcggcgagagctataaggagaagcagcggaccatccaggccaagaaggaggtggagcagcggagagccggcggctacagccggaagtacgccagcaaagccaagaatctggcagacgatatggtgagaaacaccgctagagatctgctgtactacgccgtgacccaggatgccatgctgatcttcgccaacctgagccggggcttcggccggcagggcaagcggaccttcatggccgagagacagtacacacggatggaggactggctgaccgccaagctggcctacgagggcctgagcaagacctacctgtccaagacactggcccagtacacctccaagacatgcagcaactgtgggtttaccatcaccagcgccgactacgacagggtgctggagaagctgaagaagacagcaacaggctggatgaccacaattaacggcaaggagctgaaggtggagggccagattacctactacaacagatacaagagacagaacgtagtcaaggacctgtccgtcgagctggatagactgagcgaagaatctgtgaacaacgacatctcctcctggacaaagggcagaagcggagaagctctgagcctcctgaagaaaagattctcccatagacccgtgcaggagaagttcgtgtgcctgaactgcggcttcgagacacacgcagccgagcaagccgccctgaacatcgccagatcctggctgttcctgcggagccaggagtacaagaaataccagacaaacaagacaaccggcaacaccgataagagagccttcgtcgagacctggcagtccttttaccggaagaagcttaaggaggtgtggaaacctgccgtgcggtctggcggatctggcggaggctccagcctgggcagcgacctgttcagggacgtggccgtggtgttcagccaggaggagtgggagcagctggcccccgcccagagggacctgtacagggacgtgatgctggagatctacagcaacctggtgagcctgggcttcgccatcagcaagcccgacgtgatcagcttcctggagcagggcagggagccctggatggtggagaaggtggtgaccggcggccagtgccccgtgctggagagcaggggcggcccaagcagcggcgcccctcctcccagcggcggcagcccagccggctccccaacctctaccgaggagggcacctctgagtccgccacccccgagagcggccctggcacctccaccgagcccagcgagggcagcgcacccggcagccctgccggcagccccacctccacagaggagggaaccagcaccgagcccagcgaaggcagcgccccaggcaccagcaccgagcctagtgagcaggagattaaacggatcaacaagatcagaagaagacttgtgaaagacagcaacaccaagaaggccggcaagacaggccccatgaaaaccctgctggttagagtgatgacacccgatctgagagagcggctggaaaacctgagaaagaagcctgaaaatatcccccagcccatcagcaatacatctagagccaacctgaataagctgctgaccgattacaccgaaatgaagaaggcgatcctgcatgtgtactgggaagagttccagaaggaccctgtgggcctgatgagccgggtggcccagcctgccagcaagaagatcgatcagaacaagctgaaacctgagatggacgagaagggcaacctgaccaccgccggctttgcctgctctcagtgtggccagcccctgttcgtgtacaagctggagcaggtgtctgagaagggcaaggcttacaccaactacttcggacggtgcaatgtggccgagcacgaaaagctgatcctgctggcccagctgaagcccgagaaggatagcgacgaagccgtgacatatagcctgggaaagtttgggcagagggccctggatttctacagcattcatgtgaccaaggagtccacccaccccgtgaagcccctggcccagatcgccggaaacagatacgcctccggacctgtgggaaaggccctgagcgacgcatgtatgggcacaatcgcctccttcctgtctaagtaccaggacatcatcatcgaacaccagaaggtggtgaagggcaaccagaagagactggagagcctgcgggagctggccggcaaggaaaacctggaataccctagcgtgaccctgccacctcagcctcacaccaaggagggcgttgatgcctacaacgaagtgatcgcccgggtgcgaatgtgggtgaacctgaacctgtggcagaagctgaagctaagcagagatgatgccaagcctctgctgagactgaagggattcccttcctttcctctggtcgagagacaggccaacgaagtggactggtgggacatggtgtgtaacgtgaagaagctgatcaacgagaaaaaggaggatggcaaggtgttttggcagaatctggctggctacaagagacaggaagccctgagaccatacctgagcagcgaggaagatcggaagaagggaaagaaattcgctcggtaccagctgggcgacctgctgctgcacctggaaaagaagcacggcgaggactggggaaaggtgtacgacgaggcctgggagcggattgacaagaaagtggaaggcctgagcaagcacatcaagctggaagaggaacggagaagcgaggacgcccagagcaaggccgccctgaccgactggctgcgggctaaggccagcttcgtgatcgagggcctgaaggaggccgacaaggacgagttctgcagatgcgagctgaagctgcagaagtggtacggggacctgcggggaaagcccttcgccatcgaagccgagaacagcatcctggacatcagcggcttcagcaagcagtacaactgtgccttcatctggcagaaggacggcgtgaagaagctgaacctgtacctgatcatcaactacttcaagggcggcaagctgcggttcaagaagatcaaacctgaagccttcgaagccaacagattctacaccgtgatcaacaaaaagagcggcgagatcgtgcccatggaggtgaacttcaacttcgacgaccccaacctgatcatcctgcctctggcctttggcaagagacagggcagagaattcatctggaacgacctgctgtccctggaaaccggcagcctgaagctggccaacggaagagtgatcgagaagacactgtacaacagaagaacccggcaggatgagcctgccctgttcgtggccctgaccttcgagcggcgggaggtcctggactcctccaatatcaaaccaatgaacctgatcggcgtggcaagaggcgaaaacatccccgccgtgatcgccctgaccgaccccgagggctgcccactgagccggtttaaggatagcctgggaaacccaacccacatcctgagaatcggcgagagctataaggagaagcagcggaccatccaggccaagaaggaggtggagcagcggagagccggcggctacagccggaagtacgccagcaaagccaagaatctggcagacgatatggtgagaaacaccgctagagatctgctgtactacgccgtgacccaggatgccatgctgatcttcgccaacctgagccggggcttcggccggcagggcaagcggaccttcatggccgagagacagtacacacggatggaggactggctgaccgccaagctggcctacgagggcctgagcaagacctacctgtccaagacactggcccagtacacctccaagacatgcagcaactgtgggtttaccatcaccagcgccgactacgacagggtgctggagaagctgaagaagacagcaacaggctggatgaccacaattaacggcaaggagctgaaggtggagggccagattacctactacaacagatacaagagacagaacgtagtcaaggacctgtccgtcgagctggatagactgagcgaagaatctgtgaacaacgacatctcctcctggacaaagggcagaagcggagaagctctgagcctcctgaagaaaagattctcccatagacccgtgcaggagaagttcgtgtgcctgaactgcggcttcgagacacacgcagccgagcaagccgccctgaacatcgccagatcctggctgttcctgcggagccaggagtacaagaaataccagacaaacaagacaaccggcaacaccgataagagagccttcgtcgagacctggcagtccttttaccggaagaagcttaaggaggtgtggaaacctgccgtgcggtctggcggatctggcggaggctcctagcctgggcagcgacctgttcagggacgtggccgtggtgttcagccaggaggagtgggagcagctggcccccgcccagagggacctgtacagggacgtgatgctggagatctacagcaacctggtgagcctgggcttcgccatcagcaagcccgacgtgatcagcttcctggagcagggcagggagccctggatggtggagaaggtggtgaccggcggccagtgccccgtgctggagagcaggggatctggctccggcagcggccccaagaaaaagagaaaagtctaagctgccttctgcggggcttgccttctggccatgcccttcttctctcccttgcacctgtacctcttggtctttgaataaagcctgagtaggaaggctagcaaaaaaaaaaaaaaaaaaaaaaaaaaaaaaaaaaaaaaaaaaaaaaaaaaaaaaaaaaaaaaaaaaaaaaaaaaaaaaaa

SEQ ID NO: 15843 - RNA, 9485 nt, synthetic construct
  source 1..9485: mol_type = other RNA
aggaaataagagagaaaagaagagtaagaagaaatataagagccaccatggcccctaagaagaagcgtaaagtgagccggatggaacgcctcgtctacgaggtgcggcagaagtgcagaaacatcgaggacatctgcatctcctgcggatctctgaacgtgaccctggagcacccactgttcatcggcggcatgtgccagaactgtaaaaactgttttctggagtgtgcctatcaatacgacgatgacggctaccagagctactgcaccatctgttgcggcggaagagaggtgctgatgtgtggaaataacaactgctgccggtgcttctgcgtggaatgcgtggacctgctggtgggccccggcgccgcccaggccgctattaaggaagatccttggaactgctacatgtgcggccacaagggcacatacggcctgctgagacggagagaggactggcctagcagactgcagatgttcttcgccaataaccacgaccaggagttcgacccccctaaggtgtaccctcccgtccccgccgagaagagaaagcccatccgggtcctgagcctgttcgatggcatcgccaccggtctgctggtgctgaaggacctgggcatccaggtggataggtacattgcctccgaggtgtgcgaggactccatcaccgtgggaatggtgcgtcatcagggcaagatcatgtacgtgggcgacgtgcggagcgtgacacagaagcatatccaggagtggggccctttcgacctggtgatcggcggcagcccttgcaatgacctgagcatcgtgaacccagcccggaagggcctgtacgagggaaccggcagactgttcttcgagttttacagactgctgcacgacgcccggcctaaggaaggcgacgaccggcccttcttttggctgttcgagaatgtggtggccatgggagtcagcgacaagcgggatattagccggttcctggagagcaaccccgtgatgatcgatgccaaggaagtgagcgccgcccaccgggccagatacttctggggcaatctgcctggcatgaacagacccctggccagcaccgtgaacgacaagctggagctgcaggagtgcctggagcacggccggatcgccaagttcagcaaggtgagaaccatcaccacccgaagcaacagcatcaaacaaggcaaggaccagcactttcctgtgttcatgaacgagaaggaggacatcctgtggtgtaccgagatggagagagtgttcgggttcccagtccactacacagatgtcagcaacatgtctagactggccagacagagactgctgggaagaagctggtccgtccctgtgatcagacacctgttcgcccctctgaaggagtacttcgcctgcgtgagcagcggcaacagcaacgccaacagccggggccccagcttctctagcggcctggtgccactgtccctgagagggagccacatgggccccatggagatctacaaaaccgtgagcgcctggaagcggcagcctgtgcgcgtgctgagcctgtttcggaatatcgataaagtcctgaaaagcctgggattcctggagagcggctctggctccggcggtggcaccctgaagtacgtggaggatgtgacaaacgtggtcagacgggatgtggagaagtggggccccttcgatctggtgtacggcagcacccaacccctgggcagctcttgtgaccggtgccctggctggtacatgtttcagttccaccggatcctgcagtacgccctgccgagacaggagtcccagcggccattcttttggattttcatggacaacttgctgctgaccgaggatgaccaggaaactaccactcggttcctgcagaccgaagccgtgaccctgcaggacgtgagaggccgggactaccagaacgccatgcgggtgtggtccaacatccctggactgaaaagcaagcacgcacctctgacccctaaagaagaggagtacctgcaggcccaggtgcggagcagaagcaagctggacgcccctaaggtggatctgctggtgaagaattgcctcctgcccctgagagagtacttcaagtatttcagccagaatagtctgcccctgggaggcagcggcggcggcgccctggtgacatttgaggacgtcgccgtgcggttcacccaggaggaatgggctctgctggatccttctcagaaaatcctgtaccgggacgtgatgagagagacataccggaatctgacctccgtgggcatcaactgggaatgttgggaccttgaagcctgcttcagaagcctgggaagaaacctgagagtgcaggtggtgaagagaaagtgcgagctgaccaacagcggcccctgcgccgagggcggcccaagcagcggcgcccctcctcccagcggcggcagcccagccggctccccaacctctaccgaggagggcacctctgagtccgccacccccgagagcggccctggcacctccaccgagcccagcgagggcagcgcacccggcagccctgccggcagccccacctccacagaggagggaaccagcaccgagcccagcgaaggcagcgccccaggcaccagcaccgagcctagtgagcaggagattaaacggatcaacaagatcagaagaagacttgtgaaagacagcaacaccaagaaggccggcaagacaggccccatgaaaaccctgctggttagagtgatgacacccgatctgagagagcggctggaaaacctgagaaagaagcctgaaaatatcccccagcccatcagcaatacatctagagccaacctgaataagctgctgaccgattacaccgaaatgaagaaggcgatcctgcatgtgtactgggaagagttccagaaggaccctgtgggcctgatgagccgggtggcccagcctgccagcaagaagatcgatcagaacaagctgaaacctgagatggacgagaagggcaacctgaccaccgccggctttgcctgctctcagtgtggccagcccctgttcgtgtacaagctggagcaggtgtctgagaagggcaaggcttacaccaactacttcggacggtgcaatgtggccgagcacgaaaagctgatcctgctggcccagctgaagcccgagaaggatagcgacgaagccgtgacatatagcctgggaaagtttgggcagagggccctggatttctacagcattcatgtgaccaaggagtccacccaccccgtgaagcccctggcccagatcgccggaaacagatacgcctccggacctgtgggaaaggccctgagcgacgcatgtatgggcacaatcgcctccttcctgtctaagtaccaggacatcatcatcgaacaccagaaggtggtgaagggcaaccagaagagactggagagcctgcgggagctggccggcaaggaaaacctggaataccctagcgtgaccctgccacctcagcctcacaccaaggagggcgttgatgcctacaacgaagtgatcgcccgggtgcgaatgtgggtgaacctgaacctgtggcagaagctgaagctaagcagagatgatgccaagcctctgctgagactgaagggattcccttcctttcctctggtcgagagacaggccaacgaagtggactggtgggacatggtgtgtaacgtgaagaagctgatcaacgagaaaaaggaggatggcaaggtgttttggcagaatctggctggctacaagagacaggaagccctgagaccatacctgagcagcgaggaagatcggaagaagggaaagaaattcgctcggtaccagctgggcgacctgctgctgcacctggaaaagaagcacggcgaggactggggaaaggtgtacgacgaggcctgggagcggattgacaagaaagtggaaggcctgagcaagcacatcaagctggaagaggaacggagaagcgaggacgcccagagcaaggccgccctgaccgactggctgcgggctaaggccagcttcgtgatcgagggcctgaaggaggccgacaaggacgagttctgcagatgcgagctgaagctgcagaagtggtacggggacctgcggggaaagcccttcgccatcgaagccgagaacagcatcctggacatcagcggcttcagcaagcagtacaactgtgccttcatctggcagaaggacggcgtgaagaagctgaacctgtacctgatcatcaactacttcaagggcggcaagctgcggttcaagaagatcaaacctgaagccttcgaagccaacagattctacaccgtgatcaacaaaaagagcggcgagatcgtgcccatggaggtgaacttcaacttcgacgaccccaacctgatcatcctgcctctggcctttggcaagagacagggcagagaattcatctggaacgacctgctgtccctggaaaccggcagcctgaagctggccaacggaagagtgatcgagaagacactgtacaacagaagaacccggcaggatgagcctgccctgttcgtggccctgaccttcgagcggcgggaggtcctggactcctccaatatcaaaccaatgaacctgatcggcgtggcaagaggcgaaaacatccccgccgtgatcgccctgaccgaccccgagggctgcccactgagccggtttaaggatagcctgggaaacccaacccacatcctgagaatcggcgagagctataaggagaagcagcggaccatccaggccaagaaggaggtggagcagcggagagccggcggctacagccggaagtacgccagcaaagccaagaatctggcagacgatatggtgagaaacaccgctagagatctgctgtactacgccgtgacccaggatgccatgctgatcttcgccaacctgagccggggcttcggccggcagggcaagcggaccttcatggccgagagacagtacacacggatggaggactggctgaccgccaagctggcctacgagggcctgagcaagacctacctgtccaagacactggcccagtacacctccaagacatgcagcaactgtgggtttaccatcaccagcgccgactacgacagggtgctggagaagctgaagaagacagcaacaggctggatgaccacaattaacggcaaggagctgaaggtggagggccagattacctactacaacagatacaagagacagaacgtagtcaaggacctgtccgtcgagctggatagactgagcgaagaatctgtgaacaacgacatctcctcctggacaaagggcagaagcggagaagctctgagcctcctgaagaaaagattctcccatagacccgtgcaggagaagttcgtgtgcctgaactgcggcttcgagacacacgcagccgagcaagccgccctgaacatcgccagatcctggctgttcctgcggagccaggagtacaagaaataccagacaaacaagacaaccggcaacaccgataagagagccttcgtcgagacctggcagtccttttaccggaagaagcttaaggaggtgtggaaacctgccgtgcggtctggcggatctggcggaggctccctgctgcccgccgccggctgcggcaaggacagcggcacccccgccaccgaggccgtgaccttcgaggacgtggccgtgaacttcagcagggaggagtgggccctgctggaccccccccagaggaagctgtacagggacgtgatgtgggagaccctgaggcacctggccgccgtgggcatgaacagcgacgacaggcagatcgaggacgtgtacaagatctgcaggaagaacctgagcggcgccggcggcccaagcagcggcgcccctcctcccagcggcggcagcccagccggctccccaacctctaccgaggagggcacctctgagtccgccacccccgagagcggccctggcacctccaccgagcccagcgagggcagcgcacccggcagccctgccggcagccccacctccacagaggagggaaccagcaccgagcccagcgaaggcagcgccccaggcaccagcaccgagcctagtgagcaggagattaaacggatcaacaagatcagaagaagacttgtgaaagacagcaacaccaagaaggccggcaagacaggccccatgaaaaccctgctggttagagtgatgacacccgatctgagagagcggctggaaaacctgagaaagaagcctgaaaatatcccccagcccatcagcaatacatctagagccaacctgaataagctgctgaccgattacaccgaaatgaagaaggcgatcctgcatgtgtactgggaagagttccagaaggaccctgtgggcctgatgagccgggtggcccagcctgccagcaagaagatcgatcagaacaagctgaaacctgagatggacgagaagggcaacctgaccaccgccggctttgcctgctctcagtgtggccagcccctgttcgtgtacaagctggagcaggtgtctgagaagggcaaggcttacaccaactacttcggacggtgcaatgtggccgagcacgaaaagctgatcctgctggcccagctgaagcccgagaaggatagcgacgaagccgtgacatatagcctgggaaagtttgggcagagggccctggatttctacagcattcatgtgaccaaggagtccacccaccccgtgaagcccctggcccagatcgccggaaacagatacgcctccggacctgtgggaaaggccctgagcgacgcatgtatgggcacaatcgcctccttcctgtctaagtaccaggacatcatcatcgaacaccagaaggtggtgaagggcaaccagaagagactggagagcctgcgggagctggccggcaaggaaaacctggaataccctagcgtgaccctgccacctcagcctcacaccaaggagggcgttgatgcctacaacgaagtgatcgcccgggtgcgaatgtgggtgaacctgaacctgtggcagaagctgaagctaagcagagatgatgccaagcctctgctgagactgaagggattcccttcctttcctctggtcgagagacaggccaacgaagtggactggtgggacatggtgtgtaacgtgaagaagctgatcaacgagaaaaaggaggatggcaaggtgttttggcagaatctggctggctacaagagacaggaagccctgagaccatacctgagcagcgaggaagatcggaagaagggaaagaaattcgctcggtaccagctgggcgacctgctgctgcacctggaaaagaagcacggcgaggactggggaaaggtgtacgacgaggcctgggagcggattgacaagaaagtggaaggcctgagcaagcacatcaagctggaagaggaacggagaagcgaggacgcccagagcaaggccgccctgaccgactggctgcgggctaaggccagcttcgtgatcgagggcctgaaggaggccgacaaggacgagttctgcagatgcgagctgaagctgcagaagtggtacggggacctgcggggaaagcccttcgccatcgaagccgagaacagcatcctggacatcagcggcttcagcaagcagtacaactgtgccttcatctggcagaaggacggcgtgaagaagctgaacctgtacctgatcatcaactacttcaagggcggcaagctgcggttcaagaagatcaaacctgaagccttcgaagccaacagattctacaccgtgatcaacaaaaagagcggcgagatcgtgcccatggaggtgaacttcaacttcgacgaccccaacctgatcatcctgcctctggcctttggcaagagacagggcagagaattcatctggaacgacctgctgtccctggaaaccggcagcctgaagctggccaacggaagagtgatcgagaagacactgtacaacagaagaacccggcaggatgagcctgccctgttcgtggccctgaccttcgagcggcgggaggtcctggactcctccaatatcaaaccaatgaacctgatcggcgtggcaagaggcgaaaacatccccgccgtgatcgccctgaccgaccccgagggctgcccactgagccggtttaaggatagcctgggaaacccaacccacatcctgagaatcggcgagagctataaggagaagcagcggaccatccaggccaagaaggaggtggagcagcggagagccggcggctacagccggaagtacgccagcaaagccaagaatctggcagacgatatggtgagaaacaccgctagagatctgctgtactacgccgtgacccaggatgccatgctgatcttcgccaacctgagccggggcttcggccggcagggcaagcggaccttcatggccgagagacagtacacacggatggaggactggctgaccgccaagctggcctacgagggcctgagcaagacctacctgtccaagacactggcccagtacacctccaagacatgcagcaactgtgggtttaccatcaccagcgccgactacgacagggtgctggagaagctgaagaagacagcaacaggctggatgaccacaattaacggcaaggagctgaaggtggagggccagattacctactacaacagatacaagagacagaacgtagtcaaggacctgtccgtcgagctggatagactgagcgaagaatctgtgaacaacgacatctcctcctggacaaagggcagaagcggagaagctctgagcctcctgaagaaaagattctcccatagacccgtgcaggagaagttcgtgtgcctgaactgcggcttcgagacacacgcagccgagcaagccgccctgaacatcgccagatcctggctgttcctgcggagccaggagtacaagaaataccagacaaacaagacaaccggcaacaccgataagagagccttcgtcgagacctggcagtccttttaccggaagaagcttaaggaggtgtggaaacctgccgtgcggtctggcggatctggcggaggctcctctgctgcccgccgccggctgcggcaaggacagcggcacccccgccaccgaggccgtgaccttcgaggacgtggccgtgaacttcagcagggaggagtgggccctgctggaccccccccagaggaagctgtacagggacgtgatgtgggagaccctgaggcacctggccgccgtgggcatgaacagcgacgacaggcagatcgaggacgtgtacaagatctgcaggaagaacctgagcggcgccggatctggctccggcagcggccccaagaaaaagagaaaagtctaagctgccttctgcggggcttgccttctggccatgcccttcttctctcccttgcacctgtacctcttggtctttgaataaagcctgagtaggaaggctagcaaaaaaaaaaaaaaaaaaaaaaaaaaaaaaaaaaaaaaaaaaaaaaaaaaaaaaaaaaaaaaaaaaaaaaaaaaaaaaaa

SEQ ID NO: 15844 - RNA, 9485 nt, synthetic construct
  source 1..9485: mol_type = other RNA
aggaaataagagagaaaagaagagtaagaagaaatataagagccaccatggcccctaagaagaagcgtaaagtgagccggatggaacgcctcgtctacgaggtgcggcagaagtgcagaaacatcgaggacatctgcatctcctgcggatctctgaacgtgaccctggagcacccactgttcatcggcggcatgtgccagaactgtaaaaactgttttctggagtgtgcctatcaatacgacgatgacggctaccagagctactgcaccatctgttgcggcggaagagaggtgctgatgtgtggaaataacaactgctgccggtgcttctgcgtggaatgcgtggacctgctggtgggccccggcgccgcccaggccgctattaaggaagatccttggaactgctacatgtgcggccacaagggcacatacggcctgctgagacggagagaggactggcctagcagactgcagatgttcttcgccaataaccacgaccaggagttcgacccccctaaggtgtaccctcccgtccccgccgagaagagaaagcccatccgggtcctgagcctgttcgatggcatcgccaccggtctgctggtgctgaaggacctgggcatccaggtggataggtacattgcctccgaggtgtgcgaggactccatcaccgtgggaatggtgcgtcatcagggcaagatcatgtacgtgggcgacgtgcggagcgtgacacagaagcatatccaggagtggggccctttcgacctggtgatcggcggcagcccttgcaatgacctgagcatcgtgaacccagcccggaagggcctgtacgagggaaccggcagactgttcttcgagttttacagactgctgcacgacgcccggcctaaggaaggcgacgaccggcccttcttttggctgttcgagaatgtggtggccatgggagtcagcgacaagcgggatattagccggttcctggagagcaaccccgtgatgatcgatgccaaggaagtgagcgccgcccaccgggccagatacttctggggcaatctgcctggcatgaacagacccctggccagcaccgtgaacgacaagctggagctgcaggagtgcctggagcacggccggatcgccaagttcagcaaggtgagaaccatcaccacccgaagcaacagcatcaaacaaggcaaggaccagcactttcctgtgttcatgaacgagaaggaggacatcctgtggtgtaccgagatggagagagtgttcgggttcccagtccactacacagatgtcagcaacatgtctagactggccagacagagactgctgggaagaagctggtccgtccctgtgatcagacacctgttcgcccctctgaaggagtacttcgcctgcgtgagcagcggcaacagcaacgccaacagccggggccccagcttctctagcggcctggtgccactgtccctgagagggagccacatgggccccatggagatctacaaaaccgtgagcgcctggaagcggcagcctgtgcgcgtgctgagcctgtttcggaatatcgataaagtcctgaaaagcctgggattcctggagagcggctctggctccggcggtggcaccctgaagtacgtggaggatgtgacaaacgtggtcagacgggatgtggagaagtggggccccttcgatctggtgtacggcagcacccaacccctgggcagctcttgtgaccggtgccctggctggtacatgtttcagttccaccggatcctgcagtacgccctgccgagacaggagtcccagcggccattcttttggattttcatggacaacttgctgctgaccgaggatgaccaggaaactaccactcggttcctgcagaccgaagccgtgaccctgcaggacgtgagaggccgggactaccagaacgccatgcgggtgtggtccaacatccctggactgaaaagcaagcacgcacctctgacccctaaagaagaggagtacctgcaggcccaggtgcggagcagaagcaagctggacgcccctaaggtggatctgctggtgaagaattgcctcctgcccctgagagagtacttcaagtatttcagccagaatagtctgcccctgggaggcagcggcggcggcgccctggtgacatttgaggacgtcgccgtgcggttcacccaggaggaatgggctctgctggatccttctcagaaaatcctgtaccgggacgtgatgagagagacataccggaatctgacctccgtgggcatcaactgggaatgttgggaccttgaagcctgcttcagaagcctgggaagaaacctgagagtgcaggtggtgaagagaaagtgcgagctgaccaacagcggcccctgcgccgagggcggcccaagcagcggcgcccctcctcccagcggcggcagcccagccggctccccaacctctaccgaggagggcacctctgagtccgccacccccgagagcggccctggcacctccaccgagcccagcgagggcagcgcacccggcagccctgccggcagccccacctccacagaggagggaaccagcaccgagcccagcgaaggcagcgccccaggcaccagcaccgagcctagtgagcaggagattaaacggatcaacaagatcagaagaagacttgtgaaagacagcaacaccaagaaggccggcaagacaggccccatgaaaaccctgctggttagagtgatgacacccgatctgagagagcggctggaaaacctgagaaagaagcctgaaaatatcccccagcccatcagcaatacatctagagccaacctgaataagctgctgaccgattacaccgaaatgaagaaggcgatcctgcatgtgtactgggaagagttccagaaggaccctgtgggcctgatgagccgggtggcccagcctgccagcaagaagatcgatcagaacaagctgaaacctgagatggacgagaagggcaacctgaccaccgccggctttgcctgctctcagtgtggccagcccctgttcgtgtacaagctggagcaggtgtctgagaagggcaaggcttacaccaactacttcggacggtgcaatgtggccgagcacgaaaagctgatcctgctggcccagctgaagcccgagaaggatagcgacgaagccgtgacatatagcctgggaaagtttgggcagagggccctggatttctacagcattcatgtgaccaaggagtccacccaccccgtgaagcccctggcccagatcgccggaaacagatacgcctccggacctgtgggaaaggccctgagcgacgcatgtatgggcacaatcgcctccttcctgtctaagtaccaggacatcatcatcgaacaccagaaggtggtgaagggcaaccagaagagactggagagcctgcgggagctggccggcaaggaaaacctggaataccctagcgtgaccctgccacctcagcctcacaccaaggagggcgttgatgcctacaacgaagtgatcgcccgggtgcgaatgtgggtgaacctgaacctgtggcagaagctgaagctaagcagagatgatgccaagcctctgctgagactgaagggattcccttcctttcctctggtcgagagacaggccaacgaagtggactggtgggacatggtgtgtaacgtgaagaagctgatcaacgagaaaaaggaggatggcaaggtgttttggcagaatctggctggctacaagagacaggaagccctgagaccatacctgagcagcgaggaagatcggaagaagggaaagaaattcgctcggtaccagctgggcgacctgctgctgcacctggaaaagaagcacggcgaggactggggaaaggtgtacgacgaggcctgggagcggattgacaagaaagtggaaggcctgagcaagcacatcaagctggaagaggaacggagaagcgaggacgcccagagcaaggccgccctgaccgactggctgcgggctaaggccagcttcgtgatcgagggcctgaaggaggccgacaaggacgagttctgcagatgcgagctgaagctgcagaagtggtacggggacctgcggggaaagcccttcgccatcgaagccgagaacagcatcctggacatcagcggcttcagcaagcagtacaactgtgccttcatctggcagaaggacggcgtgaagaagctgaacctgtacctgatcatcaactacttcaagggcggcaagctgcggttcaagaagatcaaacctgaagccttcgaagccaacagattctacaccgtgatcaacaaaaagagcggcgagatcgtgcccatggaggtgaacttcaacttcgacgaccccaacctgatcatcctgcctctggcctttggcaagagacagggcagagaattcatctggaacgacctgctgtccctggaaaccggcagcctgaagctggccaacggaagagtgatcgagaagacactgtacaacagaagaacccggcaggatgagcctgccctgttcgtggccctgaccttcgagcggcgggaggtcctggactcctccaatatcaaaccaatgaacctgatcggcgtggcaagaggcgaaaacatccccgccgtgatcgccctgaccgaccccgagggctgcccactgagccggtttaaggatagcctgggaaacccaacccacatcctgagaatcggcgagagctataaggagaagcagcggaccatccaggccaagaaggaggtggagcagcggagagccggcggctacagccggaagtacgccagcaaagccaagaatctggcagacgatatggtgagaaacaccgctagagatctgctgtactacgccgtgacccaggatgccatgctgatcttcgccaacctgagccggggcttcggccggcagggcaagcggaccttcatggccgagagacagtacacacggatggaggactggctgaccgccaagctggcctacgagggcctgagcaagacctacctgtccaagacactggcccagtacacctccaagacatgcagcaactgtgggtttaccatcaccagcgccgactacgacagggtgctggagaagctgaagaagacagcaacaggctggatgaccacaattaacggcaaggagctgaaggtggagggccagattacctactacaacagatacaagagacagaacgtagtcaaggacctgtccgtcgagctggatagactgagcgaagaatctgtgaacaacgacatctcctcctggacaaagggcagaagcggagaagctctgagcctcctgaagaaaagattctcccatagacccgtgcaggagaagttcgtgtgcctgaactgcggcttcgagacacacgcagccgagcaagccgccctgaacatcgccagatcctggctgttcctgcggagccaggagtacaagaaataccagacaaacaagacaaccggcaacaccgataagagagccttcgtcgagacctggcagtccttttaccggaagaagcttaaggaggtgtggaaacctgccgtgcggtctggcggatctggcggaggctccgaggagctgcccgtggtgttcgaggacgtggccgtgtacttcaccagggaggagtggggcatgctggacaagaggcagaaggagctgtacagggacgtgatgaggatgaactacgagctgctggccagcctgggccccgccgccgccaagcccgacctgatcagcaagctggagaggagggccgccccctggatcaagcaccccaacggccccaagtggggcaagggcaggccccccggcaacggcggcccaagcagcggcgcccctcctcccagcggcggcagcccagccggctccccaacctctaccgaggagggcacctctgagtccgccacccccgagagcggccctggcacctccaccgagcccagcgagggcagcgcacccggcagccctgccggcagccccacctccacagaggagggaaccagcaccgagcccagcgaaggcagcgccccaggcaccagcaccgagcctagtgagcaggagattaaacggatcaacaagatcagaagaagacttgtgaaagacagcaacaccaagaaggccggcaagacaggccccatgaaaaccctgctggttagagtgatgacacccgatctgagagagcggctggaaaacctgagaaagaagcctgaaaatatcccccagcccatcagcaatacatctagagccaacctgaataagctgctgaccgattacaccgaaatgaagaaggcgatcctgcatgtgtactgggaagagttccagaaggaccctgtgggcctgatgagccgggtggcccagcctgccagcaagaagatcgatcagaacaagctgaaacctgagatggacgagaagggcaacctgaccaccgccggctttgcctgctctcagtgtggccagcccctgttcgtgtacaagctggagcaggtgtctgagaagggcaaggcttacaccaactacttcggacggtgcaatgtggccgagcacgaaaagctgatcctgctggcccagctgaagcccgagaaggatagcgacgaagccgtgacatatagcctgggaaagtttgggcagagggccctggatttctacagcattcatgtgaccaaggagtccacccaccccgtgaagcccctggcccagatcgccggaaacagatacgcctccggacctgtgggaaaggccctgagcgacgcatgtatgggcacaatcgcctccttcctgtctaagtaccaggacatcatcatcgaacaccagaaggtggtgaagggcaaccagaagagactggagagcctgcgggagctggccggcaaggaaaacctggaataccctagcgtgaccctgccacctcagcctcacaccaaggagggcgttgatgcctacaacgaagtgatcgcccgggtgcgaatgtgggtgaacctgaacctgtggcagaagctgaagctaagcagagatgatgccaagcctctgctgagactgaagggattcccttcctttcctctggtcgagagacaggccaacgaagtggactggtgggacatggtgtgtaacgtgaagaagctgatcaacgagaaaaaggaggatggcaaggtgttttggcagaatctggctggctacaagagacaggaagccctgagaccatacctgagcagcgaggaagatcggaagaagggaaagaaattcgctcggtaccagctgggcgacctgctgctgcacctggaaaagaagcacggcgaggactggggaaaggtgtacgacgaggcctgggagcggattgacaagaaagtggaaggcctgagcaagcacatcaagctggaagaggaacggagaagcgaggacgcccagagcaaggccgccctgaccgactggctgcgggctaaggccagcttcgtgatcgagggcctgaaggaggccgacaaggacgagttctgcagatgcgagctgaagctgcagaagtggtacggggacctgcggggaaagcccttcgccatcgaagccgagaacagcatcctggacatcagcggcttcagcaagcagtacaactgtgccttcatctggcagaaggacggcgtgaagaagctgaacctgtacctgatcatcaactacttcaagggcggcaagctgcggttcaagaagatcaaacctgaagccttcgaagccaacagattctacaccgtgatcaacaaaaagagcggcgagatcgtgcccatggaggtgaacttcaacttcgacgaccccaacctgatcatcctgcctctggcctttggcaagagacagggcagagaattcatctggaacgacctgctgtccctggaaaccggcagcctgaagctggccaacggaagagtgatcgagaagacactgtacaacagaagaacccggcaggatgagcctgccctgttcgtggccctgaccttcgagcggcgggaggtcctggactcctccaatatcaaaccaatgaacctgatcggcgtggcaagaggcgaaaacatccccgccgtgatcgccctgaccgaccccgagggctgcccactgagccggtttaaggatagcctgggaaacccaacccacatcctgagaatcggcgagagctataaggagaagcagcggaccatccaggccaagaaggaggtggagcagcggagagccggcggctacagccggaagtacgccagcaaagccaagaatctggcagacgatatggtgagaaacaccgctagagatctgctgtactacgccgtgacccaggatgccatgctgatcttcgccaacctgagccggggcttcggccggcagggcaagcggaccttcatggccgagagacagtacacacggatggaggactggctgaccgccaagctggcctacgagggcctgagcaagacctacctgtccaagacactggcccagtacacctccaagacatgcagcaactgtgggtttaccatcaccagcgccgactacgacagggtgctggagaagctgaagaagacagcaacaggctggatgaccacaattaacggcaaggagctgaaggtggagggccagattacctactacaacagatacaagagacagaacgtagtcaaggacctgtccgtcgagctggatagactgagcgaagaatctgtgaacaacgacatctcctcctggacaaagggcagaagcggagaagctctgagcctcctgaagaaaagattctcccatagacccgtgcaggagaagttcgtgtgcctgaactgcggcttcgagacacacgcagccgagcaagccgccctgaacatcgccagatcctggctgttcctgcggagccaggagtacaagaaataccagacaaacaagacaaccggcaacaccgataagagagccttcgtcgagacctggcagtccttttaccggaagaagcttaaggaggtgtggaaacctgccgtgcggtctggcggatctggcggaggctcctgaggagctgcccgtggtgttcgaggacgtggccgtgtacttcaccagggaggagtggggcatgctggacaagaggcagaaggagctgtacagggacgtgatgaggatgaactacgagctgctggccagcctgggccccgccgccgccaagcccgacctgatcagcaagctggagaggagggccgccccctggatcaagcaccccaacggccccaagtggggcaagggcaggccccccggcaacggatctggctccggcagcggccccaagaaaaagagaaaagtctaagctgccttctgcggggcttgccttctggccatgcccttcttctctcccttgcacctgtacctcttggtctttgaataaagcctgagtaggaaggctagcaaaaaaaaaaaaaaaaaaaaaaaaaaaaaaaaaaaaaaaaaaaaaaaaaaaaaaaaaaaaaaaaaaaaaaaaaaaaaaaa

SEQ ID NO: 15845 - RNA, 9485 nt, synthetic construct
  source 1..9485: mol_type = other RNA
aggaaataagagagaaaagaagagtaagaagaaatataagagccaccatggcccctaagaagaagcgtaaagtgagccggatggaacgcctcgtctacgaggtgcggcagaagtgcagaaacatcgaggacatctgcatctcctgcggatctctgaacgtgaccctggagcacccactgttcatcggcggcatgtgccagaactgtaaaaactgttttctggagtgtgcctatcaatacgacgatgacggctaccagagctactgcaccatctgttgcggcggaagagaggtgctgatgtgtggaaataacaactgctgccggtgcttctgcgtggaatgcgtggacctgctggtgggccccggcgccgcccaggccgctattaaggaagatccttggaactgctacatgtgcggccacaagggcacatacggcctgctgagacggagagaggactggcctagcagactgcagatgttcttcgccaataaccacgaccaggagttcgacccccctaaggtgtaccctcccgtccccgccgagaagagaaagcccatccgggtcctgagcctgttcgatggcatcgccaccggtctgctggtgctgaaggacctgggcatccaggtggataggtacattgcctccgaggtgtgcgaggactccatcaccgtgggaatggtgcgtcatcagggcaagatcatgtacgtgggcgacgtgcggagcgtgacacagaagcatatccaggagtggggccctttcgacctggtgatcggcggcagcccttgcaatgacctgagcatcgtgaacccagcccggaagggcctgtacgagggaaccggcagactgttcttcgagttttacagactgctgcacgacgcccggcctaaggaaggcgacgaccggcccttcttttggctgttcgagaatgtggtggccatgggagtcagcgacaagcgggatattagccggttcctggagagcaaccccgtgatgatcgatgccaaggaagtgagcgccgcccaccgggccagatacttctggggcaatctgcctggcatgaacagacccctggccagcaccgtgaacgacaagctggagctgcaggagtgcctggagcacggccggatcgccaagttcagcaaggtgagaaccatcaccacccgaagcaacagcatcaaacaaggcaaggaccagcactttcctgtgttcatgaacgagaaggaggacatcctgtggtgtaccgagatggagagagtgttcgggttcccagtccactacacagatgtcagcaacatgtctagactggccagacagagactgctgggaagaagctggtccgtccctgtgatcagacacctgttcgcccctctgaaggagtacttcgcctgcgtgagcagcggcaacagcaacgccaacagccggggccccagcttctctagcggcctggtgccactgtccctgagagggagccacatgggccccatggagatctacaaaaccgtgagcgcctggaagcggcagcctgtgcgcgtgctgagcctgtttcggaatatcgataaagtcctgaaaagcctgggattcctggagagcggctctggctccggcggtggcaccctgaagtacgtggaggatgtgacaaacgtggtcagacgggatgtggagaagtggggccccttcgatctggtgtacggcagcacccaacccctgggcagctcttgtgaccggtgccctggctggtacatgtttcagttccaccggatcctgcagtacgccctgccgagacaggagtcccagcggccattcttttggattttcatggacaacttgctgctgaccgaggatgaccaggaaactaccactcggttcctgcagaccgaagccgtgaccctgcaggacgtgagaggccgggactaccagaacgccatgcgggtgtggtccaacatccctggactgaaaagcaagcacgcacctctgacccctaaagaagaggagtacctgcaggcccaggtgcggagcagaagcaagctggacgcccctaaggtggatctgctggtgaagaattgcctcctgcccctgagagagtacttcaagtatttcagccagaatagtctgcccctgggaggcagcggcggcggcgccctggtgacatttgaggacgtcgccgtgcggttcacccaggaggaatgggctctgctggatccttctcagaaaatcctgtaccgggacgtgatgagagagacataccggaatctgacctccgtgggcatcaactgggaatgttgggaccttgaagcctgcttcagaagcctgggaagaaacctgagagtgcaggtggtgaagagaaagtgcgagctgaccaacagcggcccctgcgccgagggcggcccaagcagcggcgcccctcctcccagcggcggcagcccagccggctccccaacctctaccgaggagggcacctctgagtccgccacccccgagagcggccctggcacctccaccgagcccagcgagggcagcgcacccggcagccctgccggcagccccacctccacagaggagggaaccagcaccgagcccagcgaaggcagcgccccaggcaccagcaccgagcctagtgagcaggagattaaacggatcaacaagatcagaagaagacttgtgaaagacagcaacaccaagaaggccggcaagacaggccccatgaaaaccctgctggttagagtgatgacacccgatctgagagagcggctggaaaacctgagaaagaagcctgaaaatatcccccagcccatcagcaatacatctagagccaacctgaataagctgctgaccgattacaccgaaatgaagaaggcgatcctgcatgtgtactgggaagagttccagaaggaccctgtgggcctgatgagccgggtggcccagcctgccagcaagaagatcgatcagaacaagctgaaacctgagatggacgagaagggcaacctgaccaccgccggctttgcctgctctcagtgtggccagcccctgttcgtgtacaagctggagcaggtgtctgagaagggcaaggcttacaccaactacttcggacggtgcaatgtggccgagcacgaaaagctgatcctgctggcccagctgaagcccgagaaggatagcgacgaagccgtgacatatagcctgggaaagtttgggcagagggccctggatttctacagcattcatgtgaccaaggagtccacccaccccgtgaagcccctggcccagatcgccggaaacagatacgcctccggacctgtgggaaaggccctgagcgacgcatgtatgggcacaatcgcctccttcctgtctaagtaccaggacatcatcatcgaacaccagaaggtggtgaagggcaaccagaagagactggagagcctgcgggagctggccggcaaggaaaacctggaataccctagcgtgaccctgccacctcagcctcacaccaaggagggcgttgatgcctacaacgaagtgatcgcccgggtgcgaatgtgggtgaacctgaacctgtggcagaagctgaagctaagcagagatgatgccaagcctctgctgagactgaagggattcccttcctttcctctggtcgagagacaggccaacgaagtggactggtgggacatggtgtgtaacgtgaagaagctgatcaacgagaaaaaggaggatggcaaggtgttttggcagaatctggctggctacaagagacaggaagccctgagaccatacctgagcagcgaggaagatcggaagaagggaaagaaattcgctcggtaccagctgggcgacctgctgctgcacctggaaaagaagcacggcgaggactggggaaaggtgtacgacgaggcctgggagcggattgacaagaaagtggaaggcctgagcaagcacatcaagctggaagaggaacggagaagcgaggacgcccagagcaaggccgccctgaccgactggctgcgggctaaggccagcttcgtgatcgagggcctgaaggaggccgacaaggacgagttctgcagatgcgagctgaagctgcagaagtggtacggggacctgcggggaaagcccttcgccatcgaagccgagaacagcatcctggacatcagcggcttcagcaagcagtacaactgtgccttcatctggcagaaggacggcgtgaagaagctgaacctgtacctgatcatcaactacttcaagggcggcaagctgcggttcaagaagatcaaacctgaagccttcgaagccaacagattctacaccgtgatcaacaaaaagagcggcgagatcgtgcccatggaggtgaacttcaacttcgacgaccccaacctgatcatcctgcctctggcctttggcaagagacagggcagagaattcatctggaacgacctgctgtccctggaaaccggcagcctgaagctggccaacggaagagtgatcgagaagacactgtacaacagaagaacccggcaggatgagcctgccctgttcgtggccctgaccttcgagcggcgggaggtcctggactcctccaatatcaaaccaatgaacctgatcggcgtggcaagaggcgaaaacatccccgccgtgatcgccctgaccgaccccgagggctgcccactgagccggtttaaggatagcctgggaaacccaacccacatcctgagaatcggcgagagctataaggagaagcagcggaccatccaggccaagaaggaggtggagcagcggagagccggcggctacagccggaagtacgccagcaaagccaagaatctggcagacgatatggtgagaaacaccgctagagatctgctgtactacgccgtgacccaggatgccatgctgatcttcgccaacctgagccggggcttcggccggcagggcaagcggaccttcatggccgagagacagtacacacggatggaggactggctgaccgccaagctggcctacgagggcctgagcaagacctacctgtccaagacactggcccagtacacctccaagacatgcagcaactgtgggtttaccatcaccagcgccgactacgacagggtgctggagaagctgaagaagacagcaacaggctggatgaccacaattaacggcaaggagctgaaggtggagggccagattacctactacaacagatacaagagacagaacgtagtcaaggacctgtccgtcgagctggatagactgagcgaagaatctgtgaacaacgacatctcctcctggacaaagggcagaagcggagaagctctgagcctcctgaagaaaagattctcccatagacccgtgcaggagaagttcgtgtgcctgaactgcggcttcgagacacacgcagccgagcaagccgccctgaacatcgccagatcctggctgttcctgcggagccaggagtacaagaaataccagacaaacaagacaaccggcaacaccgataagagagccttcgtcgagacctggcagtccttttaccggaagaagcttaaggaggtgtggaaacctgccgtgcggtctggcggatctggcggaggctccacccaggtgagcgtgaccttcgacgacgtggccgtgaccttcaccagggaggagtggaggcagctggaccccgcccagaggaccctgtaccaggaggtgatgctggagaactgcaggctgctggtgagcctgggctgccccgtgcccaggcccgagctgatcttccagctggagcagggccagaagctgtggaccgtgaaggaggacctgagcaggagcacctgccccggcaagaggtacaggggcggcccaagcagcggcgcccctcctcccagcggcggcagcccagccggctccccaacctctaccgaggagggcacctctgagtccgccacccccgagagcggccctggcacctccaccgagcccagcgagggcagcgcacccggcagccctgccggcagccccacctccacagaggagggaaccagcaccgagcccagcgaaggcagcgccccaggcaccagcaccgagcctagtgagcaggagattaaacggatcaacaagatcagaagaagacttgtgaaagacagcaacaccaagaaggccggcaagacaggccccatgaaaaccctgctggttagagtgatgacacccgatctgagagagcggctggaaaacctgagaaagaagcctgaaaatatcccccagcccatcagcaatacatctagagccaacctgaataagctgctgaccgattacaccgaaatgaagaaggcgatcctgcatgtgtactgggaagagttccagaaggaccctgtgggcctgatgagccgggtggcccagcctgccagcaagaagatcgatcagaacaagctgaaacctgagatggacgagaagggcaacctgaccaccgccggctttgcctgctctcagtgtggccagcccctgttcgtgtacaagctggagcaggtgtctgagaagggcaaggcttacaccaactacttcggacggtgcaatgtggccgagcacgaaaagctgatcctgctggcccagctgaagcccgagaaggatagcgacgaagccgtgacatatagcctgggaaagtttgggcagagggccctggatttctacagcattcatgtgaccaaggagtccacccaccccgtgaagcccctggcccagatcgccggaaacagatacgcctccggacctgtgggaaaggccctgagcgacgcatgtatgggcacaatcgcctccttcctgtctaagtaccaggacatcatcatcgaacaccagaaggtggtgaagggcaaccagaagagactggagagcctgcgggagctggccggcaaggaaaacctggaataccctagcgtgaccctgccacctcagcctcacaccaaggagggcgttgatgcctacaacgaagtgatcgcccgggtgcgaatgtgggtgaacctgaacctgtggcagaagctgaagctaagcagagatgatgccaagcctctgctgagactgaagggattcccttcctttcctctggtcgagagacaggccaacgaagtggactggtgggacatggtgtgtaacgtgaagaagctgatcaacgagaaaaaggaggatggcaaggtgttttggcagaatctggctggctacaagagacaggaagccctgagaccatacctgagcagcgaggaagatcggaagaagggaaagaaattcgctcggtaccagctgggcgacctgctgctgcacctggaaaagaagcacggcgaggactggggaaaggtgtacgacgaggcctgggagcggattgacaagaaagtggaaggcctgagcaagcacatcaagctggaagaggaacggagaagcgaggacgcccagagcaaggccgccctgaccgactggctgcgggctaaggccagcttcgtgatcgagggcctgaaggaggccgacaaggacgagttctgcagatgcgagctgaagctgcagaagtggtacggggacctgcggggaaagcccttcgccatcgaagccgagaacagcatcctggacatcagcggcttcagcaagcagtacaactgtgccttcatctggcagaaggacggcgtgaagaagctgaacctgtacctgatcatcaactacttcaagggcggcaagctgcggttcaagaagatcaaacctgaagccttcgaagccaacagattctacaccgtgatcaacaaaaagagcggcgagatcgtgcccatggaggtgaacttcaacttcgacgaccccaacctgatcatcctgcctctggcctttggcaagagacagggcagagaattcatctggaacgacctgctgtccctggaaaccggcagcctgaagctggccaacggaagagtgatcgagaagacactgtacaacagaagaacccggcaggatgagcctgccctgttcgtggccctgaccttcgagcggcgggaggtcctggactcctccaatatcaaaccaatgaacctgatcggcgtggcaagaggcgaaaacatccccgccgtgatcgccctgaccgaccccgagggctgcccactgagccggtttaaggatagcctgggaaacccaacccacatcctgagaatcggcgagagctataaggagaagcagcggaccatccaggccaagaaggaggtggagcagcggagagccggcggctacagccggaagtacgccagcaaagccaagaatctggcagacgatatggtgagaaacaccgctagagatctgctgtactacgccgtgacccaggatgccatgctgatcttcgccaacctgagccggggcttcggccggcagggcaagcggaccttcatggccgagagacagtacacacggatggaggactggctgaccgccaagctggcctacgagggcctgagcaagacctacctgtccaagacactggcccagtacacctccaagacatgcagcaactgtgggtttaccatcaccagcgccgactacgacagggtgctggagaagctgaagaagacagcaacaggctggatgaccacaattaacggcaaggagctgaaggtggagggccagattacctactacaacagatacaagagacagaacgtagtcaaggacctgtccgtcgagctggatagactgagcgaagaatctgtgaacaacgacatctcctcctggacaaagggcagaagcggagaagctctgagcctcctgaagaaaagattctcccatagacccgtgcaggagaagttcgtgtgcctgaactgcggcttcgagacacacgcagccgagcaagccgccctgaacatcgccagatcctggctgttcctgcggagccaggagtacaagaaataccagacaaacaagacaaccggcaacaccgataagagagccttcgtcgagacctggcagtccttttaccggaagaagcttaaggaggtgtggaaacctgccgtgcggtctggcggatctggcggaggctcctacccaggtgagcgtgaccttcgacgacgtggccgtgaccttcaccagggaggagtggaggcagctggaccccgcccagaggaccctgtaccaggaggtgatgctggagaactgcaggctgctggtgagcctgggctgccccgtgcccaggcccgagctgatcttccagctggagcagggccagaagctgtggaccgtgaaggaggacctgagcaggagcacctgccccggcaagaggtacaggggatctggctccggcagcggccccaagaaaaagagaaaagtctaagctgccttctgcggggcttgccttctggccatgcccttcttctctcccttgcacctgtacctcttggtctttgaataaagcctgagtaggaaggctagcaaaaaaaaaaaaaaaaaaaaaaaaaaaaaaaaaaaaaaaaaaaaaaaaaaaaaaaaaaaaaaaaaaaaaaaaaaaaaaaa

SEQ ID NO: 15846 - RNA, 9485 nt, synthetic construct
  source 1..9485: mol_type = other RNA
aggaaataagagagaaaagaagagtaagaagaaatataagagccaccatggcccctaagaagaagcgtaaagtgagccggatggaacgcctcgtctacgaggtgcggcagaagtgcagaaacatcgaggacatctgcatctcctgcggatctctgaacgtgaccctggagcacccactgttcatcggcggcatgtgccagaactgtaaaaactgttttctggagtgtgcctatcaatacgacgatgacggctaccagagctactgcaccatctgttgcggcggaagagaggtgctgatgtgtggaaataacaactgctgccggtgcttctgcgtggaatgcgtggacctgctggtgggccccggcgccgcccaggccgctattaaggaagatccttggaactgctacatgtgcggccacaagggcacatacggcctgctgagacggagagaggactggcctagcagactgcagatgttcttcgccaataaccacgaccaggagttcgacccccctaaggtgtaccctcccgtccccgccgagaagagaaagcccatccgggtcctgagcctgttcgatggcatcgccaccggtctgctggtgctgaaggacctgggcatccaggtggataggtacattgcctccgaggtgtgcgaggactccatcaccgtgggaatggtgcgtcatcagggcaagatcatgtacgtgggcgacgtgcggagcgtgacacagaagcatatccaggagtggggccctttcgacctggtgatcggcggcagcccttgcaatgacctgagcatcgtgaacccagcccggaagggcctgtacgagggaaccggcagactgttcttcgagttttacagactgctgcacgacgcccggcctaaggaaggcgacgaccggcccttcttttggctgttcgagaatgtggtggccatgggagtcagcgacaagcgggatattagccggttcctggagagcaaccccgtgatgatcgatgccaaggaagtgagcgccgcccaccgggccagatacttctggggcaatctgcctggcatgaacagacccctggccagcaccgtgaacgacaagctggagctgcaggagtgcctggagcacggccggatcgccaagttcagcaaggtgagaaccatcaccacccgaagcaacagcatcaaacaaggcaaggaccagcactttcctgtgttcatgaacgagaaggaggacatcctgtggtgtaccgagatggagagagtgttcgggttcccagtccactacacagatgtcagcaacatgtctagactggccagacagagactgctgggaagaagctggtccgtccctgtgatcagacacctgttcgcccctctgaaggagtacttcgcctgcgtgagcagcggcaacagcaacgccaacagccggggccccagcttctctagcggcctggtgccactgtccctgagagggagccacatgggccccatggagatctacaaaaccgtgagcgcctggaagcggcagcctgtgcgcgtgctgagcctgtttcggaatatcgataaagtcctgaaaagcctgggattcctggagagcggctctggctccggcggtggcaccctgaagtacgtggaggatgtgacaaacgtggtcagacgggatgtggagaagtggggccccttcgatctggtgtacggcagcacccaacccctgggcagctcttgtgaccggtgccctggctggtacatgtttcagttccaccggatcctgcagtacgccctgccgagacaggagtcccagcggccattcttttggattttcatggacaacttgctgctgaccgaggatgaccaggaaactaccactcggttcctgcagaccgaagccgtgaccctgcaggacgtgagaggccgggactaccagaacgccatgcgggtgtggtccaacatccctggactgaaaagcaagcacgcacctctgacccctaaagaagaggagtacctgcaggcccaggtgcggagcagaagcaagctggacgcccctaaggtggatctgctggtgaagaattgcctcctgcccctgagagagtacttcaagtatttcagccagaatagtctgcccctgggaggcagcggcggcggcgccctggtgacatttgaggacgtcgccgtgcggttcacccaggaggaatgggctctgctggatccttctcagaaaatcctgtaccgggacgtgatgagagagacataccggaatctgacctccgtgggcatcaactgggaatgttgggaccttgaagcctgcttcagaagcctgggaagaaacctgagagtgcaggtggtgaagagaaagtgcgagctgaccaacagcggcccctgcgccgagggcggcccaagcagcggcgcccctcctcccagcggcggcagcccagccggctccccaacctctaccgaggagggcacctctgagtccgccacccccgagagcggccctggcacctccaccgagcccagcgagggcagcgcacccggcagccctgccggcagccccacctccacagaggagggaaccagcaccgagcccagcgaaggcagcgccccaggcaccagcaccgagcctagtgagcaggagattaaacggatcaacaagatcagaagaagacttgtgaaagacagcaacaccaagaaggccggcaagacaggccccatgaaaaccctgctggttagagtgatgacacccgatctgagagagcggctggaaaacctgagaaagaagcctgaaaatatcccccagcccatcagcaatacatctagagccaacctgaataagctgctgaccgattacaccgaaatgaagaaggcgatcctgcatgtgtactgggaagagttccagaaggaccctgtgggcctgatgagccgggtggcccagcctgccagcaagaagatcgatcagaacaagctgaaacctgagatggacgagaagggcaacctgaccaccgccggctttgcctgctctcagtgtggccagcccctgttcgtgtacaagctggagcaggtgtctgagaagggcaaggcttacaccaactacttcggacggtgcaatgtggccgagcacgaaaagctgatcctgctggcccagctgaagcccgagaaggatagcgacgaagccgtgacatatagcctgggaaagtttgggcagagggccctggatttctacagcattcatgtgaccaaggagtccacccaccccgtgaagcccctggcccagatcgccggaaacagatacgcctccggacctgtgggaaaggccctgagcgacgcatgtatgggcacaatcgcctccttcctgtctaagtaccaggacatcatcatcgaacaccagaaggtggtgaagggcaaccagaagagactggagagcctgcgggagctggccggcaaggaaaacctggaataccctagcgtgaccctgccacctcagcctcacaccaaggagggcgttgatgcctacaacgaagtgatcgcccgggtgcgaatgtgggtgaacctgaacctgtggcagaagctgaagctaagcagagatgatgccaagcctctgctgagactgaagggattcccttcctttcctctggtcgagagacaggccaacgaagtggactggtgggacatggtgtgtaacgtgaagaagctgatcaacgagaaaaaggaggatggcaaggtgttttggcagaatctggctggctacaagagacaggaagccctgagaccatacctgagcagcgaggaagatcggaagaagggaaagaaattcgctcggtaccagctgggcgacctgctgctgcacctggaaaagaagcacggcgaggactggggaaaggtgtacgacgaggcctgggagcggattgacaagaaagtggaaggcctgagcaagcacatcaagctggaagaggaacggagaagcgaggacgcccagagcaaggccgccctgaccgactggctgcgggctaaggccagcttcgtgatcgagggcctgaaggaggccgacaaggacgagttctgcagatgcgagctgaagctgcagaagtggtacggggacctgcggggaaagcccttcgccatcgaagccgagaacagcatcctggacatcagcggcttcagcaagcagtacaactgtgccttcatctggcagaaggacggcgtgaagaagctgaacctgtacctgatcatcaactacttcaagggcggcaagctgcggttcaagaagatcaaacctgaagccttcgaagccaacagattctacaccgtgatcaacaaaaagagcggcgagatcgtgcccatggaggtgaacttcaacttcgacgaccccaacctgatcatcctgcctctggcctttggcaagagacagggcagagaattcatctggaacgacctgctgtccctggaaaccggcagcctgaagctggccaacggaagagtgatcgagaagacactgtacaacagaagaacccggcaggatgagcctgccctgttcgtggccctgaccttcgagcggcgggaggtcctggactcctccaatatcaaaccaatgaacctgatcggcgtggcaagaggcgaaaacatccccgccgtgatcgccctgaccgaccccgagggctgcccactgagccggtttaaggatagcctgggaaacccaacccacatcctgagaatcggcgagagctataaggagaagcagcggaccatccaggccaagaaggaggtggagcagcggagagccggcggctacagccggaagtacgccagcaaagccaagaatctggcagacgatatggtgagaaacaccgctagagatctgctgtactacgccgtgacccaggatgccatgctgatcttcgccaacctgagccggggcttcggccggcagggcaagcggaccttcatggccgagagacagtacacacggatggaggactggctgaccgccaagctggcctacgagggcctgagcaagacctacctgtccaagacactggcccagtacacctccaagacatgcagcaactgtgggtttaccatcaccagcgccgactacgacagggtgctggagaagctgaagaagacagcaacaggctggatgaccacaattaacggcaaggagctgaaggtggagggccagattacctactacaacagatacaagagacagaacgtagtcaaggacctgtccgtcgagctggatagactgagcgaagaatctgtgaacaacgacatctcctcctggacaaagggcagaagcggagaagctctgagcctcctgaagaaaagattctcccatagacccgtgcaggagaagttcgtgtgcctgaactgcggcttcgagacacacgcagccgagcaagccgccctgaacatcgccagatcctggctgttcctgcggagccaggagtacaagaaataccagacaaacaagacaaccggcaacaccgataagagagccttcgtcgagacctggcagtccttttaccggaagaagcttaaggaggtgtggaaacctgccgtgcggtctggcggatctggcggaggctccagccagggcctggtggccttcgaggacgtggccgtgtacttcagcctggaggagtgggagaggctggacgccgaccagagggagctgtaccaggaggtgatgcaggagaactacggcatcctggtgagcctgggctaccccatccccaagcccgacctgatcttcaggctggagcagggcgaggagccctgggtgcccgacagccccaggcccgaggagggcgacatcgtgaccggcgtgtacggcggcccaagcagcggcgcccctcctcccagcggcggcagcccagccggctccccaacctctaccgaggagggcacctctgagtccgccacccccgagagcggccctggcacctccaccgagcccagcgagggcagcgcacccggcagccctgccggcagccccacctccacagaggagggaaccagcaccgagcccagcgaaggcagcgccccaggcaccagcaccgagcctagtgagcaggagattaaacggatcaacaagatcagaagaagacttgtgaaagacagcaacaccaagaaggccggcaagacaggccccatgaaaaccctgctggttagagtgatgacacccgatctgagagagcggctggaaaacctgagaaagaagcctgaaaatatcccccagcccatcagcaatacatctagagccaacctgaataagctgctgaccgattacaccgaaatgaagaaggcgatcctgcatgtgtactgggaagagttccagaaggaccctgtgggcctgatgagccgggtggcccagcctgccagcaagaagatcgatcagaacaagctgaaacctgagatggacgagaagggcaacctgaccaccgccggctttgcctgctctcagtgtggccagcccctgttcgtgtacaagctggagcaggtgtctgagaagggcaaggcttacaccaactacttcggacggtgcaatgtggccgagcacgaaaagctgatcctgctggcccagctgaagcccgagaaggatagcgacgaagccgtgacatatagcctgggaaagtttgggcagagggccctggatttctacagcattcatgtgaccaaggagtccacccaccccgtgaagcccctggcccagatcgccggaaacagatacgcctccggacctgtgggaaaggccctgagcgacgcatgtatgggcacaatcgcctccttcctgtctaagtaccaggacatcatcatcgaacaccagaaggtggtgaagggcaaccagaagagactggagagcctgcgggagctggccggcaaggaaaacctggaataccctagcgtgaccctgccacctcagcctcacaccaaggagggcgttgatgcctacaacgaagtgatcgcccgggtgcgaatgtgggtgaacctgaacctgtggcagaagctgaagctaagcagagatgatgccaagcctctgctgagactgaagggattcccttcctttcctctggtcgagagacaggccaacgaagtggactggtgggacatggtgtgtaacgtgaagaagctgatcaacgagaaaaaggaggatggcaaggtgttttggcagaatctggctggctacaagagacaggaagccctgagaccatacctgagcagcgaggaagatcggaagaagggaaagaaattcgctcggtaccagctgggcgacctgctgctgcacctggaaaagaagcacggcgaggactggggaaaggtgtacgacgaggcctgggagcggattgacaagaaagtggaaggcctgagcaagcacatcaagctggaagaggaacggagaagcgaggacgcccagagcaaggccgccctgaccgactggctgcgggctaaggccagcttcgtgatcgagggcctgaaggaggccgacaaggacgagttctgcagatgcgagctgaagctgcagaagtggtacggggacctgcggggaaagcccttcgccatcgaagccgagaacagcatcctggacatcagcggcttcagcaagcagtacaactgtgccttcatctggcagaaggacggcgtgaagaagctgaacctgtacctgatcatcaactacttcaagggcggcaagctgcggttcaagaagatcaaacctgaagccttcgaagccaacagattctacaccgtgatcaacaaaaagagcggcgagatcgtgcccatggaggtgaacttcaacttcgacgaccccaacctgatcatcctgcctctggcctttggcaagagacagggcagagaattcatctggaacgacctgctgtccctggaaaccggcagcctgaagctggccaacggaagagtgatcgagaagacactgtacaacagaagaacccggcaggatgagcctgccctgttcgtggccctgaccttcgagcggcgggaggtcctggactcctccaatatcaaaccaatgaacctgatcggcgtggcaagaggcgaaaacatccccgccgtgatcgccctgaccgaccccgagggctgcccactgagccggtttaaggatagcctgggaaacccaacccacatcctgagaatcggcgagagctataaggagaagcagcggaccatccaggccaagaaggaggtggagcagcggagagccggcggctacagccggaagtacgccagcaaagccaagaatctggcagacgatatggtgagaaacaccgctagagatctgctgtactacgccgtgacccaggatgccatgctgatcttcgccaacctgagccggggcttcggccggcagggcaagcggaccttcatggccgagagacagtacacacggatggaggactggctgaccgccaagctggcctacgagggcctgagcaagacctacctgtccaagacactggcccagtacacctccaagacatgcagcaactgtgggtttaccatcaccagcgccgactacgacagggtgctggagaagctgaagaagacagcaacaggctggatgaccacaattaacggcaaggagctgaaggtggagggccagattacctactacaacagatacaagagacagaacgtagtcaaggacctgtccgtcgagctggatagactgagcgaagaatctgtgaacaacgacatctcctcctggacaaagggcagaagcggagaagctctgagcctcctgaagaaaagattctcccatagacccgtgcaggagaagttcgtgtgcctgaactgcggcttcgagacacacgcagccgagcaagccgccctgaacatcgccagatcctggctgttcctgcggagccaggagtacaagaaataccagacaaacaagacaaccggcaacaccgataagagagccttcgtcgagacctggcagtccttttaccggaagaagcttaaggaggtgtggaaacctgccgtgcggtctggcggatctggcggaggctcctagccagggcctggtggccttcgaggacgtggccgtgtacttcagcctggaggagtgggagaggctggacgccgaccagagggagctgtaccaggaggtgatgcaggagaactacggcatcctggtgagcctgggctaccccatccccaagcccgacctgatcttcaggctggagcagggcgaggagccctgggtgcccgacagccccaggcccgaggagggcgacatcgtgaccggcgtgtacggatctggctccggcagcggccccaagaaaaagagaaaagtctaagctgccttctgcggggcttgccttctggccatgcccttcttctctcccttgcacctgtacctcttggtctttgaataaagcctgagtaggaaggctagcaaaaaaaaaaaaaaaaaaaaaaaaaaaaaaaaaaaaaaaaaaaaaaaaaaaaaaaaaaaaaaaaaaaaaaaaaaaaaaaa

SEQ ID NO: 15847 - RNA, 9485 nt, synthetic construct
  source 1..9485: mol_type = other RNA
aggaaataagagagaaaagaagagtaagaagaaatataagagccaccatggcccctaagaagaagcgtaaagtgagccggatggaacgcctcgtctacgaggtgcggcagaagtgcagaaacatcgaggacatctgcatctcctgcggatctctgaacgtgaccctggagcacccactgttcatcggcggcatgtgccagaactgtaaaaactgttttctggagtgtgcctatcaatacgacgatgacggctaccagagctactgcaccatctgttgcggcggaagagaggtgctgatgtgtggaaataacaactgctgccggtgcttctgcgtggaatgcgtggacctgctggtgggccccggcgccgcccaggccgctattaaggaagatccttggaactgctacatgtgcggccacaagggcacatacggcctgctgagacggagagaggactggcctagcagactgcagatgttcttcgccaataaccacgaccaggagttcgacccccctaaggtgtaccctcccgtccccgccgagaagagaaagcccatccgggtcctgagcctgttcgatggcatcgccaccggtctgctggtgctgaaggacctgggcatccaggtggataggtacattgcctccgaggtgtgcgaggactccatcaccgtgggaatggtgcgtcatcagggcaagatcatgtacgtgggcgacgtgcggagcgtgacacagaagcatatccaggagtggggccctttcgacctggtgatcggcggcagcccttgcaatgacctgagcatcgtgaacccagcccggaagggcctgtacgagggaaccggcagactgttcttcgagttttacagactgctgcacgacgcccggcctaaggaaggcgacgaccggcccttcttttggctgttcgagaatgtggtggccatgggagtcagcgacaagcgggatattagccggttcctggagagcaaccccgtgatgatcgatgccaaggaagtgagcgccgcccaccgggccagatacttctggggcaatctgcctggcatgaacagacccctggccagcaccgtgaacgacaagctggagctgcaggagtgcctggagcacggccggatcgccaagttcagcaaggtgagaaccatcaccacccgaagcaacagcatcaaacaaggcaaggaccagcactttcctgtgttcatgaacgagaaggaggacatcctgtggtgtaccgagatggagagagtgttcgggttcccagtccactacacagatgtcagcaacatgtctagactggccagacagagactgctgggaagaagctggtccgtccctgtgatcagacacctgttcgcccctctgaaggagtacttcgcctgcgtgagcagcggcaacagcaacgccaacagccggggccccagcttctctagcggcctggtgccactgtccctgagagggagccacatgggccccatggagatctacaaaaccgtgagcgcctggaagcggcagcctgtgcgcgtgctgagcctgtttcggaatatcgataaagtcctgaaaagcctgggattcctggagagcggctctggctccggcggtggcaccctgaagtacgtggaggatgtgacaaacgtggtcagacgggatgtggagaagtggggccccttcgatctggtgtacggcagcacccaacccctgggcagctcttgtgaccggtgccctggctggtacatgtttcagttccaccggatcctgcagtacgccctgccgagacaggagtcccagcggccattcttttggattttcatggacaacttgctgctgaccgaggatgaccaggaaactaccactcggttcctgcagaccgaagccgtgaccctgcaggacgtgagaggccgggactaccagaacgccatgcgggtgtggtccaacatccctggactgaaaagcaagcacgcacctctgacccctaaagaagaggagtacctgcaggcccaggtgcggagcagaagcaagctggacgcccctaaggtggatctgctggtgaagaattgcctcctgcccctgagagagtacttcaagtatttcagccagaatagtctgcccctgggaggcagcggcggcggcgccctggtgacatttgaggacgtcgccgtgcggttcacccaggaggaatgggctctgctggatccttctcagaaaatcctgtaccgggacgtgatgagagagacataccggaatctgacctccgtgggcatcaactgggaatgttgggaccttgaagcctgcttcagaagcctgggaagaaacctgagagtgcaggtggtgaagagaaagtgcgagctgaccaacagcggcccctgcgccgagggcggcccaagcagcggcgcccctcctcccagcggcggcagcccagccggctccccaacctctaccgaggagggcacctctgagtccgccacccccgagagcggccctggcacctccaccgagcccagcgagggcagcgcacccggcagccctgccggcagccccacctccacagaggagggaaccagcaccgagcccagcgaaggcagcgccccaggcaccagcaccgagcctagtgagcaggagattaaacggatcaacaagatcagaagaagacttgtgaaagacagcaacaccaagaaggccggcaagacaggccccatgaaaaccctgctggttagagtgatgacacccgatctgagagagcggctggaaaacctgagaaagaagcctgaaaatatcccccagcccatcagcaatacatctagagccaacctgaataagctgctgaccgattacaccgaaatgaagaaggcgatcctgcatgtgtactgggaagagttccagaaggaccctgtgggcctgatgagccgggtggcccagcctgccagcaagaagatcgatcagaacaagctgaaacctgagatggacgagaagggcaacctgaccaccgccggctttgcctgctctcagtgtggccagcccctgttcgtgtacaagctggagcaggtgtctgagaagggcaaggcttacaccaactacttcggacggtgcaatgtggccgagcacgaaaagctgatcctgctggcccagctgaagcccgagaaggatagcgacgaagccgtgacatatagcctgggaaagtttgggcagagggccctggatttctacagcattcatgtgaccaaggagtccacccaccccgtgaagcccctggcccagatcgccggaaacagatacgcctccggacctgtgggaaaggccctgagcgacgcatgtatgggcacaatcgcctccttcctgtctaagtaccaggacatcatcatcgaacaccagaaggtggtgaagggcaaccagaagagactggagagcctgcgggagctggccggcaaggaaaacctggaataccctagcgtgaccctgccacctcagcctcacaccaaggagggcgttgatgcctacaacgaagtgatcgcccgggtgcgaatgtgggtgaacctgaacctgtggcagaagctgaagctaagcagagatgatgccaagcctctgctgagactgaagggattcccttcctttcctctggtcgagagacaggccaacgaagtggactggtgggacatggtgtgtaacgtgaagaagctgatcaacgagaaaaaggaggatggcaaggtgttttggcagaatctggctggctacaagagacaggaagccctgagaccatacctgagcagcgaggaagatcggaagaagggaaagaaattcgctcggtaccagctgggcgacctgctgctgcacctggaaaagaagcacggcgaggactggggaaaggtgtacgacgaggcctgggagcggattgacaagaaagtggaaggcctgagcaagcacatcaagctggaagaggaacggagaagcgaggacgcccagagcaaggccgccctgaccgactggctgcgggctaaggccagcttcgtgatcgagggcctgaaggaggccgacaaggacgagttctgcagatgcgagctgaagctgcagaagtggtacggggacctgcggggaaagcccttcgccatcgaagccgagaacagcatcctggacatcagcggcttcagcaagcagtacaactgtgccttcatctggcagaaggacggcgtgaagaagctgaacctgtacctgatcatcaactacttcaagggcggcaagctgcggttcaagaagatcaaacctgaagccttcgaagccaacagattctacaccgtgatcaacaaaaagagcggcgagatcgtgcccatggaggtgaacttcaacttcgacgaccccaacctgatcatcctgcctctggcctttggcaagagacagggcagagaattcatctggaacgacctgctgtccctggaaaccggcagcctgaagctggccaacggaagagtgatcgagaagacactgtacaacagaagaacccggcaggatgagcctgccctgttcgtggccctgaccttcgagcggcgggaggtcctggactcctccaatatcaaaccaatgaacctgatcggcgtggcaagaggcgaaaacatccccgccgtgatcgccctgaccgaccccgagggctgcccactgagccggtttaaggatagcctgggaaacccaacccacatcctgagaatcggcgagagctataaggagaagcagcggaccatccaggccaagaaggaggtggagcagcggagagccggcggctacagccggaagtacgccagcaaagccaagaatctggcagacgatatggtgagaaacaccgctagagatctgctgtactacgccgtgacccaggatgccatgctgatcttcgccaacctgagccggggcttcggccggcagggcaagcggaccttcatggccgagagacagtacacacggatggaggactggctgaccgccaagctggcctacgagggcctgagcaagacctacctgtccaagacactggcccagtacacctccaagacatgcagcaactgtgggtttaccatcaccagcgccgactacgacagggtgctggagaagctgaagaagacagcaacaggctggatgaccacaattaacggcaaggagctgaaggtggagggccagattacctactacaacagatacaagagacagaacgtagtcaaggacctgtccgtcgagctggatagactgagcgaagaatctgtgaacaacgacatctcctcctggacaaagggcagaagcggagaagctctgagcctcctgaagaaaagattctcccatagacccgtgcaggagaagttcgtgtgcctgaactgcggcttcgagacacacgcagccgagcaagccgccctgaacatcgccagatcctggctgttcctgcggagccaggagtacaagaaataccagacaaacaagacaaccggcaacaccgataagagagccttcgtcgagacctggcagtccttttaccggaagaagcttaaggaggtgtggaaacctgccgtgcggtctggcggatctggcggaggctccttccaggagcccgtgaccttcgaggacgtggccgtgtacttcacccagaaccagtgggccagcctggacagcgcccagagggccctgtacagggaggtgatgctggagaactacgccaacgtggccagcctggtgagccccttccccaggcccgacctgatcagccagctggagaggggcgaggccccctgggaccccgacccctgggaggccgaggacctgaggggcatctgccccggcggcggcggcccaagcagcggcgcccctcctcccagcggcggcagcccagccggctccccaacctctaccgaggagggcacctctgagtccgccacccccgagagcggccctggcacctccaccgagcccagcgagggcagcgcacccggcagccctgccggcagccccacctccacagaggagggaaccagcaccgagcccagcgaaggcagcgccccaggcaccagcaccgagcctagtgagcaggagattaaacggatcaacaagatcagaagaagacttgtgaaagacagcaacaccaagaaggccggcaagacaggccccatgaaaaccctgctggttagagtgatgacacccgatctgagagagcggctggaaaacctgagaaagaagcctgaaaatatcccccagcccatcagcaatacatctagagccaacctgaataagctgctgaccgattacaccgaaatgaagaaggcgatcctgcatgtgtactgggaagagttccagaaggaccctgtgggcctgatgagccgggtggcccagcctgccagcaagaagatcgatcagaacaagctgaaacctgagatggacgagaagggcaacctgaccaccgccggctttgcctgctctcagtgtggccagcccctgttcgtgtacaagctggagcaggtgtctgagaagggcaaggcttacaccaactacttcggacggtgcaatgtggccgagcacgaaaagctgatcctgctggcccagctgaagcccgagaaggatagcgacgaagccgtgacatatagcctgggaaagtttgggcagagggccctggatttctacagcattcatgtgaccaaggagtccacccaccccgtgaagcccctggcccagatcgccggaaacagatacgcctccggacctgtgggaaaggccctgagcgacgcatgtatgggcacaatcgcctccttcctgtctaagtaccaggacatcatcatcgaacaccagaaggtggtgaagggcaaccagaagagactggagagcctgcgggagctggccggcaaggaaaacctggaataccctagcgtgaccctgccacctcagcctcacaccaaggagggcgttgatgcctacaacgaagtgatcgcccgggtgcgaatgtgggtgaacctgaacctgtggcagaagctgaagctaagcagagatgatgccaagcctctgctgagactgaagggattcccttcctttcctctggtcgagagacaggccaacgaagtggactggtgggacatggtgtgtaacgtgaagaagctgatcaacgagaaaaaggaggatggcaaggtgttttggcagaatctggctggctacaagagacaggaagccctgagaccatacctgagcagcgaggaagatcggaagaagggaaagaaattcgctcggtaccagctgggcgacctgctgctgcacctggaaaagaagcacggcgaggactggggaaaggtgtacgacgaggcctgggagcggattgacaagaaagtggaaggcctgagcaagcacatcaagctggaagaggaacggagaagcgaggacgcccagagcaaggccgccctgaccgactggctgcgggctaaggccagcttcgtgatcgagggcctgaaggaggccgacaaggacgagttctgcagatgcgagctgaagctgcagaagtggtacggggacctgcggggaaagcccttcgccatcgaagccgagaacagcatcctggacatcagcggcttcagcaagcagtacaactgtgccttcatctggcagaaggacggcgtgaagaagctgaacctgtacctgatcatcaactacttcaagggcggcaagctgcggttcaagaagatcaaacctgaagccttcgaagccaacagattctacaccgtgatcaacaaaaagagcggcgagatcgtgcccatggaggtgaacttcaacttcgacgaccccaacctgatcatcctgcctctggcctttggcaagagacagggcagagaattcatctggaacgacctgctgtccctggaaaccggcagcctgaagctggccaacggaagagtgatcgagaagacactgtacaacagaagaacccggcaggatgagcctgccctgttcgtggccctgaccttcgagcggcgggaggtcctggactcctccaatatcaaaccaatgaacctgatcggcgtggcaagaggcgaaaacatccccgccgtgatcgccctgaccgaccccgagggctgcccactgagccggtttaaggatagcctgggaaacccaacccacatcctgagaatcggcgagagctataaggagaagcagcggaccatccaggccaagaaggaggtggagcagcggagagccggcggctacagccggaagtacgccagcaaagccaagaatctggcagacgatatggtgagaaacaccgctagagatctgctgtactacgccgtgacccaggatgccatgctgatcttcgccaacctgagccggggcttcggccggcagggcaagcggaccttcatggccgagagacagtacacacggatggaggactggctgaccgccaagctggcctacgagggcctgagcaagacctacctgtccaagacactggcccagtacacctccaagacatgcagcaactgtgggtttaccatcaccagcgccgactacgacagggtgctggagaagctgaagaagacagcaacaggctggatgaccacaattaacggcaaggagctgaaggtggagggccagattacctactacaacagatacaagagacagaacgtagtcaaggacctgtccgtcgagctggatagactgagcgaagaatctgtgaacaacgacatctcctcctggacaaagggcagaagcggagaagctctgagcctcctgaagaaaagattctcccatagacccgtgcaggagaagttcgtgtgcctgaactgcggcttcgagacacacgcagccgagcaagccgccctgaacatcgccagatcctggctgttcctgcggagccaggagtacaagaaataccagacaaacaagacaaccggcaacaccgataagagagccttcgtcgagacctggcagtccttttaccggaagaagcttaaggaggtgtggaaacctgccgtgcggtctggcggatctggcggaggctcctttccaggagcccgtgaccttcgaggacgtggccgtgtacttcacccagaaccagtgggccagcctggacagcgcccagagggccctgtacagggaggtgatgctggagaactacgccaacgtggccagcctggtgagccccttccccaggcccgacctgatcagccagctggagaggggcgaggccccctgggaccccgacccctgggaggccgaggacctgaggggcatctgccccggcggcggatctggctccggcagcggccccaagaaaaagagaaaagtctaagctgccttctgcggggcttgccttctggccatgcccttcttctctcccttgcacctgtacctcttggtctttgaataaagcctgagtaggaaggctagcaaaaaaaaaaaaaaaaaaaaaaaaaaaaaaaaaaaaaaaaaaaaaaaaaaaaaaaaaaaaaaaaaaaaaaaaaaaaaaaa

SEQ ID NO: 15848 - RNA, 9485 nt, synthetic construct
  source 1..9485: mol_type = other RNA
aggaaataagagagaaaagaagagtaagaagaaatataagagccaccatggcccctaagaagaagcgtaaagtgagccggatggaacgcctcgtctacgaggtgcggcagaagtgcagaaacatcgaggacatctgcatctcctgcggatctctgaacgtgaccctggagcacccactgttcatcggcggcatgtgccagaactgtaaaaactgttttctggagtgtgcctatcaatacgacgatgacggctaccagagctactgcaccatctgttgcggcggaagagaggtgctgatgtgtggaaataacaactgctgccggtgcttctgcgtggaatgcgtggacctgctggtgggccccggcgccgcccaggccgctattaaggaagatccttggaactgctacatgtgcggccacaagggcacatacggcctgctgagacggagagaggactggcctagcagactgcagatgttcttcgccaataaccacgaccaggagttcgacccccctaaggtgtaccctcccgtccccgccgagaagagaaagcccatccgggtcctgagcctgttcgatggcatcgccaccggtctgctggtgctgaaggacctgggcatccaggtggataggtacattgcctccgaggtgtgcgaggactccatcaccgtgggaatggtgcgtcatcagggcaagatcatgtacgtgggcgacgtgcggagcgtgacacagaagcatatccaggagtggggccctttcgacctggtgatcggcggcagcccttgcaatgacctgagcatcgtgaacccagcccggaagggcctgtacgagggaaccggcagactgttcttcgagttttacagactgctgcacgacgcccggcctaaggaaggcgacgaccggcccttcttttggctgttcgagaatgtggtggccatgggagtcagcgacaagcgggatattagccggttcctggagagcaaccccgtgatgatcgatgccaaggaagtgagcgccgcccaccgggccagatacttctggggcaatctgcctggcatgaacagacccctggccagcaccgtgaacgacaagctggagctgcaggagtgcctggagcacggccggatcgccaagttcagcaaggtgagaaccatcaccacccgaagcaacagcatcaaacaaggcaaggaccagcactttcctgtgttcatgaacgagaaggaggacatcctgtggtgtaccgagatggagagagtgttcgggttcccagtccactacacagatgtcagcaacatgtctagactggccagacagagactgctgggaagaagctggtccgtccctgtgatcagacacctgttcgcccctctgaaggagtacttcgcctgcgtgagcagcggcaacagcaacgccaacagccggggccccagcttctctagcggcctggtgccactgtccctgagagggagccacatgggccccatggagatctacaaaaccgtgagcgcctggaagcggcagcctgtgcgcgtgctgagcctgtttcggaatatcgataaagtcctgaaaagcctgggattcctggagagcggctctggctccggcggtggcaccctgaagtacgtggaggatgtgacaaacgtggtcagacgggatgtggagaagtggggccccttcgatctggtgtacggcagcacccaacccctgggcagctcttgtgaccggtgccctggctggtacatgtttcagttccaccggatcctgcagtacgccctgccgagacaggagtcccagcggccattcttttggattttcatggacaacttgctgctgaccgaggatgaccaggaaactaccactcggttcctgcagaccgaagccgtgaccctgcaggacgtgagaggccgggactaccagaacgccatgcgggtgtggtccaacatccctggactgaaaagcaagcacgcacctctgacccctaaagaagaggagtacctgcaggcccaggtgcggagcagaagcaagctggacgcccctaaggtggatctgctggtgaagaattgcctcctgcccctgagagagtacttcaagtatttcagccagaatagtctgcccctgggaggcagcggcggcggcgccctggtgacatttgaggacgtcgccgtgcggttcacccaggaggaatgggctctgctggatccttctcagaaaatcctgtaccgggacgtgatgagagagacataccggaatctgacctccgtgggcatcaactgggaatgttgggaccttgaagcctgcttcagaagcctgggaagaaacctgagagtgcaggtggtgaagagaaagtgcgagctgaccaacagcggcccctgcgccgagggcggcccaagcagcggcgcccctcctcccagcggcggcagcccagccggctccccaacctctaccgaggagggcacctctgagtccgccacccccgagagcggccctggcacctccaccgagcccagcgagggcagcgcacccggcagccctgccggcagccccacctccacagaggagggaaccagcaccgagcccagcgaaggcagcgccccaggcaccagcaccgagcctagtgagcaggagattaaacggatcaacaagatcagaagaagacttgtgaaagacagcaacaccaagaaggccggcaagacaggccccatgaaaaccctgctggttagagtgatgacacccgatctgagagagcggctggaaaacctgagaaagaagcctgaaaatatcccccagcccatcagcaatacatctagagccaacctgaataagctgctgaccgattacaccgaaatgaagaaggcgatcctgcatgtgtactgggaagagttccagaaggaccctgtgggcctgatgagccgggtggcccagcctgccagcaagaagatcgatcagaacaagctgaaacctgagatggacgagaagggcaacctgaccaccgccggctttgcctgctctcagtgtggccagcccctgttcgtgtacaagctggagcaggtgtctgagaagggcaaggcttacaccaactacttcggacggtgcaatgtggccgagcacgaaaagctgatcctgctggcccagctgaagcccgagaaggatagcgacgaagccgtgacatatagcctgggaaagtttgggcagagggccctggatttctacagcattcatgtgaccaaggagtccacccaccccgtgaagcccctggcccagatcgccggaaacagatacgcctccggacctgtgggaaaggccctgagcgacgcatgtatgggcacaatcgcctccttcctgtctaagtaccaggacatcatcatcgaacaccagaaggtggtgaagggcaaccagaagagactggagagcctgcgggagctggccggcaaggaaaacctggaataccctagcgtgaccctgccacctcagcctcacaccaaggagggcgttgatgcctacaacgaagtgatcgcccgggtgcgaatgtgggtgaacctgaacctgtggcagaagctgaagctaagcagagatgatgccaagcctctgctgagactgaagggattcccttcctttcctctggtcgagagacaggccaacgaagtggactggtgggacatggtgtgtaacgtgaagaagctgatcaacgagaaaaaggaggatggcaaggtgttttggcagaatctggctggctacaagagacaggaagccctgagaccatacctgagcagcgaggaagatcggaagaagggaaagaaattcgctcggtaccagctgggcgacctgctgctgcacctggaaaagaagcacggcgaggactggggaaaggtgtacgacgaggcctgggagcggattgacaagaaagtggaaggcctgagcaagcacatcaagctggaagaggaacggagaagcgaggacgcccagagcaaggccgccctgaccgactggctgcgggctaaggccagcttcgtgatcgagggcctgaaggaggccgacaaggacgagttctgcagatgcgagctgaagctgcagaagtggtacggggacctgcggggaaagcccttcgccatcgaagccgagaacagcatcctggacatcagcggcttcagcaagcagtacaactgtgccttcatctggcagaaggacggcgtgaagaagctgaacctgtacctgatcatcaactacttcaagggcggcaagctgcggttcaagaagatcaaacctgaagccttcgaagccaacagattctacaccgtgatcaacaaaaagagcggcgagatcgtgcccatggaggtgaacttcaacttcgacgaccccaacctgatcatcctgcctctggcctttggcaagagacagggcagagaattcatctggaacgacctgctgtccctggaaaccggcagcctgaagctggccaacggaagagtgatcgagaagacactgtacaacagaagaacccggcaggatgagcctgccctgttcgtggccctgaccttcgagcggcgggaggtcctggactcctccaatatcaaaccaatgaacctgatcggcgtggcaagaggcgaaaacatccccgccgtgatcgccctgaccgaccccgagggctgcccactgagccggtttaaggatagcctgggaaacccaacccacatcctgagaatcggcgagagctataaggagaagcagcggaccatccaggccaagaaggaggtggagcagcggagagccggcggctacagccggaagtacgccagcaaagccaagaatctggcagacgatatggtgagaaacaccgctagagatctgctgtactacgccgtgacccaggatgccatgctgatcttcgccaacctgagccggggcttcggccggcagggcaagcggaccttcatggccgagagacagtacacacggatggaggactggctgaccgccaagctggcctacgagggcctgagcaagacctacctgtccaagacactggcccagtacacctccaagacatgcagcaactgtgggtttaccatcaccagcgccgactacgacagggtgctggagaagctgaagaagacagcaacaggctggatgaccacaattaacggcaaggagctgaaggtggagggccagattacctactacaacagatacaagagacagaacgtagtcaaggacctgtccgtcgagctggatagactgagcgaagaatctgtgaacaacgacatctcctcctggacaaagggcagaagcggagaagctctgagcctcctgaagaaaagattctcccatagacccgtgcaggagaagttcgtgtgcctgaactgcggcttcgagacacacgcagccgagcaagccgccctgaacatcgccagatcctggctgttcctgcggagccaggagtacaagaaataccagacaaacaagacaaccggcaacaccgataagagagccttcgtcgagacctggcagtccttttaccggaagaagcttaaggaggtgtggaaacctgccgtgcggtctggcggatctggcggaggctccgtgaccttcgacgacgtggccgtgaacttcaccatggaggagtgggccctgctggaccccagccagaagaagctgtacagggacgtgatgtgggagaacttcaggaacgtgaccgccatcggcaggaactgggacaaccagcagatcgaggaccagtacaagaactacaggaacaacctgaggaagaccagcgccgacttccagagcctgcagaagcacgccatgaccaaccccgaggagaagggcggcccaagcagcggcgcccctcctcccagcggcggcagcccagccggctccccaacctctaccgaggagggcacctctgagtccgccacccccgagagcggccctggcacctccaccgagcccagcgagggcagcgcacccggcagccctgccggcagccccacctccacagaggagggaaccagcaccgagcccagcgaaggcagcgccccaggcaccagcaccgagcctagtgagcaggagattaaacggatcaacaagatcagaagaagacttgtgaaagacagcaacaccaagaaggccggcaagacaggccccatgaaaaccctgctggttagagtgatgacacccgatctgagagagcggctggaaaacctgagaaagaagcctgaaaatatcccccagcccatcagcaatacatctagagccaacctgaataagctgctgaccgattacaccgaaatgaagaaggcgatcctgcatgtgtactgggaagagttccagaaggaccctgtgggcctgatgagccgggtggcccagcctgccagcaagaagatcgatcagaacaagctgaaacctgagatggacgagaagggcaacctgaccaccgccggctttgcctgctctcagtgtggccagcccctgttcgtgtacaagctggagcaggtgtctgagaagggcaaggcttacaccaactacttcggacggtgcaatgtggccgagcacgaaaagctgatcctgctggcccagctgaagcccgagaaggatagcgacgaagccgtgacatatagcctgggaaagtttgggcagagggccctggatttctacagcattcatgtgaccaaggagtccacccaccccgtgaagcccctggcccagatcgccggaaacagatacgcctccggacctgtgggaaaggccctgagcgacgcatgtatgggcacaatcgcctccttcctgtctaagtaccaggacatcatcatcgaacaccagaaggtggtgaagggcaaccagaagagactggagagcctgcgggagctggccggcaaggaaaacctggaataccctagcgtgaccctgccacctcagcctcacaccaaggagggcgttgatgcctacaacgaagtgatcgcccgggtgcgaatgtgggtgaacctgaacctgtggcagaagctgaagctaagcagagatgatgccaagcctctgctgagactgaagggattcccttcctttcctctggtcgagagacaggccaacgaagtggactggtgggacatggtgtgtaacgtgaagaagctgatcaacgagaaaaaggaggatggcaaggtgttttggcagaatctggctggctacaagagacaggaagccctgagaccatacctgagcagcgaggaagatcggaagaagggaaagaaattcgctcggtaccagctgggcgacctgctgctgcacctggaaaagaagcacggcgaggactggggaaaggtgtacgacgaggcctgggagcggattgacaagaaagtggaaggcctgagcaagcacatcaagctggaagaggaacggagaagcgaggacgcccagagcaaggccgccctgaccgactggctgcgggctaaggccagcttcgtgatcgagggcctgaaggaggccgacaaggacgagttctgcagatgcgagctgaagctgcagaagtggtacggggacctgcggggaaagcccttcgccatcgaagccgagaacagcatcctggacatcagcggcttcagcaagcagtacaactgtgccttcatctggcagaaggacggcgtgaagaagctgaacctgtacctgatcatcaactacttcaagggcggcaagctgcggttcaagaagatcaaacctgaagccttcgaagccaacagattctacaccgtgatcaacaaaaagagcggcgagatcgtgcccatggaggtgaacttcaacttcgacgaccccaacctgatcatcctgcctctggcctttggcaagagacagggcagagaattcatctggaacgacctgctgtccctggaaaccggcagcctgaagctggccaacggaagagtgatcgagaagacactgtacaacagaagaacccggcaggatgagcctgccctgttcgtggccctgaccttcgagcggcgggaggtcctggactcctccaatatcaaaccaatgaacctgatcggcgtggcaagaggcgaaaacatccccgccgtgatcgccctgaccgaccccgagggctgcccactgagccggtttaaggatagcctgggaaacccaacccacatcctgagaatcggcgagagctataaggagaagcagcggaccatccaggccaagaaggaggtggagcagcggagagccggcggctacagccggaagtacgccagcaaagccaagaatctggcagacgatatggtgagaaacaccgctagagatctgctgtactacgccgtgacccaggatgccatgctgatcttcgccaacctgagccggggcttcggccggcagggcaagcggaccttcatggccgagagacagtacacacggatggaggactggctgaccgccaagctggcctacgagggcctgagcaagacctacctgtccaagacactggcccagtacacctccaagacatgcagcaactgtgggtttaccatcaccagcgccgactacgacagggtgctggagaagctgaagaagacagcaacaggctggatgaccacaattaacggcaaggagctgaaggtggagggccagattacctactacaacagatacaagagacagaacgtagtcaaggacctgtccgtcgagctggatagactgagcgaagaatctgtgaacaacgacatctcctcctggacaaagggcagaagcggagaagctctgagcctcctgaagaaaagattctcccatagacccgtgcaggagaagttcgtgtgcctgaactgcggcttcgagacacacgcagccgagcaagccgccctgaacatcgccagatcctggctgttcctgcggagccaggagtacaagaaataccagacaaacaagacaaccggcaacaccgataagagagccttcgtcgagacctggcagtccttttaccggaagaagcttaaggaggtgtggaaacctgccgtgcggtctggcggatctggcggaggctcctgtgaccttcgacgacgtggccgtgaacttcaccatggaggagtgggccctgctggaccccagccagaagaagctgtacagggacgtgatgtgggagaacttcaggaacgtgaccgccatcggcaggaactgggacaaccagcagatcgaggaccagtacaagaactacaggaacaacctgaggaagaccagcgccgacttccagagcctgcagaagcacgccatgaccaaccccgaggagaagggatctggctccggcagcggccccaagaaaaagagaaaagtctaagctgccttctgcggggcttgccttctggccatgcccttcttctctcccttgcacctgtacctcttggtctttgaataaagcctgagtaggaaggctagcaaaaaaaaaaaaaaaaaaaaaaaaaaaaaaaaaaaaaaaaaaaaaaaaaaaaaaaaaaaaaaaaaaaaaaaaaaaaaaaa

SEQ ID NO: 15849 - RNA, 9485 nt, synthetic construct
  source 1..9485: mol_type = other RNA
aggaaataagagagaaaagaagagtaagaagaaatataagagccaccatggcccctaagaagaagcgtaaagtgagccggatggaacgcctcgtctacgaggtgcggcagaagtgcagaaacatcgaggacatctgcatctcctgcggatctctgaacgtgaccctggagcacccactgttcatcggcggcatgtgccagaactgtaaaaactgttttctggagtgtgcctatcaatacgacgatgacggctaccagagctactgcaccatctgttgcggcggaagagaggtgctgatgtgtggaaataacaactgctgccggtgcttctgcgtggaatgcgtggacctgctggtgggccccggcgccgcccaggccgctattaaggaagatccttggaactgctacatgtgcggccacaagggcacatacggcctgctgagacggagagaggactggcctagcagactgcagatgttcttcgccaataaccacgaccaggagttcgacccccctaaggtgtaccctcccgtccccgccgagaagagaaagcccatccgggtcctgagcctgttcgatggcatcgccaccggtctgctggtgctgaaggacctgggcatccaggtggataggtacattgcctccgaggtgtgcgaggactccatcaccgtgggaatggtgcgtcatcagggcaagatcatgtacgtgggcgacgtgcggagcgtgacacagaagcatatccaggagtggggccctttcgacctggtgatcggcggcagcccttgcaatgacctgagcatcgtgaacccagcccggaagggcctgtacgagggaaccggcagactgttcttcgagttttacagactgctgcacgacgcccggcctaaggaaggcgacgaccggcccttcttttggctgttcgagaatgtggtggccatgggagtcagcgacaagcgggatattagccggttcctggagagcaaccccgtgatgatcgatgccaaggaagtgagcgccgcccaccgggccagatacttctggggcaatctgcctggcatgaacagacccctggccagcaccgtgaacgacaagctggagctgcaggagtgcctggagcacggccggatcgccaagttcagcaaggtgagaaccatcaccacccgaagcaacagcatcaaacaaggcaaggaccagcactttcctgtgttcatgaacgagaaggaggacatcctgtggtgtaccgagatggagagagtgttcgggttcccagtccactacacagatgtcagcaacatgtctagactggccagacagagactgctgggaagaagctggtccgtccctgtgatcagacacctgttcgcccctctgaaggagtacttcgcctgcgtgagcagcggcaacagcaacgccaacagccggggccccagcttctctagcggcctggtgccactgtccctgagagggagccacatgggccccatggagatctacaaaaccgtgagcgcctggaagcggcagcctgtgcgcgtgctgagcctgtttcggaatatcgataaagtcctgaaaagcctgggattcctggagagcggctctggctccggcggtggcaccctgaagtacgtggaggatgtgacaaacgtggtcagacgggatgtggagaagtggggccccttcgatctggtgtacggcagcacccaacccctgggcagctcttgtgaccggtgccctggctggtacatgtttcagttccaccggatcctgcagtacgccctgccgagacaggagtcccagcggccattcttttggattttcatggacaacttgctgctgaccgaggatgaccaggaaactaccactcggttcctgcagaccgaagccgtgaccctgcaggacgtgagaggccgggactaccagaacgccatgcgggtgtggtccaacatccctggactgaaaagcaagcacgcacctctgacccctaaagaagaggagtacctgcaggcccaggtgcggagcagaagcaagctggacgcccctaaggtggatctgctggtgaagaattgcctcctgcccctgagagagtacttcaagtatttcagccagaatagtctgcccctgggaggcagcggcggcggcgccctggtgacatttgaggacgtcgccgtgcggttcacccaggaggaatgggctctgctggatccttctcagaaaatcctgtaccgggacgtgatgagagagacataccggaatctgacctccgtgggcatcaactgggaatgttgggaccttgaagcctgcttcagaagcctgggaagaaacctgagagtgcaggtggtgaagagaaagtgcgagctgaccaacagcggcccctgcgccgagggcggcccaagcagcggcgcccctcctcccagcggcggcagcccagccggctccccaacctctaccgaggagggcacctctgagtccgccacccccgagagcggccctggcacctccaccgagcccagcgagggcagcgcacccggcagccctgccggcagccccacctccacagaggagggaaccagcaccgagcccagcgaaggcagcgccccaggcaccagcaccgagcctagtgagcaggagattaaacggatcaacaagatcagaagaagacttgtgaaagacagcaacaccaagaaggccggcaagacaggccccatgaaaaccctgctggttagagtgatgacacccgatctgagagagcggctggaaaacctgagaaagaagcctgaaaatatcccccagcccatcagcaatacatctagagccaacctgaataagctgctgaccgattacaccgaaatgaagaaggcgatcctgcatgtgtactgggaagagttccagaaggaccctgtgggcctgatgagccgggtggcccagcctgccagcaagaagatcgatcagaacaagctgaaacctgagatggacgagaagggcaacctgaccaccgccggctttgcctgctctcagtgtggccagcccctgttcgtgtacaagctggagcaggtgtctgagaagggcaaggcttacaccaactacttcggacggtgcaatgtggccgagcacgaaaagctgatcctgctggcccagctgaagcccgagaaggatagcgacgaagccgtgacatatagcctgggaaagtttgggcagagggccctggatttctacagcattcatgtgaccaaggagtccacccaccccgtgaagcccctggcccagatcgccggaaacagatacgcctccggacctgtgggaaaggccctgagcgacgcatgtatgggcacaatcgcctccttcctgtctaagtaccaggacatcatcatcgaacaccagaaggtggtgaagggcaaccagaagagactggagagcctgcgggagctggccggcaaggaaaacctggaataccctagcgtgaccctgccacctcagcctcacaccaaggagggcgttgatgcctacaacgaagtgatcgcccgggtgcgaatgtgggtgaacctgaacctgtggcagaagctgaagctaagcagagatgatgccaagcctctgctgagactgaagggattcccttcctttcctctggtcgagagacaggccaacgaagtggactggtgggacatggtgtgtaacgtgaagaagctgatcaacgagaaaaaggaggatggcaaggtgttttggcagaatctggctggctacaagagacaggaagccctgagaccatacctgagcagcgaggaagatcggaagaagggaaagaaattcgctcggtaccagctgggcgacctgctgctgcacctggaaaagaagcacggcgaggactggggaaaggtgtacgacgaggcctgggagcggattgacaagaaagtggaaggcctgagcaagcacatcaagctggaagaggaacggagaagcgaggacgcccagagcaaggccgccctgaccgactggctgcgggctaaggccagcttcgtgatcgagggcctgaaggaggccgacaaggacgagttctgcagatgcgagctgaagctgcagaagtggtacggggacctgcggggaaagcccttcgccatcgaagccgagaacagcatcctggacatcagcggcttcagcaagcagtacaactgtgccttcatctggcagaaggacggcgtgaagaagctgaacctgtacctgatcatcaactacttcaagggcggcaagctgcggttcaagaagatcaaacctgaagccttcgaagccaacagattctacaccgtgatcaacaaaaagagcggcgagatcgtgcccatggaggtgaacttcaacttcgacgaccccaacctgatcatcctgcctctggcctttggcaagagacagggcagagaattcatctggaacgacctgctgtccctggaaaccggcagcctgaagctggccaacggaagagtgatcgagaagacactgtacaacagaagaacccggcaggatgagcctgccctgttcgtggccctgaccttcgagcggcgggaggtcctggactcctccaatatcaaaccaatgaacctgatcggcgtggcaagaggcgaaaacatccccgccgtgatcgccctgaccgaccccgagggctgcccactgagccggtttaaggatagcctgggaaacccaacccacatcctgagaatcggcgagagctataaggagaagcagcggaccatccaggccaagaaggaggtggagcagcggagagccggcggctacagccggaagtacgccagcaaagccaagaatctggcagacgatatggtgagaaacaccgctagagatctgctgtactacgccgtgacccaggatgccatgctgatcttcgccaacctgagccggggcttcggccggcagggcaagcggaccttcatggccgagagacagtacacacggatggaggactggctgaccgccaagctggcctacgagggcctgagcaagacctacctgtccaagacactggcccagtacacctccaagacatgcagcaactgtgggtttaccatcaccagcgccgactacgacagggtgctggagaagctgaagaagacagcaacaggctggatgaccacaattaacggcaaggagctgaaggtggagggccagattacctactacaacagatacaagagacagaacgtagtcaaggacctgtccgtcgagctggatagactgagcgaagaatctgtgaacaacgacatctcctcctggacaaagggcagaagcggagaagctctgagcctcctgaagaaaagattctcccatagacccgtgcaggagaagttcgtgtgcctgaactgcggcttcgagacacacgcagccgagcaagccgccctgaacatcgccagatcctggctgttcctgcggagccaggagtacaagaaataccagacaaacaagacaaccggcaacaccgataagagagccttcgtcgagacctggcagtccttttaccggaagaagcttaaggaggtgtggaaacctgccgtgcggtctggcggatctggcggaggctcccccaaggtgcccgtgagcttcgaggacgtggccatgtacttcaccaagaccgagtggaagctgctggaccacaggcagaggaagctgtacaagcaggtgatgctggagaactaccaccacctggtgagcctgggcttcagcttcgccaagccccagctggtgatccagctggagcagggccagaagccctgggtggccgacgtgcacaggatgaggatcaccaccggcatgcaggccggcgacggcggcccaagcagcggcgcccctcctcccagcggcggcagcccagccggctccccaacctctaccgaggagggcacctctgagtccgccacccccgagagcggccctggcacctccaccgagcccagcgagggcagcgcacccggcagccctgccggcagccccacctccacagaggagggaaccagcaccgagcccagcgaaggcagcgccccaggcaccagcaccgagcctagtgagcaggagattaaacggatcaacaagatcagaagaagacttgtgaaagacagcaacaccaagaaggccggcaagacaggccccatgaaaaccctgctggttagagtgatgacacccgatctgagagagcggctggaaaacctgagaaagaagcctgaaaatatcccccagcccatcagcaatacatctagagccaacctgaataagctgctgaccgattacaccgaaatgaagaaggcgatcctgcatgtgtactgggaagagttccagaaggaccctgtgggcctgatgagccgggtggcccagcctgccagcaagaagatcgatcagaacaagctgaaacctgagatggacgagaagggcaacctgaccaccgccggctttgcctgctctcagtgtggccagcccctgttcgtgtacaagctggagcaggtgtctgagaagggcaaggcttacaccaactacttcggacggtgcaatgtggccgagcacgaaaagctgatcctgctggcccagctgaagcccgagaaggatagcgacgaagccgtgacatatagcctgggaaagtttgggcagagggccctggatttctacagcattcatgtgaccaaggagtccacccaccccgtgaagcccctggcccagatcgccggaaacagatacgcctccggacctgtgggaaaggccctgagcgacgcatgtatgggcacaatcgcctccttcctgtctaagtaccaggacatcatcatcgaacaccagaaggtggtgaagggcaaccagaagagactggagagcctgcgggagctggccggcaaggaaaacctggaataccctagcgtgaccctgccacctcagcctcacaccaaggagggcgttgatgcctacaacgaagtgatcgcccgggtgcgaatgtgggtgaacctgaacctgtggcagaagctgaagctaagcagagatgatgccaagcctctgctgagactgaagggattcccttcctttcctctggtcgagagacaggccaacgaagtggactggtgggacatggtgtgtaacgtgaagaagctgatcaacgagaaaaaggaggatggcaaggtgttttggcagaatctggctggctacaagagacaggaagccctgagaccatacctgagcagcgaggaagatcggaagaagggaaagaaattcgctcggtaccagctgggcgacctgctgctgcacctggaaaagaagcacggcgaggactggggaaaggtgtacgacgaggcctgggagcggattgacaagaaagtggaaggcctgagcaagcacatcaagctggaagaggaacggagaagcgaggacgcccagagcaaggccgccctgaccgactggctgcgggctaaggccagcttcgtgatcgagggcctgaaggaggccgacaaggacgagttctgcagatgcgagctgaagctgcagaagtggtacggggacctgcggggaaagcccttcgccatcgaagccgagaacagcatcctggacatcagcggcttcagcaagcagtacaactgtgccttcatctggcagaaggacggcgtgaagaagctgaacctgtacctgatcatcaactacttcaagggcggcaagctgcggttcaagaagatcaaacctgaagccttcgaagccaacagattctacaccgtgatcaacaaaaagagcggcgagatcgtgcccatggaggtgaacttcaacttcgacgaccccaacctgatcatcctgcctctggcctttggcaagagacagggcagagaattcatctggaacgacctgctgtccctggaaaccggcagcctgaagctggccaacggaagagtgatcgagaagacactgtacaacagaagaacccggcaggatgagcctgccctgttcgtggccctgaccttcgagcggcgggaggtcctggactcctccaatatcaaaccaatgaacctgatcggcgtggcaagaggcgaaaacatccccgccgtgatcgccctgaccgaccccgagggctgcccactgagccggtttaaggatagcctgggaaacccaacccacatcctgagaatcggcgagagctataaggagaagcagcggaccatccaggccaagaaggaggtggagcagcggagagccggcggctacagccggaagtacgccagcaaagccaagaatctggcagacgatatggtgagaaacaccgctagagatctgctgtactacgccgtgacccaggatgccatgctgatcttcgccaacctgagccggggcttcggccggcagggcaagcggaccttcatggccgagagacagtacacacggatggaggactggctgaccgccaagctggcctacgagggcctgagcaagacctacctgtccaagacactggcccagtacacctccaagacatgcagcaactgtgggtttaccatcaccagcgccgactacgacagggtgctggagaagctgaagaagacagcaacaggctggatgaccacaattaacggcaaggagctgaaggtggagggccagattacctactacaacagatacaagagacagaacgtagtcaaggacctgtccgtcgagctggatagactgagcgaagaatctgtgaacaacgacatctcctcctggacaaagggcagaagcggagaagctctgagcctcctgaagaaaagattctcccatagacccgtgcaggagaagttcgtgtgcctgaactgcggcttcgagacacacgcagccgagcaagccgccctgaacatcgccagatcctggctgttcctgcggagccaggagtacaagaaataccagacaaacaagacaaccggcaacaccgataagagagccttcgtcgagacctggcagtccttttaccggaagaagcttaaggaggtgtggaaacctgccgtgcggtctggcggatctggcggaggctcctcccaaggtgcccgtgagcttcgaggacgtggccatgtacttcaccaagaccgagtggaagctgctggaccacaggcagaggaagctgtacaagcaggtgatgctggagaactaccaccacctggtgagcctgggcttcagcttcgccaagccccagctggtgatccagctggagcagggccagaagccctgggtggccgacgtgcacaggatgaggatcaccaccggcatgcaggccggcgacggatctggctccggcagcggccccaagaaaaagagaaaagtctaagctgccttctgcggggcttgccttctggccatgcccttcttctctcccttgcacctgtacctcttggtctttgaataaagcctgagtaggaaggctagcaaaaaaaaaaaaaaaaaaaaaaaaaaaaaaaaaaaaaaaaaaaaaaaaaaaaaaaaaaaaaaaaaaaaaaaaaaaaaaaa

SEQ ID NO: 15850 - RNA, 9485 nt, synthetic construct
  source 1..9485: mol_type = other RNA
aggaaataagagagaaaagaagagtaagaagaaatataagagccaccatggcccctaagaagaagcgtaaagtgagccggatggaacgcctcgtctacgaggtgcggcagaagtgcagaaacatcgaggacatctgcatctcctgcggatctctgaacgtgaccctggagcacccactgttcatcggcggcatgtgccagaactgtaaaaactgttttctggagtgtgcctatcaatacgacgatgacggctaccagagctactgcaccatctgttgcggcggaagagaggtgctgatgtgtggaaataacaactgctgccggtgcttctgcgtggaatgcgtggacctgctggtgggccccggcgccgcccaggccgctattaaggaagatccttggaactgctacatgtgcggccacaagggcacatacggcctgctgagacggagagaggactggcctagcagactgcagatgttcttcgccaataaccacgaccaggagttcgacccccctaaggtgtaccctcccgtccccgccgagaagagaaagcccatccgggtcctgagcctgttcgatggcatcgccaccggtctgctggtgctgaaggacctgggcatccaggtggataggtacattgcctccgaggtgtgcgaggactccatcaccgtgggaatggtgcgtcatcagggcaagatcatgtacgtgggcgacgtgcggagcgtgacacagaagcatatccaggagtggggccctttcgacctggtgatcggcggcagcccttgcaatgacctgagcatcgtgaacccagcccggaagggcctgtacgagggaaccggcagactgttcttcgagttttacagactgctgcacgacgcccggcctaaggaaggcgacgaccggcccttcttttggctgttcgagaatgtggtggccatgggagtcagcgacaagcgggatattagccggttcctggagagcaaccccgtgatgatcgatgccaaggaagtgagcgccgcccaccgggccagatacttctggggcaatctgcctggcatgaacagacccctggccagcaccgtgaacgacaagctggagctgcaggagtgcctggagcacggccggatcgccaagttcagcaaggtgagaaccatcaccacccgaagcaacagcatcaaacaaggcaaggaccagcactttcctgtgttcatgaacgagaaggaggacatcctgtggtgtaccgagatggagagagtgttcgggttcccagtccactacacagatgtcagcaacatgtctagactggccagacagagactgctgggaagaagctggtccgtccctgtgatcagacacctgttcgcccctctgaaggagtacttcgcctgcgtgagcagcggcaacagcaacgccaacagccggggccccagcttctctagcggcctggtgccactgtccctgagagggagccacatgggccccatggagatctacaaaaccgtgagcgcctggaagcggcagcctgtgcgcgtgctgagcctgtttcggaatatcgataaagtcctgaaaagcctgggattcctggagagcggctctggctccggcggtggcaccctgaagtacgtggaggatgtgacaaacgtggtcagacgggatgtggagaagtggggccccttcgatctggtgtacggcagcacccaacccctgggcagctcttgtgaccggtgccctggctggtacatgtttcagttccaccggatcctgcagtacgccctgccgagacaggagtcccagcggccattcttttggattttcatggacaacttgctgctgaccgaggatgaccaggaaactaccactcggttcctgcagaccgaagccgtgaccctgcaggacgtgagaggccgggactaccagaacgccatgcgggtgtggtccaacatccctggactgaaaagcaagcacgcacctctgacccctaaagaagaggagtacctgcaggcccaggtgcggagcagaagcaagctggacgcccctaaggtggatctgctggtgaagaattgcctcctgcccctgagagagtacttcaagtatttcagccagaatagtctgcccctgggaggcagcggcggcggcgccctggtgacatttgaggacgtcgccgtgcggttcacccaggaggaatgggctctgctggatccttctcagaaaatcctgtaccgggacgtgatgagagagacataccggaatctgacctccgtgggcatcaactgggaatgttgggaccttgaagcctgcttcagaagcctgggaagaaacctgagagtgcaggtggtgaagagaaagtgcgagctgaccaacagcggcccctgcgccgagggcggcccaagcagcggcgcccctcctcccagcggcggcagcccagccggctccccaacctctaccgaggagggcacctctgagtccgccacccccgagagcggccctggcacctccaccgagcccagcgagggcagcgcacccggcagccctgccggcagccccacctccacagaggagggaaccagcaccgagcccagcgaaggcagcgccccaggcaccagcaccgagcctagtgagcaggagattaaacggatcaacaagatcagaagaagacttgtgaaagacagcaacaccaagaaggccggcaagacaggccccatgaaaaccctgctggttagagtgatgacacccgatctgagagagcggctggaaaacctgagaaagaagcctgaaaatatcccccagcccatcagcaatacatctagagccaacctgaataagctgctgaccgattacaccgaaatgaagaaggcgatcctgcatgtgtactgggaagagttccagaaggaccctgtgggcctgatgagccgggtggcccagcctgccagcaagaagatcgatcagaacaagctgaaacctgagatggacgagaagggcaacctgaccaccgccggctttgcctgctctcagtgtggccagcccctgttcgtgtacaagctggagcaggtgtctgagaagggcaaggcttacaccaactacttcggacggtgcaatgtggccgagcacgaaaagctgatcctgctggcccagctgaagcccgagaaggatagcgacgaagccgtgacatatagcctgggaaagtttgggcagagggccctggatttctacagcattcatgtgaccaaggagtccacccaccccgtgaagcccctggcccagatcgccggaaacagatacgcctccggacctgtgggaaaggccctgagcgacgcatgtatgggcacaatcgcctccttcctgtctaagtaccaggacatcatcatcgaacaccagaaggtggtgaagggcaaccagaagagactggagagcctgcgggagctggccggcaaggaaaacctggaataccctagcgtgaccctgccacctcagcctcacaccaaggagggcgttgatgcctacaacgaagtgatcgcccgggtgcgaatgtgggtgaacctgaacctgtggcagaagctgaagctaagcagagatgatgccaagcctctgctgagactgaagggattcccttcctttcctctggtcgagagacaggccaacgaagtggactggtgggacatggtgtgtaacgtgaagaagctgatcaacgagaaaaaggaggatggcaaggtgttttggcagaatctggctggctacaagagacaggaagccctgagaccatacctgagcagcgaggaagatcggaagaagggaaagaaattcgctcggtaccagctgggcgacctgctgctgcacctggaaaagaagcacggcgaggactggggaaaggtgtacgacgaggcctgggagcggattgacaagaaagtggaaggcctgagcaagcacatcaagctggaagaggaacggagaagcgaggacgcccagagcaaggccgccctgaccgactggctgcgggctaaggccagcttcgtgatcgagggcctgaaggaggccgacaaggacgagttctgcagatgcgagctgaagctgcagaagtggtacggggacctgcggggaaagcccttcgccatcgaagccgagaacagcatcctggacatcagcggcttcagcaagcagtacaactgtgccttcatctggcagaaggacggcgtgaagaagctgaacctgtacctgatcatcaactacttcaagggcggcaagctgcggttcaagaagatcaaacctgaagccttcgaagccaacagattctacaccgtgatcaacaaaaagagcggcgagatcgtgcccatggaggtgaacttcaacttcgacgaccccaacctgatcatcctgcctctggcctttggcaagagacagggcagagaattcatctggaacgacctgctgtccctggaaaccggcagcctgaagctggccaacggaagagtgatcgagaagacactgtacaacagaagaacccggcaggatgagcctgccctgttcgtggccctgaccttcgagcggcgggaggtcctggactcctccaatatcaaaccaatgaacctgatcggcgtggcaagaggcgaaaacatccccgccgtgatcgccctgaccgaccccgagggctgcccactgagccggtttaaggatagcctgggaaacccaacccacatcctgagaatcggcgagagctataaggagaagcagcggaccatccaggccaagaaggaggtggagcagcggagagccggcggctacagccggaagtacgccagcaaagccaagaatctggcagacgatatggtgagaaacaccgctagagatctgctgtactacgccgtgacccaggatgccatgctgatcttcgccaacctgagccggggcttcggccggcagggcaagcggaccttcatggccgagagacagtacacacggatggaggactggctgaccgccaagctggcctacgagggcctgagcaagacctacctgtccaagacactggcccagtacacctccaagacatgcagcaactgtgggtttaccatcaccagcgccgactacgacagggtgctggagaagctgaagaagacagcaacaggctggatgaccacaattaacggcaaggagctgaaggtggagggccagattacctactacaacagatacaagagacagaacgtagtcaaggacctgtccgtcgagctggatagactgagcgaagaatctgtgaacaacgacatctcctcctggacaaagggcagaagcggagaagctctgagcctcctgaagaaaagattctcccatagacccgtgcaggagaagttcgtgtgcctgaactgcggcttcgagacacacgcagccgagcaagccgccctgaacatcgccagatcctggctgttcctgcggagccaggagtacaagaaataccagacaaacaagacaaccggcaacaccgataagagagccttcgtcgagacctggcagtccttttaccggaagaagcttaaggaggtgtggaaacctgccgtgcggtctggcggatctggcggaggctccagccagggcagcatcaccttcaaggacgtggccgtggacttcacccaggaggagtggtgcctgctggaccacagccagaaggagctgtacctggaggtgatgctggagaacgtgcagaacctgctgagcgtgggcctgcccgtgcccagggagaacttcatcagctgcctgcagcagggcaaggccccctggctgctggcccagaaggacagcaggaacagctgcctggaggccaagaccaacggcggcccaagcagcggcgcccctcctcccagcggcggcagcccagccggctccccaacctctaccgaggagggcacctctgagtccgccacccccgagagcggccctggcacctccaccgagcccagcgagggcagcgcacccggcagccctgccggcagccccacctccacagaggagggaaccagcaccgagcccagcgaaggcagcgccccaggcaccagcaccgagcctagtgagcaggagattaaacggatcaacaagatcagaagaagacttgtgaaagacagcaacaccaagaaggccggcaagacaggccccatgaaaaccctgctggttagagtgatgacacccgatctgagagagcggctggaaaacctgagaaagaagcctgaaaatatcccccagcccatcagcaatacatctagagccaacctgaataagctgctgaccgattacaccgaaatgaagaaggcgatcctgcatgtgtactgggaagagttccagaaggaccctgtgggcctgatgagccgggtggcccagcctgccagcaagaagatcgatcagaacaagctgaaacctgagatggacgagaagggcaacctgaccaccgccggctttgcctgctctcagtgtggccagcccctgttcgtgtacaagctggagcaggtgtctgagaagggcaaggcttacaccaactacttcggacggtgcaatgtggccgagcacgaaaagctgatcctgctggcccagctgaagcccgagaaggatagcgacgaagccgtgacatatagcctgggaaagtttgggcagagggccctggatttctacagcattcatgtgaccaaggagtccacccaccccgtgaagcccctggcccagatcgccggaaacagatacgcctccggacctgtgggaaaggccctgagcgacgcatgtatgggcacaatcgcctccttcctgtctaagtaccaggacatcatcatcgaacaccagaaggtggtgaagggcaaccagaagagactggagagcctgcgggagctggccggcaaggaaaacctggaataccctagcgtgaccctgccacctcagcctcacaccaaggagggcgttgatgcctacaacgaagtgatcgcccgggtgcgaatgtgggtgaacctgaacctgtggcagaagctgaagctaagcagagatgatgccaagcctctgctgagactgaagggattcccttcctttcctctggtcgagagacaggccaacgaagtggactggtgggacatggtgtgtaacgtgaagaagctgatcaacgagaaaaaggaggatggcaaggtgttttggcagaatctggctggctacaagagacaggaagccctgagaccatacctgagcagcgaggaagatcggaagaagggaaagaaattcgctcggtaccagctgggcgacctgctgctgcacctggaaaagaagcacggcgaggactggggaaaggtgtacgacgaggcctgggagcggattgacaagaaagtggaaggcctgagcaagcacatcaagctggaagaggaacggagaagcgaggacgcccagagcaaggccgccctgaccgactggctgcgggctaaggccagcttcgtgatcgagggcctgaaggaggccgacaaggacgagttctgcagatgcgagctgaagctgcagaagtggtacggggacctgcggggaaagcccttcgccatcgaagccgagaacagcatcctggacatcagcggcttcagcaagcagtacaactgtgccttcatctggcagaaggacggcgtgaagaagctgaacctgtacctgatcatcaactacttcaagggcggcaagctgcggttcaagaagatcaaacctgaagccttcgaagccaacagattctacaccgtgatcaacaaaaagagcggcgagatcgtgcccatggaggtgaacttcaacttcgacgaccccaacctgatcatcctgcctctggcctttggcaagagacagggcagagaattcatctggaacgacctgctgtccctggaaaccggcagcctgaagctggccaacggaagagtgatcgagaagacactgtacaacagaagaacccggcaggatgagcctgccctgttcgtggccctgaccttcgagcggcgggaggtcctggactcctccaatatcaaaccaatgaacctgatcggcgtggcaagaggcgaaaacatccccgccgtgatcgccctgaccgaccccgagggctgcccactgagccggtttaaggatagcctgggaaacccaacccacatcctgagaatcggcgagagctataaggagaagcagcggaccatccaggccaagaaggaggtggagcagcggagagccggcggctacagccggaagtacgccagcaaagccaagaatctggcagacgatatggtgagaaacaccgctagagatctgctgtactacgccgtgacccaggatgccatgctgatcttcgccaacctgagccggggcttcggccggcagggcaagcggaccttcatggccgagagacagtacacacggatggaggactggctgaccgccaagctggcctacgagggcctgagcaagacctacctgtccaagacactggcccagtacacctccaagacatgcagcaactgtgggtttaccatcaccagcgccgactacgacagggtgctggagaagctgaagaagacagcaacaggctggatgaccacaattaacggcaaggagctgaaggtggagggccagattacctactacaacagatacaagagacagaacgtagtcaaggacctgtccgtcgagctggatagactgagcgaagaatctgtgaacaacgacatctcctcctggacaaagggcagaagcggagaagctctgagcctcctgaagaaaagattctcccatagacccgtgcaggagaagttcgtgtgcctgaactgcggcttcgagacacacgcagccgagcaagccgccctgaacatcgccagatcctggctgttcctgcggagccaggagtacaagaaataccagacaaacaagacaaccggcaacaccgataagagagccttcgtcgagacctggcagtccttttaccggaagaagcttaaggaggtgtggaaacctgccgtgcggtctggcggatctggcggaggctcctagccagggcagcatcaccttcaaggacgtggccgtggacttcacccaggaggagtggtgcctgctggaccacagccagaaggagctgtacctggaggtgatgctggagaacgtgcagaacctgctgagcgtgggcctgcccgtgcccagggagaacttcatcagctgcctgcagcagggcaaggccccctggctgctggcccagaaggacagcaggaacagctgcctggaggccaagaccaacggatctggctccggcagcggccccaagaaaaagagaaaagtctaagctgccttctgcggggcttgccttctggccatgcccttcttctctcccttgcacctgtacctcttggtctttgaataaagcctgagtaggaaggctagcaaaaaaaaaaaaaaaaaaaaaaaaaaaaaaaaaaaaaaaaaaaaaaaaaaaaaaaaaaaaaaaaaaaaaaaaaaaaaaaa

SEQ ID NO: 15851 - RNA, 9485 nt, synthetic construct
  source 1..9485: mol_type = other RNA
aggaaataagagagaaaagaagagtaagaagaaatataagagccaccatggcccctaagaagaagcgtaaagtgagccggatggaacgcctcgtctacgaggtgcggcagaagtgcagaaacatcgaggacatctgcatctcctgcggatctctgaacgtgaccctggagcacccactgttcatcggcggcatgtgccagaactgtaaaaactgttttctggagtgtgcctatcaatacgacgatgacggctaccagagctactgcaccatctgttgcggcggaagagaggtgctgatgtgtggaaataacaactgctgccggtgcttctgcgtggaatgcgtggacctgctggtgggccccggcgccgcccaggccgctattaaggaagatccttggaactgctacatgtgcggccacaagggcacatacggcctgctgagacggagagaggactggcctagcagactgcagatgttcttcgccaataaccacgaccaggagttcgacccccctaaggtgtaccctcccgtccccgccgagaagagaaagcccatccgggtcctgagcctgttcgatggcatcgccaccggtctgctggtgctgaaggacctgggcatccaggtggataggtacattgcctccgaggtgtgcgaggactccatcaccgtgggaatggtgcgtcatcagggcaagatcatgtacgtgggcgacgtgcggagcgtgacacagaagcatatccaggagtggggccctttcgacctggtgatcggcggcagcccttgcaatgacctgagcatcgtgaacccagcccggaagggcctgtacgagggaaccggcagactgttcttcgagttttacagactgctgcacgacgcccggcctaaggaaggcgacgaccggcccttcttttggctgttcgagaatgtggtggccatgggagtcagcgacaagcgggatattagccggttcctggagagcaaccccgtgatgatcgatgccaaggaagtgagcgccgcccaccgggccagatacttctggggcaatctgcctggcatgaacagacccctggccagcaccgtgaacgacaagctggagctgcaggagtgcctggagcacggccggatcgccaagttcagcaaggtgagaaccatcaccacccgaagcaacagcatcaaacaaggcaaggaccagcactttcctgtgttcatgaacgagaaggaggacatcctgtggtgtaccgagatggagagagtgttcgggttcccagtccactacacagatgtcagcaacatgtctagactggccagacagagactgctgggaagaagctggtccgtccctgtgatcagacacctgttcgcccctctgaaggagtacttcgcctgcgtgagcagcggcaacagcaacgccaacagccggggccccagcttctctagcggcctggtgccactgtccctgagagggagccacatgggccccatggagatctacaaaaccgtgagcgcctggaagcggcagcctgtgcgcgtgctgagcctgtttcggaatatcgataaagtcctgaaaagcctgggattcctggagagcggctctggctccggcggtggcaccctgaagtacgtggaggatgtgacaaacgtggtcagacgggatgtggagaagtggggccccttcgatctggtgtacggcagcacccaacccctgggcagctcttgtgaccggtgccctggctggtacatgtttcagttccaccggatcctgcagtacgccctgccgagacaggagtcccagcggccattcttttggattttcatggacaacttgctgctgaccgaggatgaccaggaaactaccactcggttcctgcagaccgaagccgtgaccctgcaggacgtgagaggccgggactaccagaacgccatgcgggtgtggtccaacatccctggactgaaaagcaagcacgcacctctgacccctaaagaagaggagtacctgcaggcccaggtgcggagcagaagcaagctggacgcccctaaggtggatctgctggtgaagaattgcctcctgcccctgagagagtacttcaagtatttcagccagaatagtctgcccctgggaggcagcggcggcggcgccctggtgacatttgaggacgtcgccgtgcggttcacccaggaggaatgggctctgctggatccttctcagaaaatcctgtaccgggacgtgatgagagagacataccggaatctgacctccgtgggcatcaactgggaatgttgggaccttgaagcctgcttcagaagcctgggaagaaacctgagagtgcaggtggtgaagagaaagtgcgagctgaccaacagcggcccctgcgccgagggcggcccaagcagcggcgcccctcctcccagcggcggcagcccagccggctccccaacctctaccgaggagggcacctctgagtccgccacccccgagagcggccctggcacctccaccgagcccagcgagggcagcgcacccggcagccctgccggcagccccacctccacagaggagggaaccagcaccgagcccagcgaaggcagcgccccaggcaccagcaccgagcctagtgagcaggagattaaacggatcaacaagatcagaagaagacttgtgaaagacagcaacaccaagaaggccggcaagacaggccccatgaaaaccctgctggttagagtgatgacacccgatctgagagagcggctggaaaacctgagaaagaagcctgaaaatatcccccagcccatcagcaatacatctagagccaacctgaataagctgctgaccgattacaccgaaatgaagaaggcgatcctgcatgtgtactgggaagagttccagaaggaccctgtgggcctgatgagccgggtggcccagcctgccagcaagaagatcgatcagaacaagctgaaacctgagatggacgagaagggcaacctgaccaccgccggctttgcctgctctcagtgtggccagcccctgttcgtgtacaagctggagcaggtgtctgagaagggcaaggcttacaccaactacttcggacggtgcaatgtggccgagcacgaaaagctgatcctgctggcccagctgaagcccgagaaggatagcgacgaagccgtgacatatagcctgggaaagtttgggcagagggccctggatttctacagcattcatgtgaccaaggagtccacccaccccgtgaagcccctggcccagatcgccggaaacagatacgcctccggacctgtgggaaaggccctgagcgacgcatgtatgggcacaatcgcctccttcctgtctaagtaccaggacatcatcatcgaacaccagaaggtggtgaagggcaaccagaagagactggagagcctgcgggagctggccggcaaggaaaacctggaataccctagcgtgaccctgccacctcagcctcacaccaaggagggcgttgatgcctacaacgaagtgatcgcccgggtgcgaatgtgggtgaacctgaacctgtggcagaagctgaagctaagcagagatgatgccaagcctctgctgagactgaagggattcccttcctttcctctggtcgagagacaggccaacgaagtggactggtgggacatggtgtgtaacgtgaagaagctgatcaacgagaaaaaggaggatggcaaggtgttttggcagaatctggctggctacaagagacaggaagccctgagaccatacctgagcagcgaggaagatcggaagaagggaaagaaattcgctcggtaccagctgggcgacctgctgctgcacctggaaaagaagcacggcgaggactggggaaaggtgtacgacgaggcctgggagcggattgacaagaaagtggaaggcctgagcaagcacatcaagctggaagaggaacggagaagcgaggacgcccagagcaaggccgccctgaccgactggctgcgggctaaggccagcttcgtgatcgagggcctgaaggaggccgacaaggacgagttctgcagatgcgagctgaagctgcagaagtggtacggggacctgcggggaaagcccttcgccatcgaagccgagaacagcatcctggacatcagcggcttcagcaagcagtacaactgtgccttcatctggcagaaggacggcgtgaagaagctgaacctgtacctgatcatcaactacttcaagggcggcaagctgcggttcaagaagatcaaacctgaagccttcgaagccaacagattctacaccgtgatcaacaaaaagagcggcgagatcgtgcccatggaggtgaacttcaacttcgacgaccccaacctgatcatcctgcctctggcctttggcaagagacagggcagagaattcatctggaacgacctgctgtccctggaaaccggcagcctgaagctggccaacggaagagtgatcgagaagacactgtacaacagaagaacccggcaggatgagcctgccctgttcgtggccctgaccttcgagcggcgggaggtcctggactcctccaatatcaaaccaatgaacctgatcggcgtggcaagaggcgaaaacatccccgccgtgatcgccctgaccgaccccgagggctgcccactgagccggtttaaggatagcctgggaaacccaacccacatcctgagaatcggcgagagctataaggagaagcagcggaccatccaggccaagaaggaggtggagcagcggagagccggcggctacagccggaagtacgccagcaaagccaagaatctggcagacgatatggtgagaaacaccgctagagatctgctgtactacgccgtgacccaggatgccatgctgatcttcgccaacctgagccggggcttcggccggcagggcaagcggaccttcatggccgagagacagtacacacggatggaggactggctgaccgccaagctggcctacgagggcctgagcaagacctacctgtccaagacactggcccagtacacctccaagacatgcagcaactgtgggtttaccatcaccagcgccgactacgacagggtgctggagaagctgaagaagacagcaacaggctggatgaccacaattaacggcaaggagctgaaggtggagggccagattacctactacaacagatacaagagacagaacgtagtcaaggacctgtccgtcgagctggatagactgagcgaagaatctgtgaacaacgacatctcctcctggacaaagggcagaagcggagaagctctgagcctcctgaagaaaagattctcccatagacccgtgcaggagaagttcgtgtgcctgaactgcggcttcgagacacacgcagccgagcaagccgccctgaacatcgccagatcctggctgttcctgcggagccaggagtacaagaaataccagacaaacaagacaaccggcaacaccgataagagagccttcgtcgagacctggcagtccttttaccggaagaagcttaaggaggtgtggaaacctgccgtgcggtctggcggatctggcggaggctccccccagaagagcgtgaccttcgaggacgtggccgtgtacttcacccaggccgagtgggacggcctgagccccgcccagaggaccctgtacagggacgtgatgctggagaactacggcaacgtggccagcctgggcttccccctgctgaagcccgccgtgatcagccagctggagggcggcagcgagctgggcggcagcagccccctggccgccggcaccggcctgcagggcctgcagaccgtgggcggcccaagcagcggcgcccctcctcccagcggcggcagcccagccggctccccaacctctaccgaggagggcacctctgagtccgccacccccgagagcggccctggcacctccaccgagcccagcgagggcagcgcacccggcagccctgccggcagccccacctccacagaggagggaaccagcaccgagcccagcgaaggcagcgccccaggcaccagcaccgagcctagtgagcaggagattaaacggatcaacaagatcagaagaagacttgtgaaagacagcaacaccaagaaggccggcaagacaggccccatgaaaaccctgctggttagagtgatgacacccgatctgagagagcggctggaaaacctgagaaagaagcctgaaaatatcccccagcccatcagcaatacatctagagccaacctgaataagctgctgaccgattacaccgaaatgaagaaggcgatcctgcatgtgtactgggaagagttccagaaggaccctgtgggcctgatgagccgggtggcccagcctgccagcaagaagatcgatcagaacaagctgaaacctgagatggacgagaagggcaacctgaccaccgccggctttgcctgctctcagtgtggccagcccctgttcgtgtacaagctggagcaggtgtctgagaagggcaaggcttacaccaactacttcggacggtgcaatgtggccgagcacgaaaagctgatcctgctggcccagctgaagcccgagaaggatagcgacgaagccgtgacatatagcctgggaaagtttgggcagagggccctggatttctacagcattcatgtgaccaaggagtccacccaccccgtgaagcccctggcccagatcgccggaaacagatacgcctccggacctgtgggaaaggccctgagcgacgcatgtatgggcacaatcgcctccttcctgtctaagtaccaggacatcatcatcgaacaccagaaggtggtgaagggcaaccagaagagactggagagcctgcgggagctggccggcaaggaaaacctggaataccctagcgtgaccctgccacctcagcctcacaccaaggagggcgttgatgcctacaacgaagtgatcgcccgggtgcgaatgtgggtgaacctgaacctgtggcagaagctgaagctaagcagagatgatgccaagcctctgctgagactgaagggattcccttcctttcctctggtcgagagacaggccaacgaagtggactggtgggacatggtgtgtaacgtgaagaagctgatcaacgagaaaaaggaggatggcaaggtgttttggcagaatctggctggctacaagagacaggaagccctgagaccatacctgagcagcgaggaagatcggaagaagggaaagaaattcgctcggtaccagctgggcgacctgctgctgcacctggaaaagaagcacggcgaggactggggaaaggtgtacgacgaggcctgggagcggattgacaagaaagtggaaggcctgagcaagcacatcaagctggaagaggaacggagaagcgaggacgcccagagcaaggccgccctgaccgactggctgcgggctaaggccagcttcgtgatcgagggcctgaaggaggccgacaaggacgagttctgcagatgcgagctgaagctgcagaagtggtacggggacctgcggggaaagcccttcgccatcgaagccgagaacagcatcctggacatcagcggcttcagcaagcagtacaactgtgccttcatctggcagaaggacggcgtgaagaagctgaacctgtacctgatcatcaactacttcaagggcggcaagctgcggttcaagaagatcaaacctgaagccttcgaagccaacagattctacaccgtgatcaacaaaaagagcggcgagatcgtgcccatggaggtgaacttcaacttcgacgaccccaacctgatcatcctgcctctggcctttggcaagagacagggcagagaattcatctggaacgacctgctgtccctggaaaccggcagcctgaagctggccaacggaagagtgatcgagaagacactgtacaacagaagaacccggcaggatgagcctgccctgttcgtggccctgaccttcgagcggcgggaggtcctggactcctccaatatcaaaccaatgaacctgatcggcgtggcaagaggcgaaaacatccccgccgtgatcgccctgaccgaccccgagggctgcccactgagccggtttaaggatagcctgggaaacccaacccacatcctgagaatcggcgagagctataaggagaagcagcggaccatccaggccaagaaggaggtggagcagcggagagccggcggctacagccggaagtacgccagcaaagccaagaatctggcagacgatatggtgagaaacaccgctagagatctgctgtactacgccgtgacccaggatgccatgctgatcttcgccaacctgagccggggcttcggccggcagggcaagcggaccttcatggccgagagacagtacacacggatggaggactggctgaccgccaagctggcctacgagggcctgagcaagacctacctgtccaagacactggcccagtacacctccaagacatgcagcaactgtgggtttaccatcaccagcgccgactacgacagggtgctggagaagctgaagaagacagcaacaggctggatgaccacaattaacggcaaggagctgaaggtggagggccagattacctactacaacagatacaagagacagaacgtagtcaaggacctgtccgtcgagctggatagactgagcgaagaatctgtgaacaacgacatctcctcctggacaaagggcagaagcggagaagctctgagcctcctgaagaaaagattctcccatagacccgtgcaggagaagttcgtgtgcctgaactgcggcttcgagacacacgcagccgagcaagccgccctgaacatcgccagatcctggctgttcctgcggagccaggagtacaagaaataccagacaaacaagacaaccggcaacaccgataagagagccttcgtcgagacctggcagtccttttaccggaagaagcttaaggaggtgtggaaacctgccgtgcggtctggcggatctggcggaggctcctccccagaagagcgtgaccttcgaggacgtggccgtgtacttcacccaggccgagtgggacggcctgagccccgcccagaggaccctgtacagggacgtgatgctggagaactacggcaacgtggccagcctgggcttccccctgctgaagcccgccgtgatcagccagctggagggcggcagcgagctgggcggcagcagccccctggccgccggcaccggcctgcagggcctgcagaccgtgggatctggctccggcagcggccccaagaaaaagagaaaagtctaagctgccttctgcggggcttgccttctggccatgcccttcttctctcccttgcacctgtacctcttggtctttgaataaagcctgagtaggaaggctagcaaaaaaaaaaaaaaaaaaaaaaaaaaaaaaaaaaaaaaaaaaaaaaaaaaaaaaaaaaaaaaaaaaaaaaaaaaaaaaaa

SEQ ID NO: 15852 - RNA, 9485 nt, synthetic construct
  source 1..9485: mol_type = other RNA
aggaaataagagagaaaagaagagtaagaagaaatataagagccaccatggcccctaagaagaagcgtaaagtgagccggatggaacgcctcgtctacgaggtgcggcagaagtgcagaaacatcgaggacatctgcatctcctgcggatctctgaacgtgaccctggagcacccactgttcatcggcggcatgtgccagaactgtaaaaactgttttctggagtgtgcctatcaatacgacgatgacggctaccagagctactgcaccatctgttgcggcggaagagaggtgctgatgtgtggaaataacaactgctgccggtgcttctgcgtggaatgcgtggacctgctggtgggccccggcgccgcccaggccgctattaaggaagatccttggaactgctacatgtgcggccacaagggcacatacggcctgctgagacggagagaggactggcctagcagactgcagatgttcttcgccaataaccacgaccaggagttcgacccccctaaggtgtaccctcccgtccccgccgagaagagaaagcccatccgggtcctgagcctgttcgatggcatcgccaccggtctgctggtgctgaaggacctgggcatccaggtggataggtacattgcctccgaggtgtgcgaggactccatcaccgtgggaatggtgcgtcatcagggcaagatcatgtacgtgggcgacgtgcggagcgtgacacagaagcatatccaggagtggggccctttcgacctggtgatcggcggcagcccttgcaatgacctgagcatcgtgaacccagcccggaagggcctgtacgagggaaccggcagactgttcttcgagttttacagactgctgcacgacgcccggcctaaggaaggcgacgaccggcccttcttttggctgttcgagaatgtggtggccatgggagtcagcgacaagcgggatattagccggttcctggagagcaaccccgtgatgatcgatgccaaggaagtgagcgccgcccaccgggccagatacttctggggcaatctgcctggcatgaacagacccctggccagcaccgtgaacgacaagctggagctgcaggagtgcctggagcacggccggatcgccaagttcagcaaggtgagaaccatcaccacccgaagcaacagcatcaaacaaggcaaggaccagcactttcctgtgttcatgaacgagaaggaggacatcctgtggtgtaccgagatggagagagtgttcgggttcccagtccactacacagatgtcagcaacatgtctagactggccagacagagactgctgggaagaagctggtccgtccctgtgatcagacacctgttcgcccctctgaaggagtacttcgcctgcgtgagcagcggcaacagcaacgccaacagccggggccccagcttctctagcggcctggtgccactgtccctgagagggagccacatgggccccatggagatctacaaaaccgtgagcgcctggaagcggcagcctgtgcgcgtgctgagcctgtttcggaatatcgataaagtcctgaaaagcctgggattcctggagagcggctctggctccggcggtggcaccctgaagtacgtggaggatgtgacaaacgtggtcagacgggatgtggagaagtggggccccttcgatctggtgtacggcagcacccaacccctgggcagctcttgtgaccggtgccctggctggtacatgtttcagttccaccggatcctgcagtacgccctgccgagacaggagtcccagcggccattcttttggattttcatggacaacttgctgctgaccgaggatgaccaggaaactaccactcggttcctgcagaccgaagccgtgaccctgcaggacgtgagaggccgggactaccagaacgccatgcgggtgtggtccaacatccctggactgaaaagcaagcacgcacctctgacccctaaagaagaggagtacctgcaggcccaggtgcggagcagaagcaagctggacgcccctaaggtggatctgctggtgaagaattgcctcctgcccctgagagagtacttcaagtatttcagccagaatagtctgcccctgggaggcagcggcggcggcgccctggtgacatttgaggacgtcgccgtgcggttcacccaggaggaatgggctctgctggatccttctcagaaaatcctgtaccgggacgtgatgagagagacataccggaatctgacctccgtgggcatcaactgggaatgttgggaccttgaagcctgcttcagaagcctgggaagaaacctgagagtgcaggtggtgaagagaaagtgcgagctgaccaacagcggcccctgcgccgagggcggcccaagcagcggcgcccctcctcccagcggcggcagcccagccggctccccaacctctaccgaggagggcacctctgagtccgccacccccgagagcggccctggcacctccaccgagcccagcgagggcagcgcacccggcagccctgccggcagccccacctccacagaggagggaaccagcaccgagcccagcgaaggcagcgccccaggcaccagcaccgagcctagtgagcaggagattaaacggatcaacaagatcagaagaagacttgtgaaagacagcaacaccaagaaggccggcaagacaggccccatgaaaaccctgctggttagagtgatgacacccgatctgagagagcggctggaaaacctgagaaagaagcctgaaaatatcccccagcccatcagcaatacatctagagccaacctgaataagctgctgaccgattacaccgaaatgaagaaggcgatcctgcatgtgtactgggaagagttccagaaggaccctgtgggcctgatgagccgggtggcccagcctgccagcaagaagatcgatcagaacaagctgaaacctgagatggacgagaagggcaacctgaccaccgccggctttgcctgctctcagtgtggccagcccctgttcgtgtacaagctggagcaggtgtctgagaagggcaaggcttacaccaactacttcggacggtgcaatgtggccgagcacgaaaagctgatcctgctggcccagctgaagcccgagaaggatagcgacgaagccgtgacatatagcctgggaaagtttgggcagagggccctggatttctacagcattcatgtgaccaaggagtccacccaccccgtgaagcccctggcccagatcgccggaaacagatacgcctccggacctgtgggaaaggccctgagcgacgcatgtatgggcacaatcgcctccttcctgtctaagtaccaggacatcatcatcgaacaccagaaggtggtgaagggcaaccagaagagactggagagcctgcgggagctggccggcaaggaaaacctggaataccctagcgtgaccctgccacctcagcctcacaccaaggagggcgttgatgcctacaacgaagtgatcgcccgggtgcgaatgtgggtgaacctgaacctgtggcagaagctgaagctaagcagagatgatgccaagcctctgctgagactgaagggattcccttcctttcctctggtcgagagacaggccaacgaagtggactggtgggacatggtgtgtaacgtgaagaagctgatcaacgagaaaaaggaggatggcaaggtgttttggcagaatctggctggctacaagagacaggaagccctgagaccatacctgagcagcgaggaagatcggaagaagggaaagaaattcgctcggtaccagctgggcgacctgctgctgcacctggaaaagaagcacggcgaggactggggaaaggtgtacgacgaggcctgggagcggattgacaagaaagtggaaggcctgagcaagcacatcaagctggaagaggaacggagaagcgaggacgcccagagcaaggccgccctgaccgactggctgcgggctaaggccagcttcgtgatcgagggcctgaaggaggccgacaaggacgagttctgcagatgcgagctgaagctgcagaagtggtacggggacctgcggggaaagcccttcgccatcgaagccgagaacagcatcctggacatcagcggcttcagcaagcagtacaactgtgccttcatctggcagaaggacggcgtgaagaagctgaacctgtacctgatcatcaactacttcaagggcggcaagctgcggttcaagaagatcaaacctgaagccttcgaagccaacagattctacaccgtgatcaacaaaaagagcggcgagatcgtgcccatggaggtgaacttcaacttcgacgaccccaacctgatcatcctgcctctggcctttggcaagagacagggcagagaattcatctggaacgacctgctgtccctggaaaccggcagcctgaagctggccaacggaagagtgatcgagaagacactgtacaacagaagaacccggcaggatgagcctgccctgttcgtggccctgaccttcgagcggcgggaggtcctggactcctccaatatcaaaccaatgaacctgatcggcgtggcaagaggcgaaaacatccccgccgtgatcgccctgaccgaccccgagggctgcccactgagccggtttaaggatagcctgggaaacccaacccacatcctgagaatcggcgagagctataaggagaagcagcggaccatccaggccaagaaggaggtggagcagcggagagccggcggctacagccggaagtacgccagcaaagccaagaatctggcagacgatatggtgagaaacaccgctagagatctgctgtactacgccgtgacccaggatgccatgctgatcttcgccaacctgagccggggcttcggccggcagggcaagcggaccttcatggccgagagacagtacacacggatggaggactggctgaccgccaagctggcctacgagggcctgagcaagacctacctgtccaagacactggcccagtacacctccaagacatgcagcaactgtgggtttaccatcaccagcgccgactacgacagggtgctggagaagctgaagaagacagcaacaggctggatgaccacaattaacggcaaggagctgaaggtggagggccagattacctactacaacagatacaagagacagaacgtagtcaaggacctgtccgtcgagctggatagactgagcgaagaatctgtgaacaacgacatctcctcctggacaaagggcagaagcggagaagctctgagcctcctgaagaaaagattctcccatagacccgtgcaggagaagttcgtgtgcctgaactgcggcttcgagacacacgcagccgagcaagccgccctgaacatcgccagatcctggctgttcctgcggagccaggagtacaagaaataccagacaaacaagacaaccggcaacaccgataagagagccttcgtcgagacctggcagtccttttaccggaagaagcttaaggaggtgtggaaacctgccgtgcggtctggcggatctggcggaggctccgcccaggtgctggtgaccttccaggacgtggccgtggacttcacccaggaggagtggaggctgctggaccccggccagaaggagctgtacaaggaggtgatgctggagaacgtgcagaacgtgctgagcctgggcctgcccgtgcccagggaggactggttcttccacttccacgagggcggcgacccctggatgctggagggcaagggccccagcatcagcaggctggacgaggagaggcacggcggcccaagcagcggcgcccctcctcccagcggcggcagcccagccggctccccaacctctaccgaggagggcacctctgagtccgccacccccgagagcggccctggcacctccaccgagcccagcgagggcagcgcacccggcagccctgccggcagccccacctccacagaggagggaaccagcaccgagcccagcgaaggcagcgccccaggcaccagcaccgagcctagtgagcaggagattaaacggatcaacaagatcagaagaagacttgtgaaagacagcaacaccaagaaggccggcaagacaggccccatgaaaaccctgctggttagagtgatgacacccgatctgagagagcggctggaaaacctgagaaagaagcctgaaaatatcccccagcccatcagcaatacatctagagccaacctgaataagctgctgaccgattacaccgaaatgaagaaggcgatcctgcatgtgtactgggaagagttccagaaggaccctgtgggcctgatgagccgggtggcccagcctgccagcaagaagatcgatcagaacaagctgaaacctgagatggacgagaagggcaacctgaccaccgccggctttgcctgctctcagtgtggccagcccctgttcgtgtacaagctggagcaggtgtctgagaagggcaaggcttacaccaactacttcggacggtgcaatgtggccgagcacgaaaagctgatcctgctggcccagctgaagcccgagaaggatagcgacgaagccgtgacatatagcctgggaaagtttgggcagagggccctggatttctacagcattcatgtgaccaaggagtccacccaccccgtgaagcccctggcccagatcgccggaaacagatacgcctccggacctgtgggaaaggccctgagcgacgcatgtatgggcacaatcgcctccttcctgtctaagtaccaggacatcatcatcgaacaccagaaggtggtgaagggcaaccagaagagactggagagcctgcgggagctggccggcaaggaaaacctggaataccctagcgtgaccctgccacctcagcctcacaccaaggagggcgttgatgcctacaacgaagtgatcgcccgggtgcgaatgtgggtgaacctgaacctgtggcagaagctgaagctaagcagagatgatgccaagcctctgctgagactgaagggattcccttcctttcctctggtcgagagacaggccaacgaagtggactggtgggacatggtgtgtaacgtgaagaagctgatcaacgagaaaaaggaggatggcaaggtgttttggcagaatctggctggctacaagagacaggaagccctgagaccatacctgagcagcgaggaagatcggaagaagggaaagaaattcgctcggtaccagctgggcgacctgctgctgcacctggaaaagaagcacggcgaggactggggaaaggtgtacgacgaggcctgggagcggattgacaagaaagtggaaggcctgagcaagcacatcaagctggaagaggaacggagaagcgaggacgcccagagcaaggccgccctgaccgactggctgcgggctaaggccagcttcgtgatcgagggcctgaaggaggccgacaaggacgagttctgcagatgcgagctgaagctgcagaagtggtacggggacctgcggggaaagcccttcgccatcgaagccgagaacagcatcctggacatcagcggcttcagcaagcagtacaactgtgccttcatctggcagaaggacggcgtgaagaagctgaacctgtacctgatcatcaactacttcaagggcggcaagctgcggttcaagaagatcaaacctgaagccttcgaagccaacagattctacaccgtgatcaacaaaaagagcggcgagatcgtgcccatggaggtgaacttcaacttcgacgaccccaacctgatcatcctgcctctggcctttggcaagagacagggcagagaattcatctggaacgacctgctgtccctggaaaccggcagcctgaagctggccaacggaagagtgatcgagaagacactgtacaacagaagaacccggcaggatgagcctgccctgttcgtggccctgaccttcgagcggcgggaggtcctggactcctccaatatcaaaccaatgaacctgatcggcgtggcaagaggcgaaaacatccccgccgtgatcgccctgaccgaccccgagggctgcccactgagccggtttaaggatagcctgggaaacccaacccacatcctgagaatcggcgagagctataaggagaagcagcggaccatccaggccaagaaggaggtggagcagcggagagccggcggctacagccggaagtacgccagcaaagccaagaatctggcagacgatatggtgagaaacaccgctagagatctgctgtactacgccgtgacccaggatgccatgctgatcttcgccaacctgagccggggcttcggccggcagggcaagcggaccttcatggccgagagacagtacacacggatggaggactggctgaccgccaagctggcctacgagggcctgagcaagacctacctgtccaagacactggcccagtacacctccaagacatgcagcaactgtgggtttaccatcaccagcgccgactacgacagggtgctggagaagctgaagaagacagcaacaggctggatgaccacaattaacggcaaggagctgaaggtggagggccagattacctactacaacagatacaagagacagaacgtagtcaaggacctgtccgtcgagctggatagactgagcgaagaatctgtgaacaacgacatctcctcctggacaaagggcagaagcggagaagctctgagcctcctgaagaaaagattctcccatagacccgtgcaggagaagttcgtgtgcctgaactgcggcttcgagacacacgcagccgagcaagccgccctgaacatcgccagatcctggctgttcctgcggagccaggagtacaagaaataccagacaaacaagacaaccggcaacaccgataagagagccttcgtcgagacctggcagtccttttaccggaagaagcttaaggaggtgtggaaacctgccgtgcggtctggcggatctggcggaggctcctgcccaggtgctggtgaccttccaggacgtggccgtggacttcacccaggaggagtggaggctgctggaccccggccagaaggagctgtacaaggaggtgatgctggagaacgtgcagaacgtgctgagcctgggcctgcccgtgcccagggaggactggttcttccacttccacgagggcggcgacccctggatgctggagggcaagggccccagcatcagcaggctggacgaggagaggcacggatctggctccggcagcggccccaagaaaaagagaaaagtctaagctgccttctgcggggcttgccttctggccatgcccttcttctctcccttgcacctgtacctcttggtctttgaataaagcctgagtaggaaggctagcaaaaaaaaaaaaaaaaaaaaaaaaaaaaaaaaaaaaaaaaaaaaaaaaaaaaaaaaaaaaaaaaaaaaaaaaaaaaaaaa

SEQ ID NO: 15853 - RNA, 9485 nt, synthetic construct
  source 1..9485: mol_type = other RNA
aggaaataagagagaaaagaagagtaagaagaaatataagagccaccatggcccctaagaagaagcgtaaagtgagccggatggaacgcctcgtctacgaggtgcggcagaagtgcagaaacatcgaggacatctgcatctcctgcggatctctgaacgtgaccctggagcacccactgttcatcggcggcatgtgccagaactgtaaaaactgttttctggagtgtgcctatcaatacgacgatgacggctaccagagctactgcaccatctgttgcggcggaagagaggtgctgatgtgtggaaataacaactgctgccggtgcttctgcgtggaatgcgtggacctgctggtgggccccggcgccgcccaggccgctattaaggaagatccttggaactgctacatgtgcggccacaagggcacatacggcctgctgagacggagagaggactggcctagcagactgcagatgttcttcgccaataaccacgaccaggagttcgacccccctaaggtgtaccctcccgtccccgccgagaagagaaagcccatccgggtcctgagcctgttcgatggcatcgccaccggtctgctggtgctgaaggacctgggcatccaggtggataggtacattgcctccgaggtgtgcgaggactccatcaccgtgggaatggtgcgtcatcagggcaagatcatgtacgtgggcgacgtgcggagcgtgacacagaagcatatccaggagtggggccctttcgacctggtgatcggcggcagcccttgcaatgacctgagcatcgtgaacccagcccggaagggcctgtacgagggaaccggcagactgttcttcgagttttacagactgctgcacgacgcccggcctaaggaaggcgacgaccggcccttcttttggctgttcgagaatgtggtggccatgggagtcagcgacaagcgggatattagccggttcctggagagcaaccccgtgatgatcgatgccaaggaagtgagcgccgcccaccgggccagatacttctggggcaatctgcctggcatgaacagacccctggccagcaccgtgaacgacaagctggagctgcaggagtgcctggagcacggccggatcgccaagttcagcaaggtgagaaccatcaccacccgaagcaacagcatcaaacaaggcaaggaccagcactttcctgtgttcatgaacgagaaggaggacatcctgtggtgtaccgagatggagagagtgttcgggttcccagtccactacacagatgtcagcaacatgtctagactggccagacagagactgctgggaagaagctggtccgtccctgtgatcagacacctgttcgcccctctgaaggagtacttcgcctgcgtgagcagcggcaacagcaacgccaacagccggggccccagcttctctagcggcctggtgccactgtccctgagagggagccacatgggccccatggagatctacaaaaccgtgagcgcctggaagcggcagcctgtgcgcgtgctgagcctgtttcggaatatcgataaagtcctgaaaagcctgggattcctggagagcggctctggctccggcggtggcaccctgaagtacgtggaggatgtgacaaacgtggtcagacgggatgtggagaagtggggccccttcgatctggtgtacggcagcacccaacccctgggcagctcttgtgaccggtgccctggctggtacatgtttcagttccaccggatcctgcagtacgccctgccgagacaggagtcccagcggccattcttttggattttcatggacaacttgctgctgaccgaggatgaccaggaaactaccactcggttcctgcagaccgaagccgtgaccctgcaggacgtgagaggccgggactaccagaacgccatgcgggtgtggtccaacatccctggactgaaaagcaagcacgcacctctgacccctaaagaagaggagtacctgcaggcccaggtgcggagcagaagcaagctggacgcccctaaggtggatctgctggtgaagaattgcctcctgcccctgagagagtacttcaagtatttcagccagaatagtctgcccctgggaggcagcggcggcggcgccctggtgacatttgaggacgtcgccgtgcggttcacccaggaggaatgggctctgctggatccttctcagaaaatcctgtaccgggacgtgatgagagagacataccggaatctgacctccgtgggcatcaactgggaatgttgggaccttgaagcctgcttcagaagcctgggaagaaacctgagagtgcaggtggtgaagagaaagtgcgagctgaccaacagcggcccctgcgccgagggcggcccaagcagcggcgcccctcctcccagcggcggcagcccagccggctccccaacctctaccgaggagggcacctctgagtccgccacccccgagagcggccctggcacctccaccgagcccagcgagggcagcgcacccggcagccctgccggcagccccacctccacagaggagggaaccagcaccgagcccagcgaaggcagcgccccaggcaccagcaccgagcctagtgagcaggagattaaacggatcaacaagatcagaagaagacttgtgaaagacagcaacaccaagaaggccggcaagacaggccccatgaaaaccctgctggttagagtgatgacacccgatctgagagagcggctggaaaacctgagaaagaagcctgaaaatatcccccagcccatcagcaatacatctagagccaacctgaataagctgctgaccgattacaccgaaatgaagaaggcgatcctgcatgtgtactgggaagagttccagaaggaccctgtgggcctgatgagccgggtggcccagcctgccagcaagaagatcgatcagaacaagctgaaacctgagatggacgagaagggcaacctgaccaccgccggctttgcctgctctcagtgtggccagcccctgttcgtgtacaagctggagcaggtgtctgagaagggcaaggcttacaccaactacttcggacggtgcaatgtggccgagcacgaaaagctgatcctgctggcccagctgaagcccgagaaggatagcgacgaagccgtgacatatagcctgggaaagtttgggcagagggccctggatttctacagcattcatgtgaccaaggagtccacccaccccgtgaagcccctggcccagatcgccggaaacagatacgcctccggacctgtgggaaaggccctgagcgacgcatgtatgggcacaatcgcctccttcctgtctaagtaccaggacatcatcatcgaacaccagaaggtggtgaagggcaaccagaagagactggagagcctgcgggagctggccggcaaggaaaacctggaataccctagcgtgaccctgccacctcagcctcacaccaaggagggcgttgatgcctacaacgaagtgatcgcccgggtgcgaatgtgggtgaacctgaacctgtggcagaagctgaagctaagcagagatgatgccaagcctctgctgagactgaagggattcccttcctttcctctggtcgagagacaggccaacgaagtggactggtgggacatggtgtgtaacgtgaagaagctgatcaacgagaaaaaggaggatggcaaggtgttttggcagaatctggctggctacaagagacaggaagccctgagaccatacctgagcagcgaggaagatcggaagaagggaaagaaattcgctcggtaccagctgggcgacctgctgctgcacctggaaaagaagcacggcgaggactggggaaaggtgtacgacgaggcctgggagcggattgacaagaaagtggaaggcctgagcaagcacatcaagctggaagaggaacggagaagcgaggacgcccagagcaaggccgccctgaccgactggctgcgggctaaggccagcttcgtgatcgagggcctgaaggaggccgacaaggacgagttctgcagatgcgagctgaagctgcagaagtggtacggggacctgcggggaaagcccttcgccatcgaagccgagaacagcatcctggacatcagcggcttcagcaagcagtacaactgtgccttcatctggcagaaggacggcgtgaagaagctgaacctgtacctgatcatcaactacttcaagggcggcaagctgcggttcaagaagatcaaacctgaagccttcgaagccaacagattctacaccgtgatcaacaaaaagagcggcgagatcgtgcccatggaggtgaacttcaacttcgacgaccccaacctgatcatcctgcctctggcctttggcaagagacagggcagagaattcatctggaacgacctgctgtccctggaaaccggcagcctgaagctggccaacggaagagtgatcgagaagacactgtacaacagaagaacccggcaggatgagcctgccctgttcgtggccctgaccttcgagcggcgggaggtcctggactcctccaatatcaaaccaatgaacctgatcggcgtggcaagaggcgaaaacatccccgccgtgatcgccctgaccgaccccgagggctgcccactgagccggtttaaggatagcctgggaaacccaacccacatcctgagaatcggcgagagctataaggagaagcagcggaccatccaggccaagaaggaggtggagcagcggagagccggcggctacagccggaagtacgccagcaaagccaagaatctggcagacgatatggtgagaaacaccgctagagatctgctgtactacgccgtgacccaggatgccatgctgatcttcgccaacctgagccggggcttcggccggcagggcaagcggaccttcatggccgagagacagtacacacggatggaggactggctgaccgccaagctggcctacgagggcctgagcaagacctacctgtccaagacactggcccagtacacctccaagacatgcagcaactgtgggtttaccatcaccagcgccgactacgacagggtgctggagaagctgaagaagacagcaacaggctggatgaccacaattaacggcaaggagctgaaggtggagggccagattacctactacaacagatacaagagacagaacgtagtcaaggacctgtccgtcgagctggatagactgagcgaagaatctgtgaacaacgacatctcctcctggacaaagggcagaagcggagaagctctgagcctcctgaagaaaagattctcccatagacccgtgcaggagaagttcgtgtgcctgaactgcggcttcgagacacacgcagccgagcaagccgccctgaacatcgccagatcctggctgttcctgcggagccaggagtacaagaaataccagacaaacaagacaaccggcaacaccgataagagagccttcgtcgagacctggcagtccttttaccggaagaagcttaaggaggtgtggaaacctgccgtgcggtctggcggatctggcggaggctccctgcaggagcccgtgagcttcgccgaggtggccgtgtacttcagcagggaggagtgggccctgctggaccccgcccagagggccctgtacagggacgtgatgctggagacctaccagtgcgtggcctggctggcccccctgcccgcccccaagcccggcctgatcagcctgctggagggcggcgaggacccctggatccccgacgtgaggagccccgaggccgtgcccggcgacctgagccccggcggcccaagcagcggcgcccctcctcccagcggcggcagcccagccggctccccaacctctaccgaggagggcacctctgagtccgccacccccgagagcggccctggcacctccaccgagcccagcgagggcagcgcacccggcagccctgccggcagccccacctccacagaggagggaaccagcaccgagcccagcgaaggcagcgccccaggcaccagcaccgagcctagtgagcaggagattaaacggatcaacaagatcagaagaagacttgtgaaagacagcaacaccaagaaggccggcaagacaggccccatgaaaaccctgctggttagagtgatgacacccgatctgagagagcggctggaaaacctgagaaagaagcctgaaaatatcccccagcccatcagcaatacatctagagccaacctgaataagctgctgaccgattacaccgaaatgaagaaggcgatcctgcatgtgtactgggaagagttccagaaggaccctgtgggcctgatgagccgggtggcccagcctgccagcaagaagatcgatcagaacaagctgaaacctgagatggacgagaagggcaacctgaccaccgccggctttgcctgctctcagtgtggccagcccctgttcgtgtacaagctggagcaggtgtctgagaagggcaaggcttacaccaactacttcggacggtgcaatgtggccgagcacgaaaagctgatcctgctggcccagctgaagcccgagaaggatagcgacgaagccgtgacatatagcctgggaaagtttgggcagagggccctggatttctacagcattcatgtgaccaaggagtccacccaccccgtgaagcccctggcccagatcgccggaaacagatacgcctccggacctgtgggaaaggccctgagcgacgcatgtatgggcacaatcgcctccttcctgtctaagtaccaggacatcatcatcgaacaccagaaggtggtgaagggcaaccagaagagactggagagcctgcgggagctggccggcaaggaaaacctggaataccctagcgtgaccctgccacctcagcctcacaccaaggagggcgttgatgcctacaacgaagtgatcgcccgggtgcgaatgtgggtgaacctgaacctgtggcagaagctgaagctaagcagagatgatgccaagcctctgctgagactgaagggattcccttcctttcctctggtcgagagacaggccaacgaagtggactggtgggacatggtgtgtaacgtgaagaagctgatcaacgagaaaaaggaggatggcaaggtgttttggcagaatctggctggctacaagagacaggaagccctgagaccatacctgagcagcgaggaagatcggaagaagggaaagaaattcgctcggtaccagctgggcgacctgctgctgcacctggaaaagaagcacggcgaggactggggaaaggtgtacgacgaggcctgggagcggattgacaagaaagtggaaggcctgagcaagcacatcaagctggaagaggaacggagaagcgaggacgcccagagcaaggccgccctgaccgactggctgcgggctaaggccagcttcgtgatcgagggcctgaaggaggccgacaaggacgagttctgcagatgcgagctgaagctgcagaagtggtacggggacctgcggggaaagcccttcgccatcgaagccgagaacagcatcctggacatcagcggcttcagcaagcagtacaactgtgccttcatctggcagaaggacggcgtgaagaagctgaacctgtacctgatcatcaactacttcaagggcggcaagctgcggttcaagaagatcaaacctgaagccttcgaagccaacagattctacaccgtgatcaacaaaaagagcggcgagatcgtgcccatggaggtgaacttcaacttcgacgaccccaacctgatcatcctgcctctggcctttggcaagagacagggcagagaattcatctggaacgacctgctgtccctggaaaccggcagcctgaagctggccaacggaagagtgatcgagaagacactgtacaacagaagaacccggcaggatgagcctgccctgttcgtggccctgaccttcgagcggcgggaggtcctggactcctccaatatcaaaccaatgaacctgatcggcgtggcaagaggcgaaaacatccccgccgtgatcgccctgaccgaccccgagggctgcccactgagccggtttaaggatagcctgggaaacccaacccacatcctgagaatcggcgagagctataaggagaagcagcggaccatccaggccaagaaggaggtggagcagcggagagccggcggctacagccggaagtacgccagcaaagccaagaatctggcagacgatatggtgagaaacaccgctagagatctgctgtactacgccgtgacccaggatgccatgctgatcttcgccaacctgagccggggcttcggccggcagggcaagcggaccttcatggccgagagacagtacacacggatggaggactggctgaccgccaagctggcctacgagggcctgagcaagacctacctgtccaagacactggcccagtacacctccaagacatgcagcaactgtgggtttaccatcaccagcgccgactacgacagggtgctggagaagctgaagaagacagcaacaggctggatgaccacaattaacggcaaggagctgaaggtggagggccagattacctactacaacagatacaagagacagaacgtagtcaaggacctgtccgtcgagctggatagactgagcgaagaatctgtgaacaacgacatctcctcctggacaaagggcagaagcggagaagctctgagcctcctgaagaaaagattctcccatagacccgtgcaggagaagttcgtgtgcctgaactgcggcttcgagacacacgcagccgagcaagccgccctgaacatcgccagatcctggctgttcctgcggagccaggagtacaagaaataccagacaaacaagacaaccggcaacaccgataagagagccttcgtcgagacctggcagtccttttaccggaagaagcttaaggaggtgtggaaacctgccgtgcggtctggcggatctggcggaggctcctctgcaggagcccgtgagcttcgccgaggtggccgtgtacttcagcagggaggagtgggccctgctggaccccgcccagagggccctgtacagggacgtgatgctggagacctaccagtgcgtggcctggctggcccccctgcccgcccccaagcccggcctgatcagcctgctggagggcggcgaggacccctggatccccgacgtgaggagccccgaggccgtgcccggcgacctgagccccggatctggctccggcagcggccccaagaaaaagagaaaagtctaagctgccttctgcggggcttgccttctggccatgcccttcttctctcccttgcacctgtacctcttggtctttgaataaagcctgagtaggaaggctagcaaaaaaaaaaaaaaaaaaaaaaaaaaaaaaaaaaaaaaaaaaaaaaaaaaaaaaaaaaaaaaaaaaaaaaaaaaaaaaaa

SEQ ID NO: 15854 - RNA, 9485 nt, synthetic construct
  source 1..9485: mol_type = other RNA
aggaaataagagagaaaagaagagtaagaagaaatataagagccaccatggcccctaagaagaagcgtaaagtgagccggatggaacgcctcgtctacgaggtgcggcagaagtgcagaaacatcgaggacatctgcatctcctgcggatctctgaacgtgaccctggagcacccactgttcatcggcggcatgtgccagaactgtaaaaactgttttctggagtgtgcctatcaatacgacgatgacggctaccagagctactgcaccatctgttgcggcggaagagaggtgctgatgtgtggaaataacaactgctgccggtgcttctgcgtggaatgcgtggacctgctggtgggccccggcgccgcccaggccgctattaaggaagatccttggaactgctacatgtgcggccacaagggcacatacggcctgctgagacggagagaggactggcctagcagactgcagatgttcttcgccaataaccacgaccaggagttcgacccccctaaggtgtaccctcccgtccccgccgagaagagaaagcccatccgggtcctgagcctgttcgatggcatcgccaccggtctgctggtgctgaaggacctgggcatccaggtggataggtacattgcctccgaggtgtgcgaggactccatcaccgtgggaatggtgcgtcatcagggcaagatcatgtacgtgggcgacgtgcggagcgtgacacagaagcatatccaggagtggggccctttcgacctggtgatcggcggcagcccttgcaatgacctgagcatcgtgaacccagcccggaagggcctgtacgagggaaccggcagactgttcttcgagttttacagactgctgcacgacgcccggcctaaggaaggcgacgaccggcccttcttttggctgttcgagaatgtggtggccatgggagtcagcgacaagcgggatattagccggttcctggagagcaaccccgtgatgatcgatgccaaggaagtgagcgccgcccaccgggccagatacttctggggcaatctgcctggcatgaacagacccctggccagcaccgtgaacgacaagctggagctgcaggagtgcctggagcacggccggatcgccaagttcagcaaggtgagaaccatcaccacccgaagcaacagcatcaaacaaggcaaggaccagcactttcctgtgttcatgaacgagaaggaggacatcctgtggtgtaccgagatggagagagtgttcgggttcccagtccactacacagatgtcagcaacatgtctagactggccagacagagactgctgggaagaagctggtccgtccctgtgatcagacacctgttcgcccctctgaaggagtacttcgcctgcgtgagcagcggcaacagcaacgccaacagccggggccccagcttctctagcggcctggtgccactgtccctgagagggagccacatgggccccatggagatctacaaaaccgtgagcgcctggaagcggcagcctgtgcgcgtgctgagcctgtttcggaatatcgataaagtcctgaaaagcctgggattcctggagagcggctctggctccggcggtggcaccctgaagtacgtggaggatgtgacaaacgtggtcagacgggatgtggagaagtggggccccttcgatctggtgtacggcagcacccaacccctgggcagctcttgtgaccggtgccctggctggtacatgtttcagttccaccggatcctgcagtacgccctgccgagacaggagtcccagcggccattcttttggattttcatggacaacttgctgctgaccgaggatgaccaggaaactaccactcggttcctgcagaccgaagccgtgaccctgcaggacgtgagaggccgggactaccagaacgccatgcgggtgtggtccaacatccctggactgaaaagcaagcacgcacctctgacccctaaagaagaggagtacctgcaggcccaggtgcggagcagaagcaagctggacgcccctaaggtggatctgctggtgaagaattgcctcctgcccctgagagagtacttcaagtatttcagccagaatagtctgcccctgggaggcagcggcggcggcgccctggtgacatttgaggacgtcgccgtgcggttcacccaggaggaatgggctctgctggatccttctcagaaaatcctgtaccgggacgtgatgagagagacataccggaatctgacctccgtgggcatcaactgggaatgttgggaccttgaagcctgcttcagaagcctgggaagaaacctgagagtgcaggtggtgaagagaaagtgcgagctgaccaacagcggcccctgcgccgagggcggcccaagcagcggcgcccctcctcccagcggcggcagcccagccggctccccaacctctaccgaggagggcacctctgagtccgccacccccgagagcggccctggcacctccaccgagcccagcgagggcagcgcacccggcagccctgccggcagccccacctccacagaggagggaaccagcaccgagcccagcgaaggcagcgccccaggcaccagcaccgagcctagtgagcaggagattaaacggatcaacaagatcagaagaagacttgtgaaagacagcaacaccaagaaggccggcaagacaggccccatgaaaaccctgctggttagagtgatgacacccgatctgagagagcggctggaaaacctgagaaagaagcctgaaaatatcccccagcccatcagcaatacatctagagccaacctgaataagctgctgaccgattacaccgaaatgaagaaggcgatcctgcatgtgtactgggaagagttccagaaggaccctgtgggcctgatgagccgggtggcccagcctgccagcaagaagatcgatcagaacaagctgaaacctgagatggacgagaagggcaacctgaccaccgccggctttgcctgctctcagtgtggccagcccctgttcgtgtacaagctggagcaggtgtctgagaagggcaaggcttacaccaactacttcggacggtgcaatgtggccgagcacgaaaagctgatcctgctggcccagctgaagcccgagaaggatagcgacgaagccgtgacatatagcctgggaaagtttgggcagagggccctggatttctacagcattcatgtgaccaaggagtccacccaccccgtgaagcccctggcccagatcgccggaaacagatacgcctccggacctgtgggaaaggccctgagcgacgcatgtatgggcacaatcgcctccttcctgtctaagtaccaggacatcatcatcgaacaccagaaggtggtgaagggcaaccagaagagactggagagcctgcgggagctggccggcaaggaaaacctggaataccctagcgtgaccctgccacctcagcctcacaccaaggagggcgttgatgcctacaacgaagtgatcgcccgggtgcgaatgtgggtgaacctgaacctgtggcagaagctgaagctaagcagagatgatgccaagcctctgctgagactgaagggattcccttcctttcctctggtcgagagacaggccaacgaagtggactggtgggacatggtgtgtaacgtgaagaagctgatcaacgagaaaaaggaggatggcaaggtgttttggcagaatctggctggctacaagagacaggaagccctgagaccatacctgagcagcgaggaagatcggaagaagggaaagaaattcgctcggtaccagctgggcgacctgctgctgcacctggaaaagaagcacggcgaggactggggaaaggtgtacgacgaggcctgggagcggattgacaagaaagtggaaggcctgagcaagcacatcaagctggaagaggaacggagaagcgaggacgcccagagcaaggccgccctgaccgactggctgcgggctaaggccagcttcgtgatcgagggcctgaaggaggccgacaaggacgagttctgcagatgcgagctgaagctgcagaagtggtacggggacctgcggggaaagcccttcgccatcgaagccgagaacagcatcctggacatcagcggcttcagcaagcagtacaactgtgccttcatctggcagaaggacggcgtgaagaagctgaacctgtacctgatcatcaactacttcaagggcggcaagctgcggttcaagaagatcaaacctgaagccttcgaagccaacagattctacaccgtgatcaacaaaaagagcggcgagatcgtgcccatggaggtgaacttcaacttcgacgaccccaacctgatcatcctgcctctggcctttggcaagagacagggcagagaattcatctggaacgacctgctgtccctggaaaccggcagcctgaagctggccaacggaagagtgatcgagaagacactgtacaacagaagaacccggcaggatgagcctgccctgttcgtggccctgaccttcgagcggcgggaggtcctggactcctccaatatcaaaccaatgaacctgatcggcgtggcaagaggcgaaaacatccccgccgtgatcgccctgaccgaccccgagggctgcccactgagccggtttaaggatagcctgggaaacccaacccacatcctgagaatcggcgagagctataaggagaagcagcggaccatccaggccaagaaggaggtggagcagcggagagccggcggctacagccggaagtacgccagcaaagccaagaatctggcagacgatatggtgagaaacaccgctagagatctgctgtactacgccgtgacccaggatgccatgctgatcttcgccaacctgagccggggcttcggccggcagggcaagcggaccttcatggccgagagacagtacacacggatggaggactggctgaccgccaagctggcctacgagggcctgagcaagacctacctgtccaagacactggcccagtacacctccaagacatgcagcaactgtgggtttaccatcaccagcgccgactacgacagggtgctggagaagctgaagaagacagcaacaggctggatgaccacaattaacggcaaggagctgaaggtggagggccagattacctactacaacagatacaagagacagaacgtagtcaaggacctgtccgtcgagctggatagactgagcgaagaatctgtgaacaacgacatctcctcctggacaaagggcagaagcggagaagctctgagcctcctgaagaaaagattctcccatagacccgtgcaggagaagttcgtgtgcctgaactgcggcttcgagacacacgcagccgagcaagccgccctgaacatcgccagatcctggctgttcctgcggagccaggagtacaagaaataccagacaaacaagacaaccggcaacaccgataagagagccttcgtcgagacctggcagtccttttaccggaagaagcttaaggaggtgtggaaacctgccgtgcggtctggcggatctggcggaggctccatggagctgagggaggccttcgaggacgtggccgtgtacttcaccaggaaggagtgggagctgctggaggacgaggacaaggagctgtacagggacctgatgctgaggaactaccaggccctggtgagcctgggctaccagggccccacccccggcctgatctgcaggatcaagcagagggaggtggagctgtgggtgtgcgacgacgagcaccacggcgagagcagcgtgagcgagaacctgggcggcccaagcagcggcgcccctcctcccagcggcggcagcccagccggctccccaacctctaccgaggagggcacctctgagtccgccacccccgagagcggccctggcacctccaccgagcccagcgagggcagcgcacccggcagccctgccggcagccccacctccacagaggagggaaccagcaccgagcccagcgaaggcagcgccccaggcaccagcaccgagcctagtgagcaggagattaaacggatcaacaagatcagaagaagacttgtgaaagacagcaacaccaagaaggccggcaagacaggccccatgaaaaccctgctggttagagtgatgacacccgatctgagagagcggctggaaaacctgagaaagaagcctgaaaatatcccccagcccatcagcaatacatctagagccaacctgaataagctgctgaccgattacaccgaaatgaagaaggcgatcctgcatgtgtactgggaagagttccagaaggaccctgtgggcctgatgagccgggtggcccagcctgccagcaagaagatcgatcagaacaagctgaaacctgagatggacgagaagggcaacctgaccaccgccggctttgcctgctctcagtgtggccagcccctgttcgtgtacaagctggagcaggtgtctgagaagggcaaggcttacaccaactacttcggacggtgcaatgtggccgagcacgaaaagctgatcctgctggcccagctgaagcccgagaaggatagcgacgaagccgtgacatatagcctgggaaagtttgggcagagggccctggatttctacagcattcatgtgaccaaggagtccacccaccccgtgaagcccctggcccagatcgccggaaacagatacgcctccggacctgtgggaaaggccctgagcgacgcatgtatgggcacaatcgcctccttcctgtctaagtaccaggacatcatcatcgaacaccagaaggtggtgaagggcaaccagaagagactggagagcctgcgggagctggccggcaaggaaaacctggaataccctagcgtgaccctgccacctcagcctcacaccaaggagggcgttgatgcctacaacgaagtgatcgcccgggtgcgaatgtgggtgaacctgaacctgtggcagaagctgaagctaagcagagatgatgccaagcctctgctgagactgaagggattcccttcctttcctctggtcgagagacaggccaacgaagtggactggtgggacatggtgtgtaacgtgaagaagctgatcaacgagaaaaaggaggatggcaaggtgttttggcagaatctggctggctacaagagacaggaagccctgagaccatacctgagcagcgaggaagatcggaagaagggaaagaaattcgctcggtaccagctgggcgacctgctgctgcacctggaaaagaagcacggcgaggactggggaaaggtgtacgacgaggcctgggagcggattgacaagaaagtggaaggcctgagcaagcacatcaagctggaagaggaacggagaagcgaggacgcccagagcaaggccgccctgaccgactggctgcgggctaaggccagcttcgtgatcgagggcctgaaggaggccgacaaggacgagttctgcagatgcgagctgaagctgcagaagtggtacggggacctgcggggaaagcccttcgccatcgaagccgagaacagcatcctggacatcagcggcttcagcaagcagtacaactgtgccttcatctggcagaaggacggcgtgaagaagctgaacctgtacctgatcatcaactacttcaagggcggcaagctgcggttcaagaagatcaaacctgaagccttcgaagccaacagattctacaccgtgatcaacaaaaagagcggcgagatcgtgcccatggaggtgaacttcaacttcgacgaccccaacctgatcatcctgcctctggcctttggcaagagacagggcagagaattcatctggaacgacctgctgtccctggaaaccggcagcctgaagctggccaacggaagagtgatcgagaagacactgtacaacagaagaacccggcaggatgagcctgccctgttcgtggccctgaccttcgagcggcgggaggtcctggactcctccaatatcaaaccaatgaacctgatcggcgtggcaagaggcgaaaacatccccgccgtgatcgccctgaccgaccccgagggctgcccactgagccggtttaaggatagcctgggaaacccaacccacatcctgagaatcggcgagagctataaggagaagcagcggaccatccaggccaagaaggaggtggagcagcggagagccggcggctacagccggaagtacgccagcaaagccaagaatctggcagacgatatggtgagaaacaccgctagagatctgctgtactacgccgtgacccaggatgccatgctgatcttcgccaacctgagccggggcttcggccggcagggcaagcggaccttcatggccgagagacagtacacacggatggaggactggctgaccgccaagctggcctacgagggcctgagcaagacctacctgtccaagacactggcccagtacacctccaagacatgcagcaactgtgggtttaccatcaccagcgccgactacgacagggtgctggagaagctgaagaagacagcaacaggctggatgaccacaattaacggcaaggagctgaaggtggagggccagattacctactacaacagatacaagagacagaacgtagtcaaggacctgtccgtcgagctggatagactgagcgaagaatctgtgaacaacgacatctcctcctggacaaagggcagaagcggagaagctctgagcctcctgaagaaaagattctcccatagacccgtgcaggagaagttcgtgtgcctgaactgcggcttcgagacacacgcagccgagcaagccgccctgaacatcgccagatcctggctgttcctgcggagccaggagtacaagaaataccagacaaacaagacaaccggcaacaccgataagagagccttcgtcgagacctggcagtccttttaccggaagaagcttaaggaggtgtggaaacctgccgtgcggtctggcggatctggcggaggctcctatggagctgagggaggccttcgaggacgtggccgtgtacttcaccaggaaggagtgggagctgctggaggacgaggacaaggagctgtacagggacctgatgctgaggaactaccaggccctggtgagcctgggctaccagggccccacccccggcctgatctgcaggatcaagcagagggaggtggagctgtgggtgtgcgacgacgagcaccacggcgagagcagcgtgagcgagaacctgggatctggctccggcagcggccccaagaaaaagagaaaagtctaagctgccttctgcggggcttgccttctggccatgcccttcttctctcccttgcacctgtacctcttggtctttgaataaagcctgagtaggaaggctagcaaaaaaaaaaaaaaaaaaaaaaaaaaaaaaaaaaaaaaaaaaaaaaaaaaaaaaaaaaaaaaaaaaaaaaaaaaaaaaaa

SEQ ID NO: 15855 - RNA, 9485 nt, synthetic construct
  source 1..9485: mol_type = other RNA
aggaaataagagagaaaagaagagtaagaagaaatataagagccaccatggcccctaagaagaagcgtaaagtgagccggatggaacgcctcgtctacgaggtgcggcagaagtgcagaaacatcgaggacatctgcatctcctgcggatctctgaacgtgaccctggagcacccactgttcatcggcggcatgtgccagaactgtaaaaactgttttctggagtgtgcctatcaatacgacgatgacggctaccagagctactgcaccatctgttgcggcggaagagaggtgctgatgtgtggaaataacaactgctgccggtgcttctgcgtggaatgcgtggacctgctggtgggccccggcgccgcccaggccgctattaaggaagatccttggaactgctacatgtgcggccacaagggcacatacggcctgctgagacggagagaggactggcctagcagactgcagatgttcttcgccaataaccacgaccaggagttcgacccccctaaggtgtaccctcccgtccccgccgagaagagaaagcccatccgggtcctgagcctgttcgatggcatcgccaccggtctgctggtgctgaaggacctgggcatccaggtggataggtacattgcctccgaggtgtgcgaggactccatcaccgtgggaatggtgcgtcatcagggcaagatcatgtacgtgggcgacgtgcggagcgtgacacagaagcatatccaggagtggggccctttcgacctggtgatcggcggcagcccttgcaatgacctgagcatcgtgaacccagcccggaagggcctgtacgagggaaccggcagactgttcttcgagttttacagactgctgcacgacgcccggcctaaggaaggcgacgaccggcccttcttttggctgttcgagaatgtggtggccatgggagtcagcgacaagcgggatattagccggttcctggagagcaaccccgtgatgatcgatgccaaggaagtgagcgccgcccaccgggccagatacttctggggcaatctgcctggcatgaacagacccctggccagcaccgtgaacgacaagctggagctgcaggagtgcctggagcacggccggatcgccaagttcagcaaggtgagaaccatcaccacccgaagcaacagcatcaaacaaggcaaggaccagcactttcctgtgttcatgaacgagaaggaggacatcctgtggtgtaccgagatggagagagtgttcgggttcccagtccactacacagatgtcagcaacatgtctagactggccagacagagactgctgggaagaagctggtccgtccctgtgatcagacacctgttcgcccctctgaaggagtacttcgcctgcgtgagcagcggcaacagcaacgccaacagccggggccccagcttctctagcggcctggtgccactgtccctgagagggagccacatgggccccatggagatctacaaaaccgtgagcgcctggaagcggcagcctgtgcgcgtgctgagcctgtttcggaatatcgataaagtcctgaaaagcctgggattcctggagagcggctctggctccggcggtggcaccctgaagtacgtggaggatgtgacaaacgtggtcagacgggatgtggagaagtggggccccttcgatctggtgtacggcagcacccaacccctgggcagctcttgtgaccggtgccctggctggtacatgtttcagttccaccggatcctgcagtacgccctgccgagacaggagtcccagcggccattcttttggattttcatggacaacttgctgctgaccgaggatgaccaggaaactaccactcggttcctgcagaccgaagccgtgaccctgcaggacgtgagaggccgggactaccagaacgccatgcgggtgtggtccaacatccctggactgaaaagcaagcacgcacctctgacccctaaagaagaggagtacctgcaggcccaggtgcggagcagaagcaagctggacgcccctaaggtggatctgctggtgaagaattgcctcctgcccctgagagagtacttcaagtatttcagccagaatagtctgcccctgggaggcagcggcggcggcgccctggtgacatttgaggacgtcgccgtgcggttcacccaggaggaatgggctctgctggatccttctcagaaaatcctgtaccgggacgtgatgagagagacataccggaatctgacctccgtgggcatcaactgggaatgttgggaccttgaagcctgcttcagaagcctgggaagaaacctgagagtgcaggtggtgaagagaaagtgcgagctgaccaacagcggcccctgcgccgagggcggcccaagcagcggcgcccctcctcccagcggcggcagcccagccggctccccaacctctaccgaggagggcacctctgagtccgccacccccgagagcggccctggcacctccaccgagcccagcgagggcagcgcacccggcagccctgccggcagccccacctccacagaggagggaaccagcaccgagcccagcgaaggcagcgccccaggcaccagcaccgagcctagtgagcaggagattaaacggatcaacaagatcagaagaagacttgtgaaagacagcaacaccaagaaggccggcaagacaggccccatgaaaaccctgctggttagagtgatgacacccgatctgagagagcggctggaaaacctgagaaagaagcctgaaaatatcccccagcccatcagcaatacatctagagccaacctgaataagctgctgaccgattacaccgaaatgaagaaggcgatcctgcatgtgtactgggaagagttccagaaggaccctgtgggcctgatgagccgggtggcccagcctgccagcaagaagatcgatcagaacaagctgaaacctgagatggacgagaagggcaacctgaccaccgccggctttgcctgctctcagtgtggccagcccctgttcgtgtacaagctggagcaggtgtctgagaagggcaaggcttacaccaactacttcggacggtgcaatgtggccgagcacgaaaagctgatcctgctggcccagctgaagcccgagaaggatagcgacgaagccgtgacatatagcctgggaaagtttgggcagagggccctggatttctacagcattcatgtgaccaaggagtccacccaccccgtgaagcccctggcccagatcgccggaaacagatacgcctccggacctgtgggaaaggccctgagcgacgcatgtatgggcacaatcgcctccttcctgtctaagtaccaggacatcatcatcgaacaccagaaggtggtgaagggcaaccagaagagactggagagcctgcgggagctggccggcaaggaaaacctggaataccctagcgtgaccctgccacctcagcctcacaccaaggagggcgttgatgcctacaacgaagtgatcgcccgggtgcgaatgtgggtgaacctgaacctgtggcagaagctgaagctaagcagagatgatgccaagcctctgctgagactgaagggattcccttcctttcctctggtcgagagacaggccaacgaagtggactggtgggacatggtgtgtaacgtgaagaagctgatcaacgagaaaaaggaggatggcaaggtgttttggcagaatctggctggctacaagagacaggaagccctgagaccatacctgagcagcgaggaagatcggaagaagggaaagaaattcgctcggtaccagctgggcgacctgctgctgcacctggaaaagaagcacggcgaggactggggaaaggtgtacgacgaggcctgggagcggattgacaagaaagtggaaggcctgagcaagcacatcaagctggaagaggaacggagaagcgaggacgcccagagcaaggccgccctgaccgactggctgcgggctaaggccagcttcgtgatcgagggcctgaaggaggccgacaaggacgagttctgcagatgcgagctgaagctgcagaagtggtacggggacctgcggggaaagcccttcgccatcgaagccgagaacagcatcctggacatcagcggcttcagcaagcagtacaactgtgccttcatctggcagaaggacggcgtgaagaagctgaacctgtacctgatcatcaactacttcaagggcggcaagctgcggttcaagaagatcaaacctgaagccttcgaagccaacagattctacaccgtgatcaacaaaaagagcggcgagatcgtgcccatggaggtgaacttcaacttcgacgaccccaacctgatcatcctgcctctggcctttggcaagagacagggcagagaattcatctggaacgacctgctgtccctggaaaccggcagcctgaagctggccaacggaagagtgatcgagaagacactgtacaacagaagaacccggcaggatgagcctgccctgttcgtggccctgaccttcgagcggcgggaggtcctggactcctccaatatcaaaccaatgaacctgatcggcgtggcaagaggcgaaaacatccccgccgtgatcgccctgaccgaccccgagggctgcccactgagccggtttaaggatagcctgggaaacccaacccacatcctgagaatcggcgagagctataaggagaagcagcggaccatccaggccaagaaggaggtggagcagcggagagccggcggctacagccggaagtacgccagcaaagccaagaatctggcagacgatatggtgagaaacaccgctagagatctgctgtactacgccgtgacccaggatgccatgctgatcttcgccaacctgagccggggcttcggccggcagggcaagcggaccttcatggccgagagacagtacacacggatggaggactggctgaccgccaagctggcctacgagggcctgagcaagacctacctgtccaagacactggcccagtacacctccaagacatgcagcaactgtgggtttaccatcaccagcgccgactacgacagggtgctggagaagctgaagaagacagcaacaggctggatgaccacaattaacggcaaggagctgaaggtggagggccagattacctactacaacagatacaagagacagaacgtagtcaaggacctgtccgtcgagctggatagactgagcgaagaatctgtgaacaacgacatctcctcctggacaaagggcagaagcggagaagctctgagcctcctgaagaaaagattctcccatagacccgtgcaggagaagttcgtgtgcctgaactgcggcttcgagacacacgcagccgagcaagccgccctgaacatcgccagatcctggctgttcctgcggagccaggagtacaagaaataccagacaaacaagacaaccggcaacaccgataagagagccttcgtcgagacctggcagtccttttaccggaagaagcttaaggaggtgtggaaacctgccgtgcggtctggcggatctggcggaggctccttccaggagaccgtgaccttcaaggacgtggccgtggtgttcagcgaggaggagctgggcctgctggacagcacccagaggaagctgtacagggacgtgatgctggagaacttcaggaacctggtgagcgtgggccacagcagcagcaagcccgacatgatcagccagctggagagggaggagaagctgtgcatgaaggagatccacaccgagaggggcaggcacagcggcggcaggaaccagggcggcccaagcagcggcgcccctcctcccagcggcggcagcccagccggctccccaacctctaccgaggagggcacctctgagtccgccacccccgagagcggccctggcacctccaccgagcccagcgagggcagcgcacccggcagccctgccggcagccccacctccacagaggagggaaccagcaccgagcccagcgaaggcagcgccccaggcaccagcaccgagcctagtgagcaggagattaaacggatcaacaagatcagaagaagacttgtgaaagacagcaacaccaagaaggccggcaagacaggccccatgaaaaccctgctggttagagtgatgacacccgatctgagagagcggctggaaaacctgagaaagaagcctgaaaatatcccccagcccatcagcaatacatctagagccaacctgaataagctgctgaccgattacaccgaaatgaagaaggcgatcctgcatgtgtactgggaagagttccagaaggaccctgtgggcctgatgagccgggtggcccagcctgccagcaagaagatcgatcagaacaagctgaaacctgagatggacgagaagggcaacctgaccaccgccggctttgcctgctctcagtgtggccagcccctgttcgtgtacaagctggagcaggtgtctgagaagggcaaggcttacaccaactacttcggacggtgcaatgtggccgagcacgaaaagctgatcctgctggcccagctgaagcccgagaaggatagcgacgaagccgtgacatatagcctgggaaagtttgggcagagggccctggatttctacagcattcatgtgaccaaggagtccacccaccccgtgaagcccctggcccagatcgccggaaacagatacgcctccggacctgtgggaaaggccctgagcgacgcatgtatgggcacaatcgcctccttcctgtctaagtaccaggacatcatcatcgaacaccagaaggtggtgaagggcaaccagaagagactggagagcctgcgggagctggccggcaaggaaaacctggaataccctagcgtgaccctgccacctcagcctcacaccaaggagggcgttgatgcctacaacgaagtgatcgcccgggtgcgaatgtgggtgaacctgaacctgtggcagaagctgaagctaagcagagatgatgccaagcctctgctgagactgaagggattcccttcctttcctctggtcgagagacaggccaacgaagtggactggtgggacatggtgtgtaacgtgaagaagctgatcaacgagaaaaaggaggatggcaaggtgttttggcagaatctggctggctacaagagacaggaagccctgagaccatacctgagcagcgaggaagatcggaagaagggaaagaaattcgctcggtaccagctgggcgacctgctgctgcacctggaaaagaagcacggcgaggactggggaaaggtgtacgacgaggcctgggagcggattgacaagaaagtggaaggcctgagcaagcacatcaagctggaagaggaacggagaagcgaggacgcccagagcaaggccgccctgaccgactggctgcgggctaaggccagcttcgtgatcgagggcctgaaggaggccgacaaggacgagttctgcagatgcgagctgaagctgcagaagtggtacggggacctgcggggaaagcccttcgccatcgaagccgagaacagcatcctggacatcagcggcttcagcaagcagtacaactgtgccttcatctggcagaaggacggcgtgaagaagctgaacctgtacctgatcatcaactacttcaagggcggcaagctgcggttcaagaagatcaaacctgaagccttcgaagccaacagattctacaccgtgatcaacaaaaagagcggcgagatcgtgcccatggaggtgaacttcaacttcgacgaccccaacctgatcatcctgcctctggcctttggcaagagacagggcagagaattcatctggaacgacctgctgtccctggaaaccggcagcctgaagctggccaacggaagagtgatcgagaagacactgtacaacagaagaacccggcaggatgagcctgccctgttcgtggccctgaccttcgagcggcgggaggtcctggactcctccaatatcaaaccaatgaacctgatcggcgtggcaagaggcgaaaacatccccgccgtgatcgccctgaccgaccccgagggctgcccactgagccggtttaaggatagcctgggaaacccaacccacatcctgagaatcggcgagagctataaggagaagcagcggaccatccaggccaagaaggaggtggagcagcggagagccggcggctacagccggaagtacgccagcaaagccaagaatctggcagacgatatggtgagaaacaccgctagagatctgctgtactacgccgtgacccaggatgccatgctgatcttcgccaacctgagccggggcttcggccggcagggcaagcggaccttcatggccgagagacagtacacacggatggaggactggctgaccgccaagctggcctacgagggcctgagcaagacctacctgtccaagacactggcccagtacacctccaagacatgcagcaactgtgggtttaccatcaccagcgccgactacgacagggtgctggagaagctgaagaagacagcaacaggctggatgaccacaattaacggcaaggagctgaaggtggagggccagattacctactacaacagatacaagagacagaacgtagtcaaggacctgtccgtcgagctggatagactgagcgaagaatctgtgaacaacgacatctcctcctggacaaagggcagaagcggagaagctctgagcctcctgaagaaaagattctcccatagacccgtgcaggagaagttcgtgtgcctgaactgcggcttcgagacacacgcagccgagcaagccgccctgaacatcgccagatcctggctgttcctgcggagccaggagtacaagaaataccagacaaacaagacaaccggcaacaccgataagagagccttcgtcgagacctggcagtccttttaccggaagaagcttaaggaggtgtggaaacctgccgtgcggtctggcggatctggcggaggctcctttccaggagaccgtgaccttcaaggacgtggccgtggtgttcagcgaggaggagctgggcctgctggacagcacccagaggaagctgtacagggacgtgatgctggagaacttcaggaacctggtgagcgtgggccacagcagcagcaagcccgacatgatcagccagctggagagggaggagaagctgtgcatgaaggagatccacaccgagaggggcaggcacagcggcggcaggaaccagggatctggctccggcagcggccccaagaaaaagagaaaagtctaagctgccttctgcggggcttgccttctggccatgcccttcttctctcccttgcacctgtacctcttggtctttgaataaagcctgagtaggaaggctagcaaaaaaaaaaaaaaaaaaaaaaaaaaaaaaaaaaaaaaaaaaaaaaaaaaaaaaaaaaaaaaaaaaaaaaaaaaaaaaaa

SEQ ID NO: 15856 - RNA, 9485 nt, synthetic construct
  source 1..9485: mol_type = other RNA
aggaaataagagagaaaagaagagtaagaagaaatataagagccaccatggcccctaagaagaagcgtaaagtgagccggatggaacgcctcgtctacgaggtgcggcagaagtgcagaaacatcgaggacatctgcatctcctgcggatctctgaacgtgaccctggagcacccactgttcatcggcggcatgtgccagaactgtaaaaactgttttctggagtgtgcctatcaatacgacgatgacggctaccagagctactgcaccatctgttgcggcggaagagaggtgctgatgtgtggaaataacaactgctgccggtgcttctgcgtggaatgcgtggacctgctggtgggccccggcgccgcccaggccgctattaaggaagatccttggaactgctacatgtgcggccacaagggcacatacggcctgctgagacggagagaggactggcctagcagactgcagatgttcttcgccaataaccacgaccaggagttcgacccccctaaggtgtaccctcccgtccccgccgagaagagaaagcccatccgggtcctgagcctgttcgatggcatcgccaccggtctgctggtgctgaaggacctgggcatccaggtggataggtacattgcctccgaggtgtgcgaggactccatcaccgtgggaatggtgcgtcatcagggcaagatcatgtacgtgggcgacgtgcggagcgtgacacagaagcatatccaggagtggggccctttcgacctggtgatcggcggcagcccttgcaatgacctgagcatcgtgaacccagcccggaagggcctgtacgagggaaccggcagactgttcttcgagttttacagactgctgcacgacgcccggcctaaggaaggcgacgaccggcccttcttttggctgttcgagaatgtggtggccatgggagtcagcgacaagcgggatattagccggttcctggagagcaaccccgtgatgatcgatgccaaggaagtgagcgccgcccaccgggccagatacttctggggcaatctgcctggcatgaacagacccctggccagcaccgtgaacgacaagctggagctgcaggagtgcctggagcacggccggatcgccaagttcagcaaggtgagaaccatcaccacccgaagcaacagcatcaaacaaggcaaggaccagcactttcctgtgttcatgaacgagaaggaggacatcctgtggtgtaccgagatggagagagtgttcgggttcccagtccactacacagatgtcagcaacatgtctagactggccagacagagactgctgggaagaagctggtccgtccctgtgatcagacacctgttcgcccctctgaaggagtacttcgcctgcgtgagcagcggcaacagcaacgccaacagccggggccccagcttctctagcggcctggtgccactgtccctgagagggagccacatgggccccatggagatctacaaaaccgtgagcgcctggaagcggcagcctgtgcgcgtgctgagcctgtttcggaatatcgataaagtcctgaaaagcctgggattcctggagagcggctctggctccggcggtggcaccctgaagtacgtggaggatgtgacaaacgtggtcagacgggatgtggagaagtggggccccttcgatctggtgtacggcagcacccaacccctgggcagctcttgtgaccggtgccctggctggtacatgtttcagttccaccggatcctgcagtacgccctgccgagacaggagtcccagcggccattcttttggattttcatggacaacttgctgctgaccgaggatgaccaggaaactaccactcggttcctgcagaccgaagccgtgaccctgcaggacgtgagaggccgggactaccagaacgccatgcgggtgtggtccaacatccctggactgaaaagcaagcacgcacctctgacccctaaagaagaggagtacctgcaggcccaggtgcggagcagaagcaagctggacgcccctaaggtggatctgctggtgaagaattgcctcctgcccctgagagagtacttcaagtatttcagccagaatagtctgcccctgggaggcagcggcggcggcgccctggtgacatttgaggacgtcgccgtgcggttcacccaggaggaatgggctctgctggatccttctcagaaaatcctgtaccgggacgtgatgagagagacataccggaatctgacctccgtgggcatcaactgggaatgttgggaccttgaagcctgcttcagaagcctgggaagaaacctgagagtgcaggtggtgaagagaaagtgcgagctgaccaacagcggcccctgcgccgagggcggcccaagcagcggcgcccctcctcccagcggcggcagcccagccggctccccaacctctaccgaggagggcacctctgagtccgccacccccgagagcggccctggcacctccaccgagcccagcgagggcagcgcacccggcagccctgccggcagccccacctccacagaggagggaaccagcaccgagcccagcgaaggcagcgccccaggcaccagcaccgagcctagtgagcaggagattaaacggatcaacaagatcagaagaagacttgtgaaagacagcaacaccaagaaggccggcaagacaggccccatgaaaaccctgctggttagagtgatgacacccgatctgagagagcggctggaaaacctgagaaagaagcctgaaaatatcccccagcccatcagcaatacatctagagccaacctgaataagctgctgaccgattacaccgaaatgaagaaggcgatcctgcatgtgtactgggaagagttccagaaggaccctgtgggcctgatgagccgggtggcccagcctgccagcaagaagatcgatcagaacaagctgaaacctgagatggacgagaagggcaacctgaccaccgccggctttgcctgctctcagtgtggccagcccctgttcgtgtacaagctggagcaggtgtctgagaagggcaaggcttacaccaactacttcggacggtgcaatgtggccgagcacgaaaagctgatcctgctggcccagctgaagcccgagaaggatagcgacgaagccgtgacatatagcctgggaaagtttgggcagagggccctggatttctacagcattcatgtgaccaaggagtccacccaccccgtgaagcccctggcccagatcgccggaaacagatacgcctccggacctgtgggaaaggccctgagcgacgcatgtatgggcacaatcgcctccttcctgtctaagtaccaggacatcatcatcgaacaccagaaggtggtgaagggcaaccagaagagactggagagcctgcgggagctggccggcaaggaaaacctggaataccctagcgtgaccctgccacctcagcctcacaccaaggagggcgttgatgcctacaacgaagtgatcgcccgggtgcgaatgtgggtgaacctgaacctgtggcagaagctgaagctaagcagagatgatgccaagcctctgctgagactgaagggattcccttcctttcctctggtcgagagacaggccaacgaagtggactggtgggacatggtgtgtaacgtgaagaagctgatcaacgagaaaaaggaggatggcaaggtgttttggcagaatctggctggctacaagagacaggaagccctgagaccatacctgagcagcgaggaagatcggaagaagggaaagaaattcgctcggtaccagctgggcgacctgctgctgcacctggaaaagaagcacggcgaggactggggaaaggtgtacgacgaggcctgggagcggattgacaagaaagtggaaggcctgagcaagcacatcaagctggaagaggaacggagaagcgaggacgcccagagcaaggccgccctgaccgactggctgcgggctaaggccagcttcgtgatcgagggcctgaaggaggccgacaaggacgagttctgcagatgcgagctgaagctgcagaagtggtacggggacctgcggggaaagcccttcgccatcgaagccgagaacagcatcctggacatcagcggcttcagcaagcagtacaactgtgccttcatctggcagaaggacggcgtgaagaagctgaacctgtacctgatcatcaactacttcaagggcggcaagctgcggttcaagaagatcaaacctgaagccttcgaagccaacagattctacaccgtgatcaacaaaaagagcggcgagatcgtgcccatggaggtgaacttcaacttcgacgaccccaacctgatcatcctgcctctggcctttggcaagagacagggcagagaattcatctggaacgacctgctgtccctggaaaccggcagcctgaagctggccaacggaagagtgatcgagaagacactgtacaacagaagaacccggcaggatgagcctgccctgttcgtggccctgaccttcgagcggcgggaggtcctggactcctccaatatcaaaccaatgaacctgatcggcgtggcaagaggcgaaaacatccccgccgtgatcgccctgaccgaccccgagggctgcccactgagccggtttaaggatagcctgggaaacccaacccacatcctgagaatcggcgagagctataaggagaagcagcggaccatccaggccaagaaggaggtggagcagcggagagccggcggctacagccggaagtacgccagcaaagccaagaatctggcagacgatatggtgagaaacaccgctagagatctgctgtactacgccgtgacccaggatgccatgctgatcttcgccaacctgagccggggcttcggccggcagggcaagcggaccttcatggccgagagacagtacacacggatggaggactggctgaccgccaagctggcctacgagggcctgagcaagacctacctgtccaagacactggcccagtacacctccaagacatgcagcaactgtgggtttaccatcaccagcgccgactacgacagggtgctggagaagctgaagaagacagcaacaggctggatgaccacaattaacggcaaggagctgaaggtggagggccagattacctactacaacagatacaagagacagaacgtagtcaaggacctgtccgtcgagctggatagactgagcgaagaatctgtgaacaacgacatctcctcctggacaaagggcagaagcggagaagctctgagcctcctgaagaaaagattctcccatagacccgtgcaggagaagttcgtgtgcctgaactgcggcttcgagacacacgcagccgagcaagccgccctgaacatcgccagatcctggctgttcctgcggagccaggagtacaagaaataccagacaaacaagacaaccggcaacaccgataagagagccttcgtcgagacctggcagtccttttaccggaagaagcttaaggaggtgtggaaacctgccgtgcggtctggcggatctggcggaggctcctaccagatccccgtgagcttcaaggacgtggtggtgggcttcacccaggaggagtggcacaggctgagccccgcccagagggccctgtacagggacgtgatgctggagacctacagcaacctggtgagcgtgggctacgagggcaccaagcccgacgtgatcctgaggctggagcaggaggaggccccctggatcggcgaggccgcctgccccggctgccactgctgggaggacatctggaggggcggcccaagcagcggcgcccctcctcccagcggcggcagcccagccggctccccaacctctaccgaggagggcacctctgagtccgccacccccgagagcggccctggcacctccaccgagcccagcgagggcagcgcacccggcagccctgccggcagccccacctccacagaggagggaaccagcaccgagcccagcgaaggcagcgccccaggcaccagcaccgagcctagtgagcaggagattaaacggatcaacaagatcagaagaagacttgtgaaagacagcaacaccaagaaggccggcaagacaggccccatgaaaaccctgctggttagagtgatgacacccgatctgagagagcggctggaaaacctgagaaagaagcctgaaaatatcccccagcccatcagcaatacatctagagccaacctgaataagctgctgaccgattacaccgaaatgaagaaggcgatcctgcatgtgtactgggaagagttccagaaggaccctgtgggcctgatgagccgggtggcccagcctgccagcaagaagatcgatcagaacaagctgaaacctgagatggacgagaagggcaacctgaccaccgccggctttgcctgctctcagtgtggccagcccctgttcgtgtacaagctggagcaggtgtctgagaagggcaaggcttacaccaactacttcggacggtgcaatgtggccgagcacgaaaagctgatcctgctggcccagctgaagcccgagaaggatagcgacgaagccgtgacatatagcctgggaaagtttgggcagagggccctggatttctacagcattcatgtgaccaaggagtccacccaccccgtgaagcccctggcccagatcgccggaaacagatacgcctccggacctgtgggaaaggccctgagcgacgcatgtatgggcacaatcgcctccttcctgtctaagtaccaggacatcatcatcgaacaccagaaggtggtgaagggcaaccagaagagactggagagcctgcgggagctggccggcaaggaaaacctggaataccctagcgtgaccctgccacctcagcctcacaccaaggagggcgttgatgcctacaacgaagtgatcgcccgggtgcgaatgtgggtgaacctgaacctgtggcagaagctgaagctaagcagagatgatgccaagcctctgctgagactgaagggattcccttcctttcctctggtcgagagacaggccaacgaagtggactggtgggacatggtgtgtaacgtgaagaagctgatcaacgagaaaaaggaggatggcaaggtgttttggcagaatctggctggctacaagagacaggaagccctgagaccatacctgagcagcgaggaagatcggaagaagggaaagaaattcgctcggtaccagctgggcgacctgctgctgcacctggaaaagaagcacggcgaggactggggaaaggtgtacgacgaggcctgggagcggattgacaagaaagtggaaggcctgagcaagcacatcaagctggaagaggaacggagaagcgaggacgcccagagcaaggccgccctgaccgactggctgcgggctaaggccagcttcgtgatcgagggcctgaaggaggccgacaaggacgagttctgcagatgcgagctgaagctgcagaagtggtacggggacctgcggggaaagcccttcgccatcgaagccgagaacagcatcctggacatcagcggcttcagcaagcagtacaactgtgccttcatctggcagaaggacggcgtgaagaagctgaacctgtacctgatcatcaactacttcaagggcggcaagctgcggttcaagaagatcaaacctgaagccttcgaagccaacagattctacaccgtgatcaacaaaaagagcggcgagatcgtgcccatggaggtgaacttcaacttcgacgaccccaacctgatcatcctgcctctggcctttggcaagagacagggcagagaattcatctggaacgacctgctgtccctggaaaccggcagcctgaagctggccaacggaagagtgatcgagaagacactgtacaacagaagaacccggcaggatgagcctgccctgttcgtggccctgaccttcgagcggcgggaggtcctggactcctccaatatcaaaccaatgaacctgatcggcgtggcaagaggcgaaaacatccccgccgtgatcgccctgaccgaccccgagggctgcccactgagccggtttaaggatagcctgggaaacccaacccacatcctgagaatcggcgagagctataaggagaagcagcggaccatccaggccaagaaggaggtggagcagcggagagccggcggctacagccggaagtacgccagcaaagccaagaatctggcagacgatatggtgagaaacaccgctagagatctgctgtactacgccgtgacccaggatgccatgctgatcttcgccaacctgagccggggcttcggccggcagggcaagcggaccttcatggccgagagacagtacacacggatggaggactggctgaccgccaagctggcctacgagggcctgagcaagacctacctgtccaagacactggcccagtacacctccaagacatgcagcaactgtgggtttaccatcaccagcgccgactacgacagggtgctggagaagctgaagaagacagcaacaggctggatgaccacaattaacggcaaggagctgaaggtggagggccagattacctactacaacagatacaagagacagaacgtagtcaaggacctgtccgtcgagctggatagactgagcgaagaatctgtgaacaacgacatctcctcctggacaaagggcagaagcggagaagctctgagcctcctgaagaaaagattctcccatagacccgtgcaggagaagttcgtgtgcctgaactgcggcttcgagacacacgcagccgagcaagccgccctgaacatcgccagatcctggctgttcctgcggagccaggagtacaagaaataccagacaaacaagacaaccggcaacaccgataagagagccttcgtcgagacctggcagtccttttaccggaagaagcttaaggaggtgtggaaacctgccgtgcggtctggcggatctggcggaggctccttaccagatccccgtgagcttcaaggacgtggtggtgggcttcacccaggaggagtggcacaggctgagccccgcccagagggccctgtacagggacgtgatgctggagacctacagcaacctggtgagcgtgggctacgagggcaccaagcccgacgtgatcctgaggctggagcaggaggaggccccctggatcggcgaggccgcctgccccggctgccactgctgggaggacatctggaggggatctggctccggcagcggccccaagaaaaagagaaaagtctaagctgccttctgcggggcttgccttctggccatgcccttcttctctcccttgcacctgtacctcttggtctttgaataaagcctgagtaggaaggctagcaaaaaaaaaaaaaaaaaaaaaaaaaaaaaaaaaaaaaaaaaaaaaaaaaaaaaaaaaaaaaaaaaaaaaaaaaaaaaaaa

SEQ ID NO: 15857 - RNA, 9485 nt, synthetic construct
  source 1..9485: mol_type = other RNA
aggaaataagagagaaaagaagagtaagaagaaatataagagccaccatggcccctaagaagaagcgtaaagtgagccggatggaacgcctcgtctacgaggtgcggcagaagtgcagaaacatcgaggacatctgcatctcctgcggatctctgaacgtgaccctggagcacccactgttcatcggcggcatgtgccagaactgtaaaaactgttttctggagtgtgcctatcaatacgacgatgacggctaccagagctactgcaccatctgttgcggcggaagagaggtgctgatgtgtggaaataacaactgctgccggtgcttctgcgtggaatgcgtggacctgctggtgggccccggcgccgcccaggccgctattaaggaagatccttggaactgctacatgtgcggccacaagggcacatacggcctgctgagacggagagaggactggcctagcagactgcagatgttcttcgccaataaccacgaccaggagttcgacccccctaaggtgtaccctcccgtccccgccgagaagagaaagcccatccgggtcctgagcctgttcgatggcatcgccaccggtctgctggtgctgaaggacctgggcatccaggtggataggtacattgcctccgaggtgtgcgaggactccatcaccgtgggaatggtgcgtcatcagggcaagatcatgtacgtgggcgacgtgcggagcgtgacacagaagcatatccaggagtggggccctttcgacctggtgatcggcggcagcccttgcaatgacctgagcatcgtgaacccagcccggaagggcctgtacgagggaaccggcagactgttcttcgagttttacagactgctgcacgacgcccggcctaaggaaggcgacgaccggcccttcttttggctgttcgagaatgtggtggccatgggagtcagcgacaagcgggatattagccggttcctggagagcaaccccgtgatgatcgatgccaaggaagtgagcgccgcccaccgggccagatacttctggggcaatctgcctggcatgaacagacccctggccagcaccgtgaacgacaagctggagctgcaggagtgcctggagcacggccggatcgccaagttcagcaaggtgagaaccatcaccacccgaagcaacagcatcaaacaaggcaaggaccagcactttcctgtgttcatgaacgagaaggaggacatcctgtggtgtaccgagatggagagagtgttcgggttcccagtccactacacagatgtcagcaacatgtctagactggccagacagagactgctgggaagaagctggtccgtccctgtgatcagacacctgttcgcccctctgaaggagtacttcgcctgcgtgagcagcggcaacagcaacgccaacagccggggccccagcttctctagcggcctggtgccactgtccctgagagggagccacatgggccccatggagatctacaaaaccgtgagcgcctggaagcggcagcctgtgcgcgtgctgagcctgtttcggaatatcgataaagtcctgaaaagcctgggattcctggagagcggctctggctccggcggtggcaccctgaagtacgtggaggatgtgacaaacgtggtcagacgggatgtggagaagtggggccccttcgatctggtgtacggcagcacccaacccctgggcagctcttgtgaccggtgccctggctggtacatgtttcagttccaccggatcctgcagtacgccctgccgagacaggagtcccagcggccattcttttggattttcatggacaacttgctgctgaccgaggatgaccaggaaactaccactcggttcctgcagaccgaagccgtgaccctgcaggacgtgagaggccgggactaccagaacgccatgcgggtgtggtccaacatccctggactgaaaagcaagcacgcacctctgacccctaaagaagaggagtacctgcaggcccaggtgcggagcagaagcaagctggacgcccctaaggtggatctgctggtgaagaattgcctcctgcccctgagagagtacttcaagtatttcagccagaatagtctgcccctgggaggcagcggcggcggcgccctggtgacatttgaggacgtcgccgtgcggttcacccaggaggaatgggctctgctggatccttctcagaaaatcctgtaccgggacgtgatgagagagacataccggaatctgacctccgtgggcatcaactgggaatgttgggaccttgaagcctgcttcagaagcctgggaagaaacctgagagtgcaggtggtgaagagaaagtgcgagctgaccaacagcggcccctgcgccgagggcggcccaagcagcggcgcccctcctcccagcggcggcagcccagccggctccccaacctctaccgaggagggcacctctgagtccgccacccccgagagcggccctggcacctccaccgagcccagcgagggcagcgcacccggcagccctgccggcagccccacctccacagaggagggaaccagcaccgagcccagcgaaggcagcgccccaggcaccagcaccgagcctagtgagcaggagattaaacggatcaacaagatcagaagaagacttgtgaaagacagcaacaccaagaaggccggcaagacaggccccatgaaaaccctgctggttagagtgatgacacccgatctgagagagcggctggaaaacctgagaaagaagcctgaaaatatcccccagcccatcagcaatacatctagagccaacctgaataagctgctgaccgattacaccgaaatgaagaaggcgatcctgcatgtgtactgggaagagttccagaaggaccctgtgggcctgatgagccgggtggcccagcctgccagcaagaagatcgatcagaacaagctgaaacctgagatggacgagaagggcaacctgaccaccgccggctttgcctgctctcagtgtggccagcccctgttcgtgtacaagctggagcaggtgtctgagaagggcaaggcttacaccaactacttcggacggtgcaatgtggccgagcacgaaaagctgatcctgctggcccagctgaagcccgagaaggatagcgacgaagccgtgacatatagcctgggaaagtttgggcagagggccctggatttctacagcattcatgtgaccaaggagtccacccaccccgtgaagcccctggcccagatcgccggaaacagatacgcctccggacctgtgggaaaggccctgagcgacgcatgtatgggcacaatcgcctccttcctgtctaagtaccaggacatcatcatcgaacaccagaaggtggtgaagggcaaccagaagagactggagagcctgcgggagctggccggcaaggaaaacctggaataccctagcgtgaccctgccacctcagcctcacaccaaggagggcgttgatgcctacaacgaagtgatcgcccgggtgcgaatgtgggtgaacctgaacctgtggcagaagctgaagctaagcagagatgatgccaagcctctgctgagactgaagggattcccttcctttcctctggtcgagagacaggccaacgaagtggactggtgggacatggtgtgtaacgtgaagaagctgatcaacgagaaaaaggaggatggcaaggtgttttggcagaatctggctggctacaagagacaggaagccctgagaccatacctgagcagcgaggaagatcggaagaagggaaagaaattcgctcggtaccagctgggcgacctgctgctgcacctggaaaagaagcacggcgaggactggggaaaggtgtacgacgaggcctgggagcggattgacaagaaagtggaaggcctgagcaagcacatcaagctggaagaggaacggagaagcgaggacgcccagagcaaggccgccctgaccgactggctgcgggctaaggccagcttcgtgatcgagggcctgaaggaggccgacaaggacgagttctgcagatgcgagctgaagctgcagaagtggtacggggacctgcggggaaagcccttcgccatcgaagccgagaacagcatcctggacatcagcggcttcagcaagcagtacaactgtgccttcatctggcagaaggacggcgtgaagaagctgaacctgtacctgatcatcaactacttcaagggcggcaagctgcggttcaagaagatcaaacctgaagccttcgaagccaacagattctacaccgtgatcaacaaaaagagcggcgagatcgtgcccatggaggtgaacttcaacttcgacgaccccaacctgatcatcctgcctctggcctttggcaagagacagggcagagaattcatctggaacgacctgctgtccctggaaaccggcagcctgaagctggccaacggaagagtgatcgagaagacactgtacaacagaagaacccggcaggatgagcctgccctgttcgtggccctgaccttcgagcggcgggaggtcctggactcctccaatatcaaaccaatgaacctgatcggcgtggcaagaggcgaaaacatccccgccgtgatcgccctgaccgaccccgagggctgcccactgagccggtttaaggatagcctgggaaacccaacccacatcctgagaatcggcgagagctataaggagaagcagcggaccatccaggccaagaaggaggtggagcagcggagagccggcggctacagccggaagtacgccagcaaagccaagaatctggcagacgatatggtgagaaacaccgctagagatctgctgtactacgccgtgacccaggatgccatgctgatcttcgccaacctgagccggggcttcggccggcagggcaagcggaccttcatggccgagagacagtacacacggatggaggactggctgaccgccaagctggcctacgagggcctgagcaagacctacctgtccaagacactggcccagtacacctccaagacatgcagcaactgtgggtttaccatcaccagcgccgactacgacagggtgctggagaagctgaagaagacagcaacaggctggatgaccacaattaacggcaaggagctgaaggtggagggccagattacctactacaacagatacaagagacagaacgtagtcaaggacctgtccgtcgagctggatagactgagcgaagaatctgtgaacaacgacatctcctcctggacaaagggcagaagcggagaagctctgagcctcctgaagaaaagattctcccatagacccgtgcaggagaagttcgtgtgcctgaactgcggcttcgagacacacgcagccgagcaagccgccctgaacatcgccagatcctggctgttcctgcggagccaggagtacaagaaataccagacaaacaagacaaccggcaacaccgataagagagccttcgtcgagacctggcagtccttttaccggaagaagcttaaggaggtgtggaaacctgccgtgcggtctggcggatctggcggaggctccagccagagcctggtgaccttcggcgacgtggccgtggacttcagcagggaggagtgggagtggctgagcagcgcccagaggaccctgtacaggaccgtgatgctggagaactacaggaacctggtgagcctgggcctgtgcatcagcaagcccgacatgatcagcagcctggagcagaggaaggagccctggatggccaagaggaagctgaccaggggcaggtgccccgacctgaagatcgtgggcggcccaagcagcggcgcccctcctcccagcggcggcagcccagccggctccccaacctctaccgaggagggcacctctgagtccgccacccccgagagcggccctggcacctccaccgagcccagcgagggcagcgcacccggcagccctgccggcagccccacctccacagaggagggaaccagcaccgagcccagcgaaggcagcgccccaggcaccagcaccgagcctagtgagcaggagattaaacggatcaacaagatcagaagaagacttgtgaaagacagcaacaccaagaaggccggcaagacaggccccatgaaaaccctgctggttagagtgatgacacccgatctgagagagcggctggaaaacctgagaaagaagcctgaaaatatcccccagcccatcagcaatacatctagagccaacctgaataagctgctgaccgattacaccgaaatgaagaaggcgatcctgcatgtgtactgggaagagttccagaaggaccctgtgggcctgatgagccgggtggcccagcctgccagcaagaagatcgatcagaacaagctgaaacctgagatggacgagaagggcaacctgaccaccgccggctttgcctgctctcagtgtggccagcccctgttcgtgtacaagctggagcaggtgtctgagaagggcaaggcttacaccaactacttcggacggtgcaatgtggccgagcacgaaaagctgatcctgctggcccagctgaagcccgagaaggatagcgacgaagccgtgacatatagcctgggaaagtttgggcagagggccctggatttctacagcattcatgtgaccaaggagtccacccaccccgtgaagcccctggcccagatcgccggaaacagatacgcctccggacctgtgggaaaggccctgagcgacgcatgtatgggcacaatcgcctccttcctgtctaagtaccaggacatcatcatcgaacaccagaaggtggtgaagggcaaccagaagagactggagagcctgcgggagctggccggcaaggaaaacctggaataccctagcgtgaccctgccacctcagcctcacaccaaggagggcgttgatgcctacaacgaagtgatcgcccgggtgcgaatgtgggtgaacctgaacctgtggcagaagctgaagctaagcagagatgatgccaagcctctgctgagactgaagggattcccttcctttcctctggtcgagagacaggccaacgaagtggactggtgggacatggtgtgtaacgtgaagaagctgatcaacgagaaaaaggaggatggcaaggtgttttggcagaatctggctggctacaagagacaggaagccctgagaccatacctgagcagcgaggaagatcggaagaagggaaagaaattcgctcggtaccagctgggcgacctgctgctgcacctggaaaagaagcacggcgaggactggggaaaggtgtacgacgaggcctgggagcggattgacaagaaagtggaaggcctgagcaagcacatcaagctggaagaggaacggagaagcgaggacgcccagagcaaggccgccctgaccgactggctgcgggctaaggccagcttcgtgatcgagggcctgaaggaggccgacaaggacgagttctgcagatgcgagctgaagctgcagaagtggtacggggacctgcggggaaagcccttcgccatcgaagccgagaacagcatcctggacatcagcggcttcagcaagcagtacaactgtgccttcatctggcagaaggacggcgtgaagaagctgaacctgtacctgatcatcaactacttcaagggcggcaagctgcggttcaagaagatcaaacctgaagccttcgaagccaacagattctacaccgtgatcaacaaaaagagcggcgagatcgtgcccatggaggtgaacttcaacttcgacgaccccaacctgatcatcctgcctctggcctttggcaagagacagggcagagaattcatctggaacgacctgctgtccctggaaaccggcagcctgaagctggccaacggaagagtgatcgagaagacactgtacaacagaagaacccggcaggatgagcctgccctgttcgtggccctgaccttcgagcggcgggaggtcctggactcctccaatatcaaaccaatgaacctgatcggcgtggcaagaggcgaaaacatccccgccgtgatcgccctgaccgaccccgagggctgcccactgagccggtttaaggatagcctgggaaacccaacccacatcctgagaatcggcgagagctataaggagaagcagcggaccatccaggccaagaaggaggtggagcagcggagagccggcggctacagccggaagtacgccagcaaagccaagaatctggcagacgatatggtgagaaacaccgctagagatctgctgtactacgccgtgacccaggatgccatgctgatcttcgccaacctgagccggggcttcggccggcagggcaagcggaccttcatggccgagagacagtacacacggatggaggactggctgaccgccaagctggcctacgagggcctgagcaagacctacctgtccaagacactggcccagtacacctccaagacatgcagcaactgtgggtttaccatcaccagcgccgactacgacagggtgctggagaagctgaagaagacagcaacaggctggatgaccacaattaacggcaaggagctgaaggtggagggccagattacctactacaacagatacaagagacagaacgtagtcaaggacctgtccgtcgagctggatagactgagcgaagaatctgtgaacaacgacatctcctcctggacaaagggcagaagcggagaagctctgagcctcctgaagaaaagattctcccatagacccgtgcaggagaagttcgtgtgcctgaactgcggcttcgagacacacgcagccgagcaagccgccctgaacatcgccagatcctggctgttcctgcggagccaggagtacaagaaataccagacaaacaagacaaccggcaacaccgataagagagccttcgtcgagacctggcagtccttttaccggaagaagcttaaggaggtgtggaaacctgccgtgcggtctggcggatctggcggaggctcctagccagagcctggtgaccttcggcgacgtggccgtggacttcagcagggaggagtgggagtggctgagcagcgcccagaggaccctgtacaggaccgtgatgctggagaactacaggaacctggtgagcctgggcctgtgcatcagcaagcccgacatgatcagcagcctggagcagaggaaggagccctggatggccaagaggaagctgaccaggggcaggtgccccgacctgaagatcgtgggatctggctccggcagcggccccaagaaaaagagaaaagtctaagctgccttctgcggggcttgccttctggccatgcccttcttctctcccttgcacctgtacctcttggtctttgaataaagcctgagtaggaaggctagcaaaaaaaaaaaaaaaaaaaaaaaaaaaaaaaaaaaaaaaaaaaaaaaaaaaaaaaaaaaaaaaaaaaaaaaaaaaaaaaa

SEQ ID NO: 15858 - RNA, 9485 nt, synthetic construct
  source 1..9485: mol_type = other RNA
aggaaataagagagaaaagaagagtaagaagaaatataagagccaccatggcccctaagaagaagcgtaaagtgagccggatggaacgcctcgtctacgaggtgcggcagaagtgcagaaacatcgaggacatctgcatctcctgcggatctctgaacgtgaccctggagcacccactgttcatcggcggcatgtgccagaactgtaaaaactgttttctggagtgtgcctatcaatacgacgatgacggctaccagagctactgcaccatctgttgcggcggaagagaggtgctgatgtgtggaaataacaactgctgccggtgcttctgcgtggaatgcgtggacctgctggtgggccccggcgccgcccaggccgctattaaggaagatccttggaactgctacatgtgcggccacaagggcacatacggcctgctgagacggagagaggactggcctagcagactgcagatgttcttcgccaataaccacgaccaggagttcgacccccctaaggtgtaccctcccgtccccgccgagaagagaaagcccatccgggtcctgagcctgttcgatggcatcgccaccggtctgctggtgctgaaggacctgggcatccaggtggataggtacattgcctccgaggtgtgcgaggactccatcaccgtgggaatggtgcgtcatcagggcaagatcatgtacgtgggcgacgtgcggagcgtgacacagaagcatatccaggagtggggccctttcgacctggtgatcggcggcagcccttgcaatgacctgagcatcgtgaacccagcccggaagggcctgtacgagggaaccggcagactgttcttcgagttttacagactgctgcacgacgcccggcctaaggaaggcgacgaccggcccttcttttggctgttcgagaatgtggtggccatgggagtcagcgacaagcgggatattagccggttcctggagagcaaccccgtgatgatcgatgccaaggaagtgagcgccgcccaccgggccagatacttctggggcaatctgcctggcatgaacagacccctggccagcaccgtgaacgacaagctggagctgcaggagtgcctggagcacggccggatcgccaagttcagcaaggtgagaaccatcaccacccgaagcaacagcatcaaacaaggcaaggaccagcactttcctgtgttcatgaacgagaaggaggacatcctgtggtgtaccgagatggagagagtgttcgggttcccagtccactacacagatgtcagcaacatgtctagactggccagacagagactgctgggaagaagctggtccgtccctgtgatcagacacctgttcgcccctctgaaggagtacttcgcctgcgtgagcagcggcaacagcaacgccaacagccggggccccagcttctctagcggcctggtgccactgtccctgagagggagccacatgggccccatggagatctacaaaaccgtgagcgcctggaagcggcagcctgtgcgcgtgctgagcctgtttcggaatatcgataaagtcctgaaaagcctgggattcctggagagcggctctggctccggcggtggcaccctgaagtacgtggaggatgtgacaaacgtggtcagacgggatgtggagaagtggggccccttcgatctggtgtacggcagcacccaacccctgggcagctcttgtgaccggtgccctggctggtacatgtttcagttccaccggatcctgcagtacgccctgccgagacaggagtcccagcggccattcttttggattttcatggacaacttgctgctgaccgaggatgaccaggaaactaccactcggttcctgcagaccgaagccgtgaccctgcaggacgtgagaggccgggactaccagaacgccatgcgggtgtggtccaacatccctggactgaaaagcaagcacgcacctctgacccctaaagaagaggagtacctgcaggcccaggtgcggagcagaagcaagctggacgcccctaaggtggatctgctggtgaagaattgcctcctgcccctgagagagtacttcaagtatttcagccagaatagtctgcccctgggaggcagcggcggcggcgccctggtgacatttgaggacgtcgccgtgcggttcacccaggaggaatgggctctgctggatccttctcagaaaatcctgtaccgggacgtgatgagagagacataccggaatctgacctccgtgggcatcaactgggaatgttgggaccttgaagcctgcttcagaagcctgggaagaaacctgagagtgcaggtggtgaagagaaagtgcgagctgaccaacagcggcccctgcgccgagggcggcccaagcagcggcgcccctcctcccagcggcggcagcccagccggctccccaacctctaccgaggagggcacctctgagtccgccacccccgagagcggccctggcacctccaccgagcccagcgagggcagcgcacccggcagccctgccggcagccccacctccacagaggagggaaccagcaccgagcccagcgaaggcagcgccccaggcaccagcaccgagcctagtgagcaggagattaaacggatcaacaagatcagaagaagacttgtgaaagacagcaacaccaagaaggccggcaagacaggccccatgaaaaccctgctggttagagtgatgacacccgatctgagagagcggctggaaaacctgagaaagaagcctgaaaatatcccccagcccatcagcaatacatctagagccaacctgaataagctgctgaccgattacaccgaaatgaagaaggcgatcctgcatgtgtactgggaagagttccagaaggaccctgtgggcctgatgagccgggtggcccagcctgccagcaagaagatcgatcagaacaagctgaaacctgagatggacgagaagggcaacctgaccaccgccggctttgcctgctctcagtgtggccagcccctgttcgtgtacaagctggagcaggtgtctgagaagggcaaggcttacaccaactacttcggacggtgcaatgtggccgagcacgaaaagctgatcctgctggcccagctgaagcccgagaaggatagcgacgaagccgtgacatatagcctgggaaagtttgggcagagggccctggatttctacagcattcatgtgaccaaggagtccacccaccccgtgaagcccctggcccagatcgccggaaacagatacgcctccggacctgtgggaaaggccctgagcgacgcatgtatgggcacaatcgcctccttcctgtctaagtaccaggacatcatcatcgaacaccagaaggtggtgaagggcaaccagaagagactggagagcctgcgggagctggccggcaaggaaaacctggaataccctagcgtgaccctgccacctcagcctcacaccaaggagggcgttgatgcctacaacgaagtgatcgcccgggtgcgaatgtgggtgaacctgaacctgtggcagaagctgaagctaagcagagatgatgccaagcctctgctgagactgaagggattcccttcctttcctctggtcgagagacaggccaacgaagtggactggtgggacatggtgtgtaacgtgaagaagctgatcaacgagaaaaaggaggatggcaaggtgttttggcagaatctggctggctacaagagacaggaagccctgagaccatacctgagcagcgaggaagatcggaagaagggaaagaaattcgctcggtaccagctgggcgacctgctgctgcacctggaaaagaagcacggcgaggactggggaaaggtgtacgacgaggcctgggagcggattgacaagaaagtggaaggcctgagcaagcacatcaagctggaagaggaacggagaagcgaggacgcccagagcaaggccgccctgaccgactggctgcgggctaaggccagcttcgtgatcgagggcctgaaggaggccgacaaggacgagttctgcagatgcgagctgaagctgcagaagtggtacggggacctgcggggaaagcccttcgccatcgaagccgagaacagcatcctggacatcagcggcttcagcaagcagtacaactgtgccttcatctggcagaaggacggcgtgaagaagctgaacctgtacctgatcatcaactacttcaagggcggcaagctgcggttcaagaagatcaaacctgaagccttcgaagccaacagattctacaccgtgatcaacaaaaagagcggcgagatcgtgcccatggaggtgaacttcaacttcgacgaccccaacctgatcatcctgcctctggcctttggcaagagacagggcagagaattcatctggaacgacctgctgtccctggaaaccggcagcctgaagctggccaacggaagagtgatcgagaagacactgtacaacagaagaacccggcaggatgagcctgccctgttcgtggccctgaccttcgagcggcgggaggtcctggactcctccaatatcaaaccaatgaacctgatcggcgtggcaagaggcgaaaacatccccgccgtgatcgccctgaccgaccccgagggctgcccactgagccggtttaaggatagcctgggaaacccaacccacatcctgagaatcggcgagagctataaggagaagcagcggaccatccaggccaagaaggaggtggagcagcggagagccggcggctacagccggaagtacgccagcaaagccaagaatctggcagacgatatggtgagaaacaccgctagagatctgctgtactacgccgtgacccaggatgccatgctgatcttcgccaacctgagccggggcttcggccggcagggcaagcggaccttcatggccgagagacagtacacacggatggaggactggctgaccgccaagctggcctacgagggcctgagcaagacctacctgtccaagacactggcccagtacacctccaagacatgcagcaactgtgggtttaccatcaccagcgccgactacgacagggtgctggagaagctgaagaagacagcaacaggctggatgaccacaattaacggcaaggagctgaaggtggagggccagattacctactacaacagatacaagagacagaacgtagtcaaggacctgtccgtcgagctggatagactgagcgaagaatctgtgaacaacgacatctcctcctggacaaagggcagaagcggagaagctctgagcctcctgaagaaaagattctcccatagacccgtgcaggagaagttcgtgtgcctgaactgcggcttcgagacacacgcagccgagcaagccgccctgaacatcgccagatcctggctgttcctgcggagccaggagtacaagaaataccagacaaacaagacaaccggcaacaccgataagagagccttcgtcgagacctggcagtccttttaccggaagaagcttaaggaggtgtggaaacctgccgtgcggtctggcggatctggcggaggctccatgatgcaggcccaggagagcctgaccctggaggacgtggccgtggacttcacctgggaggagtggcagctgctgagccccgcccagaaggacctgtacagggacgtgatgctggagaactacagcaacctggtgagcgtgggctaccaggccagcaagcccgacgccttcagcaagctggagaggggcgaggagacctgcaccaccgaggacgagatctacagcaggatctgcagcgagatcggcggcccaagcagcggcgcccctcctcccagcggcggcagcccagccggctccccaacctctaccgaggagggcacctctgagtccgccacccccgagagcggccctggcacctccaccgagcccagcgagggcagcgcacccggcagccctgccggcagccccacctccacagaggagggaaccagcaccgagcccagcgaaggcagcgccccaggcaccagcaccgagcctagtgagcaggagattaaacggatcaacaagatcagaagaagacttgtgaaagacagcaacaccaagaaggccggcaagacaggccccatgaaaaccctgctggttagagtgatgacacccgatctgagagagcggctggaaaacctgagaaagaagcctgaaaatatcccccagcccatcagcaatacatctagagccaacctgaataagctgctgaccgattacaccgaaatgaagaaggcgatcctgcatgtgtactgggaagagttccagaaggaccctgtgggcctgatgagccgggtggcccagcctgccagcaagaagatcgatcagaacaagctgaaacctgagatggacgagaagggcaacctgaccaccgccggctttgcctgctctcagtgtggccagcccctgttcgtgtacaagctggagcaggtgtctgagaagggcaaggcttacaccaactacttcggacggtgcaatgtggccgagcacgaaaagctgatcctgctggcccagctgaagcccgagaaggatagcgacgaagccgtgacatatagcctgggaaagtttgggcagagggccctggatttctacagcattcatgtgaccaaggagtccacccaccccgtgaagcccctggcccagatcgccggaaacagatacgcctccggacctgtgggaaaggccctgagcgacgcatgtatgggcacaatcgcctccttcctgtctaagtaccaggacatcatcatcgaacaccagaaggtggtgaagggcaaccagaagagactggagagcctgcgggagctggccggcaaggaaaacctggaataccctagcgtgaccctgccacctcagcctcacaccaaggagggcgttgatgcctacaacgaagtgatcgcccgggtgcgaatgtgggtgaacctgaacctgtggcagaagctgaagctaagcagagatgatgccaagcctctgctgagactgaagggattcccttcctttcctctggtcgagagacaggccaacgaagtggactggtgggacatggtgtgtaacgtgaagaagctgatcaacgagaaaaaggaggatggcaaggtgttttggcagaatctggctggctacaagagacaggaagccctgagaccatacctgagcagcgaggaagatcggaagaagggaaagaaattcgctcggtaccagctgggcgacctgctgctgcacctggaaaagaagcacggcgaggactggggaaaggtgtacgacgaggcctgggagcggattgacaagaaagtggaaggcctgagcaagcacatcaagctggaagaggaacggagaagcgaggacgcccagagcaaggccgccctgaccgactggctgcgggctaaggccagcttcgtgatcgagggcctgaaggaggccgacaaggacgagttctgcagatgcgagctgaagctgcagaagtggtacggggacctgcggggaaagcccttcgccatcgaagccgagaacagcatcctggacatcagcggcttcagcaagcagtacaactgtgccttcatctggcagaaggacggcgtgaagaagctgaacctgtacctgatcatcaactacttcaagggcggcaagctgcggttcaagaagatcaaacctgaagccttcgaagccaacagattctacaccgtgatcaacaaaaagagcggcgagatcgtgcccatggaggtgaacttcaacttcgacgaccccaacctgatcatcctgcctctggcctttggcaagagacagggcagagaattcatctggaacgacctgctgtccctggaaaccggcagcctgaagctggccaacggaagagtgatcgagaagacactgtacaacagaagaacccggcaggatgagcctgccctgttcgtggccctgaccttcgagcggcgggaggtcctggactcctccaatatcaaaccaatgaacctgatcggcgtggcaagaggcgaaaacatccccgccgtgatcgccctgaccgaccccgagggctgcccactgagccggtttaaggatagcctgggaaacccaacccacatcctgagaatcggcgagagctataaggagaagcagcggaccatccaggccaagaaggaggtggagcagcggagagccggcggctacagccggaagtacgccagcaaagccaagaatctggcagacgatatggtgagaaacaccgctagagatctgctgtactacgccgtgacccaggatgccatgctgatcttcgccaacctgagccggggcttcggccggcagggcaagcggaccttcatggccgagagacagtacacacggatggaggactggctgaccgccaagctggcctacgagggcctgagcaagacctacctgtccaagacactggcccagtacacctccaagacatgcagcaactgtgggtttaccatcaccagcgccgactacgacagggtgctggagaagctgaagaagacagcaacaggctggatgaccacaattaacggcaaggagctgaaggtggagggccagattacctactacaacagatacaagagacagaacgtagtcaaggacctgtccgtcgagctggatagactgagcgaagaatctgtgaacaacgacatctcctcctggacaaagggcagaagcggagaagctctgagcctcctgaagaaaagattctcccatagacccgtgcaggagaagttcgtgtgcctgaactgcggcttcgagacacacgcagccgagcaagccgccctgaacatcgccagatcctggctgttcctgcggagccaggagtacaagaaataccagacaaacaagacaaccggcaacaccgataagagagccttcgtcgagacctggcagtccttttaccggaagaagcttaaggaggtgtggaaacctgccgtgcggtctggcggatctggcggaggctcctatgatgcaggcccaggagagcctgaccctggaggacgtggccgtggacttcacctgggaggagtggcagctgctgagccccgcccagaaggacctgtacagggacgtgatgctggagaactacagcaacctggtgagcgtgggctaccaggccagcaagcccgacgccttcagcaagctggagaggggcgaggagacctgcaccaccgaggacgagatctacagcaggatctgcagcgagatcggatctggctccggcagcggccccaagaaaaagagaaaagtctaagctgccttctgcggggcttgccttctggccatgcccttcttctctcccttgcacctgtacctcttggtctttgaataaagcctgagtaggaaggctagcaaaaaaaaaaaaaaaaaaaaaaaaaaaaaaaaaaaaaaaaaaaaaaaaaaaaaaaaaaaaaaaaaaaaaaaaaaaaaaaa

SEQ ID NO: 15859 - RNA, 9485 nt, synthetic construct
  source 1..9485: mol_type = other RNA
aggaaataagagagaaaagaagagtaagaagaaatataagagccaccatggcccctaagaagaagcgtaaagtgagccggatggaacgcctcgtctacgaggtgcggcagaagtgcagaaacatcgaggacatctgcatctcctgcggatctctgaacgtgaccctggagcacccactgttcatcggcggcatgtgccagaactgtaaaaactgttttctggagtgtgcctatcaatacgacgatgacggctaccagagctactgcaccatctgttgcggcggaagagaggtgctgatgtgtggaaataacaactgctgccggtgcttctgcgtggaatgcgtggacctgctggtgggccccggcgccgcccaggccgctattaaggaagatccttggaactgctacatgtgcggccacaagggcacatacggcctgctgagacggagagaggactggcctagcagactgcagatgttcttcgccaataaccacgaccaggagttcgacccccctaaggtgtaccctcccgtccccgccgagaagagaaagcccatccgggtcctgagcctgttcgatggcatcgccaccggtctgctggtgctgaaggacctgggcatccaggtggataggtacattgcctccgaggtgtgcgaggactccatcaccgtgggaatggtgcgtcatcagggcaagatcatgtacgtgggcgacgtgcggagcgtgacacagaagcatatccaggagtggggccctttcgacctggtgatcggcggcagcccttgcaatgacctgagcatcgtgaacccagcccggaagggcctgtacgagggaaccggcagactgttcttcgagttttacagactgctgcacgacgcccggcctaaggaaggcgacgaccggcccttcttttggctgttcgagaatgtggtggccatgggagtcagcgacaagcgggatattagccggttcctggagagcaaccccgtgatgatcgatgccaaggaagtgagcgccgcccaccgggccagatacttctggggcaatctgcctggcatgaacagacccctggccagcaccgtgaacgacaagctggagctgcaggagtgcctggagcacggccggatcgccaagttcagcaaggtgagaaccatcaccacccgaagcaacagcatcaaacaaggcaaggaccagcactttcctgtgttcatgaacgagaaggaggacatcctgtggtgtaccgagatggagagagtgttcgggttcccagtccactacacagatgtcagcaacatgtctagactggccagacagagactgctgggaagaagctggtccgtccctgtgatcagacacctgttcgcccctctgaaggagtacttcgcctgcgtgagcagcggcaacagcaacgccaacagccggggccccagcttctctagcggcctggtgccactgtccctgagagggagccacatgggccccatggagatctacaaaaccgtgagcgcctggaagcggcagcctgtgcgcgtgctgagcctgtttcggaatatcgataaagtcctgaaaagcctgggattcctggagagcggctctggctccggcggtggcaccctgaagtacgtggaggatgtgacaaacgtggtcagacgggatgtggagaagtggggccccttcgatctggtgtacggcagcacccaacccctgggcagctcttgtgaccggtgccctggctggtacatgtttcagttccaccggatcctgcagtacgccctgccgagacaggagtcccagcggccattcttttggattttcatggacaacttgctgctgaccgaggatgaccaggaaactaccactcggttcctgcagaccgaagccgtgaccctgcaggacgtgagaggccgggactaccagaacgccatgcgggtgtggtccaacatccctggactgaaaagcaagcacgcacctctgacccctaaagaagaggagtacctgcaggcccaggtgcggagcagaagcaagctggacgcccctaaggtggatctgctggtgaagaattgcctcctgcccctgagagagtacttcaagtatttcagccagaatagtctgcccctgggaggcagcggcggcggcgccctggtgacatttgaggacgtcgccgtgcggttcacccaggaggaatgggctctgctggatccttctcagaaaatcctgtaccgggacgtgatgagagagacataccggaatctgacctccgtgggcatcaactgggaatgttgggaccttgaagcctgcttcagaagcctgggaagaaacctgagagtgcaggtggtgaagagaaagtgcgagctgaccaacagcggcccctgcgccgagggcggcccaagcagcggcgcccctcctcccagcggcggcagcccagccggctccccaacctctaccgaggagggcacctctgagtccgccacccccgagagcggccctggcacctccaccgagcccagcgagggcagcgcacccggcagccctgccggcagccccacctccacagaggagggaaccagcaccgagcccagcgaaggcagcgccccaggcaccagcaccgagcctagtgagcaggagattaaacggatcaacaagatcagaagaagacttgtgaaagacagcaacaccaagaaggccggcaagacaggccccatgaaaaccctgctggttagagtgatgacacccgatctgagagagcggctggaaaacctgagaaagaagcctgaaaatatcccccagcccatcagcaatacatctagagccaacctgaataagctgctgaccgattacaccgaaatgaagaaggcgatcctgcatgtgtactgggaagagttccagaaggaccctgtgggcctgatgagccgggtggcccagcctgccagcaagaagatcgatcagaacaagctgaaacctgagatggacgagaagggcaacctgaccaccgccggctttgcctgctctcagtgtggccagcccctgttcgtgtacaagctggagcaggtgtctgagaagggcaaggcttacaccaactacttcggacggtgcaatgtggccgagcacgaaaagctgatcctgctggcccagctgaagcccgagaaggatagcgacgaagccgtgacatatagcctgggaaagtttgggcagagggccctggatttctacagcattcatgtgaccaaggagtccacccaccccgtgaagcccctggcccagatcgccggaaacagatacgcctccggacctgtgggaaaggccctgagcgacgcatgtatgggcacaatcgcctccttcctgtctaagtaccaggacatcatcatcgaacaccagaaggtggtgaagggcaaccagaagagactggagagcctgcgggagctggccggcaaggaaaacctggaataccctagcgtgaccctgccacctcagcctcacaccaaggagggcgttgatgcctacaacgaagtgatcgcccgggtgcgaatgtgggtgaacctgaacctgtggcagaagctgaagctaagcagagatgatgccaagcctctgctgagactgaagggattcccttcctttcctctggtcgagagacaggccaacgaagtggactggtgggacatggtgtgtaacgtgaagaagctgatcaacgagaaaaaggaggatggcaaggtgttttggcagaatctggctggctacaagagacaggaagccctgagaccatacctgagcagcgaggaagatcggaagaagggaaagaaattcgctcggtaccagctgggcgacctgctgctgcacctggaaaagaagcacggcgaggactggggaaaggtgtacgacgaggcctgggagcggattgacaagaaagtggaaggcctgagcaagcacatcaagctggaagaggaacggagaagcgaggacgcccagagcaaggccgccctgaccgactggctgcgggctaaggccagcttcgtgatcgagggcctgaaggaggccgacaaggacgagttctgcagatgcgagctgaagctgcagaagtggtacggggacctgcggggaaagcccttcgccatcgaagccgagaacagcatcctggacatcagcggcttcagcaagcagtacaactgtgccttcatctggcagaaggacggcgtgaagaagctgaacctgtacctgatcatcaactacttcaagggcggcaagctgcggttcaagaagatcaaacctgaagccttcgaagccaacagattctacaccgtgatcaacaaaaagagcggcgagatcgtgcccatggaggtgaacttcaacttcgacgaccccaacctgatcatcctgcctctggcctttggcaagagacagggcagagaattcatctggaacgacctgctgtccctggaaaccggcagcctgaagctggccaacggaagagtgatcgagaagacactgtacaacagaagaacccggcaggatgagcctgccctgttcgtggccctgaccttcgagcggcgggaggtcctggactcctccaatatcaaaccaatgaacctgatcggcgtggcaagaggcgaaaacatccccgccgtgatcgccctgaccgaccccgagggctgcccactgagccggtttaaggatagcctgggaaacccaacccacatcctgagaatcggcgagagctataaggagaagcagcggaccatccaggccaagaaggaggtggagcagcggagagccggcggctacagccggaagtacgccagcaaagccaagaatctggcagacgatatggtgagaaacaccgctagagatctgctgtactacgccgtgacccaggatgccatgctgatcttcgccaacctgagccggggcttcggccggcagggcaagcggaccttcatggccgagagacagtacacacggatggaggactggctgaccgccaagctggcctacgagggcctgagcaagacctacctgtccaagacactggcccagtacacctccaagacatgcagcaactgtgggtttaccatcaccagcgccgactacgacagggtgctggagaagctgaagaagacagcaacaggctggatgaccacaattaacggcaaggagctgaaggtggagggccagattacctactacaacagatacaagagacagaacgtagtcaaggacctgtccgtcgagctggatagactgagcgaagaatctgtgaacaacgacatctcctcctggacaaagggcagaagcggagaagctctgagcctcctgaagaaaagattctcccatagacccgtgcaggagaagttcgtgtgcctgaactgcggcttcgagacacacgcagccgagcaagccgccctgaacatcgccagatcctggctgttcctgcggagccaggagtacaagaaataccagacaaacaagacaaccggcaacaccgataagagagccttcgtcgagacctggcagtccttttaccggaagaagcttaaggaggtgtggaaacctgccgtgcggtctggcggatctggcggaggctccagccaggagcccgtgaccttcgaggacgtggccgtgtacttcacccagaaccagtgggccagcctggaccccatgcagagggccctgtacctggaggtgatgctggagaactacgccaacatcaccagcctggccctgcccttccccaagcccgacctgatcctgcagctggagcagggcgaggccccctgggacctggacccctggacccccctggagggcgaggccctggagggcgtgcacggcggcccaagcagcggcgcccctcctcccagcggcggcagcccagccggctccccaacctctaccgaggagggcacctctgagtccgccacccccgagagcggccctggcacctccaccgagcccagcgagggcagcgcacccggcagccctgccggcagccccacctccacagaggagggaaccagcaccgagcccagcgaaggcagcgccccaggcaccagcaccgagcctagtgagcaggagattaaacggatcaacaagatcagaagaagacttgtgaaagacagcaacaccaagaaggccggcaagacaggccccatgaaaaccctgctggttagagtgatgacacccgatctgagagagcggctggaaaacctgagaaagaagcctgaaaatatcccccagcccatcagcaatacatctagagccaacctgaataagctgctgaccgattacaccgaaatgaagaaggcgatcctgcatgtgtactgggaagagttccagaaggaccctgtgggcctgatgagccgggtggcccagcctgccagcaagaagatcgatcagaacaagctgaaacctgagatggacgagaagggcaacctgaccaccgccggctttgcctgctctcagtgtggccagcccctgttcgtgtacaagctggagcaggtgtctgagaagggcaaggcttacaccaactacttcggacggtgcaatgtggccgagcacgaaaagctgatcctgctggcccagctgaagcccgagaaggatagcgacgaagccgtgacatatagcctgggaaagtttgggcagagggccctggatttctacagcattcatgtgaccaaggagtccacccaccccgtgaagcccctggcccagatcgccggaaacagatacgcctccggacctgtgggaaaggccctgagcgacgcatgtatgggcacaatcgcctccttcctgtctaagtaccaggacatcatcatcgaacaccagaaggtggtgaagggcaaccagaagagactggagagcctgcgggagctggccggcaaggaaaacctggaataccctagcgtgaccctgccacctcagcctcacaccaaggagggcgttgatgcctacaacgaagtgatcgcccgggtgcgaatgtgggtgaacctgaacctgtggcagaagctgaagctaagcagagatgatgccaagcctctgctgagactgaagggattcccttcctttcctctggtcgagagacaggccaacgaagtggactggtgggacatggtgtgtaacgtgaagaagctgatcaacgagaaaaaggaggatggcaaggtgttttggcagaatctggctggctacaagagacaggaagccctgagaccatacctgagcagcgaggaagatcggaagaagggaaagaaattcgctcggtaccagctgggcgacctgctgctgcacctggaaaagaagcacggcgaggactggggaaaggtgtacgacgaggcctgggagcggattgacaagaaagtggaaggcctgagcaagcacatcaagctggaagaggaacggagaagcgaggacgcccagagcaaggccgccctgaccgactggctgcgggctaaggccagcttcgtgatcgagggcctgaaggaggccgacaaggacgagttctgcagatgcgagctgaagctgcagaagtggtacggggacctgcggggaaagcccttcgccatcgaagccgagaacagcatcctggacatcagcggcttcagcaagcagtacaactgtgccttcatctggcagaaggacggcgtgaagaagctgaacctgtacctgatcatcaactacttcaagggcggcaagctgcggttcaagaagatcaaacctgaagccttcgaagccaacagattctacaccgtgatcaacaaaaagagcggcgagatcgtgcccatggaggtgaacttcaacttcgacgaccccaacctgatcatcctgcctctggcctttggcaagagacagggcagagaattcatctggaacgacctgctgtccctggaaaccggcagcctgaagctggccaacggaagagtgatcgagaagacactgtacaacagaagaacccggcaggatgagcctgccctgttcgtggccctgaccttcgagcggcgggaggtcctggactcctccaatatcaaaccaatgaacctgatcggcgtggcaagaggcgaaaacatccccgccgtgatcgccctgaccgaccccgagggctgcccactgagccggtttaaggatagcctgggaaacccaacccacatcctgagaatcggcgagagctataaggagaagcagcggaccatccaggccaagaaggaggtggagcagcggagagccggcggctacagccggaagtacgccagcaaagccaagaatctggcagacgatatggtgagaaacaccgctagagatctgctgtactacgccgtgacccaggatgccatgctgatcttcgccaacctgagccggggcttcggccggcagggcaagcggaccttcatggccgagagacagtacacacggatggaggactggctgaccgccaagctggcctacgagggcctgagcaagacctacctgtccaagacactggcccagtacacctccaagacatgcagcaactgtgggtttaccatcaccagcgccgactacgacagggtgctggagaagctgaagaagacagcaacaggctggatgaccacaattaacggcaaggagctgaaggtggagggccagattacctactacaacagatacaagagacagaacgtagtcaaggacctgtccgtcgagctggatagactgagcgaagaatctgtgaacaacgacatctcctcctggacaaagggcagaagcggagaagctctgagcctcctgaagaaaagattctcccatagacccgtgcaggagaagttcgtgtgcctgaactgcggcttcgagacacacgcagccgagcaagccgccctgaacatcgccagatcctggctgttcctgcggagccaggagtacaagaaataccagacaaacaagacaaccggcaacaccgataagagagccttcgtcgagacctggcagtccttttaccggaagaagcttaaggaggtgtggaaacctgccgtgcggtctggcggatctggcggaggctcctagccaggagcccgtgaccttcgaggacgtggccgtgtacttcacccagaaccagtgggccagcctggaccccatgcagagggccctgtacctggaggtgatgctggagaactacgccaacatcaccagcctggccctgcccttccccaagcccgacctgatcctgcagctggagcagggcgaggccccctgggacctggacccctggacccccctggagggcgaggccctggagggcgtgcacggatctggctccggcagcggccccaagaaaaagagaaaagtctaagctgccttctgcggggcttgccttctggccatgcccttcttctctcccttgcacctgtacctcttggtctttgaataaagcctgagtaggaaggctagcaaaaaaaaaaaaaaaaaaaaaaaaaaaaaaaaaaaaaaaaaaaaaaaaaaaaaaaaaaaaaaaaaaaaaaaaaaaaaaaa

SEQ ID NO: 15860 - RNA, 9485 nt, synthetic construct
  source 1..9485: mol_type = other RNA
aggaaataagagagaaaagaagagtaagaagaaatataagagccaccatggcccctaagaagaagcgtaaagtgagccggatggaacgcctcgtctacgaggtgcggcagaagtgcagaaacatcgaggacatctgcatctcctgcggatctctgaacgtgaccctggagcacccactgttcatcggcggcatgtgccagaactgtaaaaactgttttctggagtgtgcctatcaatacgacgatgacggctaccagagctactgcaccatctgttgcggcggaagagaggtgctgatgtgtggaaataacaactgctgccggtgcttctgcgtggaatgcgtggacctgctggtgggccccggcgccgcccaggccgctattaaggaagatccttggaactgctacatgtgcggccacaagggcacatacggcctgctgagacggagagaggactggcctagcagactgcagatgttcttcgccaataaccacgaccaggagttcgacccccctaaggtgtaccctcccgtccccgccgagaagagaaagcccatccgggtcctgagcctgttcgatggcatcgccaccggtctgctggtgctgaaggacctgggcatccaggtggataggtacattgcctccgaggtgtgcgaggactccatcaccgtgggaatggtgcgtcatcagggcaagatcatgtacgtgggcgacgtgcggagcgtgacacagaagcatatccaggagtggggccctttcgacctggtgatcggcggcagcccttgcaatgacctgagcatcgtgaacccagcccggaagggcctgtacgagggaaccggcagactgttcttcgagttttacagactgctgcacgacgcccggcctaaggaaggcgacgaccggcccttcttttggctgttcgagaatgtggtggccatgggagtcagcgacaagcgggatattagccggttcctggagagcaaccccgtgatgatcgatgccaaggaagtgagcgccgcccaccgggccagatacttctggggcaatctgcctggcatgaacagacccctggccagcaccgtgaacgacaagctggagctgcaggagtgcctggagcacggccggatcgccaagttcagcaaggtgagaaccatcaccacccgaagcaacagcatcaaacaaggcaaggaccagcactttcctgtgttcatgaacgagaaggaggacatcctgtggtgtaccgagatggagagagtgttcgggttcccagtccactacacagatgtcagcaacatgtctagactggccagacagagactgctgggaagaagctggtccgtccctgtgatcagacacctgttcgcccctctgaaggagtacttcgcctgcgtgagcagcggcaacagcaacgccaacagccggggccccagcttctctagcggcctggtgccactgtccctgagagggagccacatgggccccatggagatctacaaaaccgtgagcgcctggaagcggcagcctgtgcgcgtgctgagcctgtttcggaatatcgataaagtcctgaaaagcctgggattcctggagagcggctctggctccggcggtggcaccctgaagtacgtggaggatgtgacaaacgtggtcagacgggatgtggagaagtggggccccttcgatctggtgtacggcagcacccaacccctgggcagctcttgtgaccggtgccctggctggtacatgtttcagttccaccggatcctgcagtacgccctgccgagacaggagtcccagcggccattcttttggattttcatggacaacttgctgctgaccgaggatgaccaggaaactaccactcggttcctgcagaccgaagccgtgaccctgcaggacgtgagaggccgggactaccagaacgccatgcgggtgtggtccaacatccctggactgaaaagcaagcacgcacctctgacccctaaagaagaggagtacctgcaggcccaggtgcggagcagaagcaagctggacgcccctaaggtggatctgctggtgaagaattgcctcctgcccctgagagagtacttcaagtatttcagccagaatagtctgcccctgggaggcagcggcggcggcgccctggtgacatttgaggacgtcgccgtgcggttcacccaggaggaatgggctctgctggatccttctcagaaaatcctgtaccgggacgtgatgagagagacataccggaatctgacctccgtgggcatcaactgggaatgttgggaccttgaagcctgcttcagaagcctgggaagaaacctgagagtgcaggtggtgaagagaaagtgcgagctgaccaacagcggcccctgcgccgagggcggcccaagcagcggcgcccctcctcccagcggcggcagcccagccggctccccaacctctaccgaggagggcacctctgagtccgccacccccgagagcggccctggcacctccaccgagcccagcgagggcagcgcacccggcagccctgccggcagccccacctccacagaggagggaaccagcaccgagcccagcgaaggcagcgccccaggcaccagcaccgagcctagtgagcaggagattaaacggatcaacaagatcagaagaagacttgtgaaagacagcaacaccaagaaggccggcaagacaggccccatgaaaaccctgctggttagagtgatgacacccgatctgagagagcggctggaaaacctgagaaagaagcctgaaaatatcccccagcccatcagcaatacatctagagccaacctgaataagctgctgaccgattacaccgaaatgaagaaggcgatcctgcatgtgtactgggaagagttccagaaggaccctgtgggcctgatgagccgggtggcccagcctgccagcaagaagatcgatcagaacaagctgaaacctgagatggacgagaagggcaacctgaccaccgccggctttgcctgctctcagtgtggccagcccctgttcgtgtacaagctggagcaggtgtctgagaagggcaaggcttacaccaactacttcggacggtgcaatgtggccgagcacgaaaagctgatcctgctggcccagctgaagcccgagaaggatagcgacgaagccgtgacatatagcctgggaaagtttgggcagagggccctggatttctacagcattcatgtgaccaaggagtccacccaccccgtgaagcccctggcccagatcgccggaaacagatacgcctccggacctgtgggaaaggccctgagcgacgcatgtatgggcacaatcgcctccttcctgtctaagtaccaggacatcatcatcgaacaccagaaggtggtgaagggcaaccagaagagactggagagcctgcgggagctggccggcaaggaaaacctggaataccctagcgtgaccctgccacctcagcctcacaccaaggagggcgttgatgcctacaacgaagtgatcgcccgggtgcgaatgtgggtgaacctgaacctgtggcagaagctgaagctaagcagagatgatgccaagcctctgctgagactgaagggattcccttcctttcctctggtcgagagacaggccaacgaagtggactggtgggacatggtgtgtaacgtgaagaagctgatcaacgagaaaaaggaggatggcaaggtgttttggcagaatctggctggctacaagagacaggaagccctgagaccatacctgagcagcgaggaagatcggaagaagggaaagaaattcgctcggtaccagctgggcgacctgctgctgcacctggaaaagaagcacggcgaggactggggaaaggtgtacgacgaggcctgggagcggattgacaagaaagtggaaggcctgagcaagcacatcaagctggaagaggaacggagaagcgaggacgcccagagcaaggccgccctgaccgactggctgcgggctaaggccagcttcgtgatcgagggcctgaaggaggccgacaaggacgagttctgcagatgcgagctgaagctgcagaagtggtacggggacctgcggggaaagcccttcgccatcgaagccgagaacagcatcctggacatcagcggcttcagcaagcagtacaactgtgccttcatctggcagaaggacggcgtgaagaagctgaacctgtacctgatcatcaactacttcaagggcggcaagctgcggttcaagaagatcaaacctgaagccttcgaagccaacagattctacaccgtgatcaacaaaaagagcggcgagatcgtgcccatggaggtgaacttcaacttcgacgaccccaacctgatcatcctgcctctggcctttggcaagagacagggcagagaattcatctggaacgacctgctgtccctggaaaccggcagcctgaagctggccaacggaagagtgatcgagaagacactgtacaacagaagaacccggcaggatgagcctgccctgttcgtggccctgaccttcgagcggcgggaggtcctggactcctccaatatcaaaccaatgaacctgatcggcgtggcaagaggcgaaaacatccccgccgtgatcgccctgaccgaccccgagggctgcccactgagccggtttaaggatagcctgggaaacccaacccacatcctgagaatcggcgagagctataaggagaagcagcggaccatccaggccaagaaggaggtggagcagcggagagccggcggctacagccggaagtacgccagcaaagccaagaatctggcagacgatatggtgagaaacaccgctagagatctgctgtactacgccgtgacccaggatgccatgctgatcttcgccaacctgagccggggcttcggccggcagggcaagcggaccttcatggccgagagacagtacacacggatggaggactggctgaccgccaagctggcctacgagggcctgagcaagacctacctgtccaagacactggcccagtacacctccaagacatgcagcaactgtgggtttaccatcaccagcgccgactacgacagggtgctggagaagctgaagaagacagcaacaggctggatgaccacaattaacggcaaggagctgaaggtggagggccagattacctactacaacagatacaagagacagaacgtagtcaaggacctgtccgtcgagctggatagactgagcgaagaatctgtgaacaacgacatctcctcctggacaaagggcagaagcggagaagctctgagcctcctgaagaaaagattctcccatagacccgtgcaggagaagttcgtgtgcctgaactgcggcttcgagacacacgcagccgagcaagccgccctgaacatcgccagatcctggctgttcctgcggagccaggagtacaagaaataccagacaaacaagacaaccggcaacaccgataagagagccttcgtcgagacctggcagtccttttaccggaagaagcttaaggaggtgtggaaacctgccgtgcggtctggcggatctggcggaggctccctgcaggagagcgtgaccttcaaggacgtggccgtgctgttcacccaggacgagtgggcccagctgagccccgcccagagggccctgtacagggacgtgatgctggagaactacagccacctggtgagcctgggcctgctgggccccaagcccgacctgttcgcccagctgggcaagggcgaggagtggacccccgaggacaccagcaggggcttctgcctggactggatgaccatccccgtgggcggcccaagcagcggcgcccctcctcccagcggcggcagcccagccggctccccaacctctaccgaggagggcacctctgagtccgccacccccgagagcggccctggcacctccaccgagcccagcgagggcagcgcacccggcagccctgccggcagccccacctccacagaggagggaaccagcaccgagcccagcgaaggcagcgccccaggcaccagcaccgagcctagtgagcaggagattaaacggatcaacaagatcagaagaagacttgtgaaagacagcaacaccaagaaggccggcaagacaggccccatgaaaaccctgctggttagagtgatgacacccgatctgagagagcggctggaaaacctgagaaagaagcctgaaaatatcccccagcccatcagcaatacatctagagccaacctgaataagctgctgaccgattacaccgaaatgaagaaggcgatcctgcatgtgtactgggaagagttccagaaggaccctgtgggcctgatgagccgggtggcccagcctgccagcaagaagatcgatcagaacaagctgaaacctgagatggacgagaagggcaacctgaccaccgccggctttgcctgctctcagtgtggccagcccctgttcgtgtacaagctggagcaggtgtctgagaagggcaaggcttacaccaactacttcggacggtgcaatgtggccgagcacgaaaagctgatcctgctggcccagctgaagcccgagaaggatagcgacgaagccgtgacatatagcctgggaaagtttgggcagagggccctggatttctacagcattcatgtgaccaaggagtccacccaccccgtgaagcccctggcccagatcgccggaaacagatacgcctccggacctgtgggaaaggccctgagcgacgcatgtatgggcacaatcgcctccttcctgtctaagtaccaggacatcatcatcgaacaccagaaggtggtgaagggcaaccagaagagactggagagcctgcgggagctggccggcaaggaaaacctggaataccctagcgtgaccctgccacctcagcctcacaccaaggagggcgttgatgcctacaacgaagtgatcgcccgggtgcgaatgtgggtgaacctgaacctgtggcagaagctgaagctaagcagagatgatgccaagcctctgctgagactgaagggattcccttcctttcctctggtcgagagacaggccaacgaagtggactggtgggacatggtgtgtaacgtgaagaagctgatcaacgagaaaaaggaggatggcaaggtgttttggcagaatctggctggctacaagagacaggaagccctgagaccatacctgagcagcgaggaagatcggaagaagggaaagaaattcgctcggtaccagctgggcgacctgctgctgcacctggaaaagaagcacggcgaggactggggaaaggtgtacgacgaggcctgggagcggattgacaagaaagtggaaggcctgagcaagcacatcaagctggaagaggaacggagaagcgaggacgcccagagcaaggccgccctgaccgactggctgcgggctaaggccagcttcgtgatcgagggcctgaaggaggccgacaaggacgagttctgcagatgcgagctgaagctgcagaagtggtacggggacctgcggggaaagcccttcgccatcgaagccgagaacagcatcctggacatcagcggcttcagcaagcagtacaactgtgccttcatctggcagaaggacggcgtgaagaagctgaacctgtacctgatcatcaactacttcaagggcggcaagctgcggttcaagaagatcaaacctgaagccttcgaagccaacagattctacaccgtgatcaacaaaaagagcggcgagatcgtgcccatggaggtgaacttcaacttcgacgaccccaacctgatcatcctgcctctggcctttggcaagagacagggcagagaattcatctggaacgacctgctgtccctggaaaccggcagcctgaagctggccaacggaagagtgatcgagaagacactgtacaacagaagaacccggcaggatgagcctgccctgttcgtggccctgaccttcgagcggcgggaggtcctggactcctccaatatcaaaccaatgaacctgatcggcgtggcaagaggcgaaaacatccccgccgtgatcgccctgaccgaccccgagggctgcccactgagccggtttaaggatagcctgggaaacccaacccacatcctgagaatcggcgagagctataaggagaagcagcggaccatccaggccaagaaggaggtggagcagcggagagccggcggctacagccggaagtacgccagcaaagccaagaatctggcagacgatatggtgagaaacaccgctagagatctgctgtactacgccgtgacccaggatgccatgctgatcttcgccaacctgagccggggcttcggccggcagggcaagcggaccttcatggccgagagacagtacacacggatggaggactggctgaccgccaagctggcctacgagggcctgagcaagacctacctgtccaagacactggcccagtacacctccaagacatgcagcaactgtgggtttaccatcaccagcgccgactacgacagggtgctggagaagctgaagaagacagcaacaggctggatgaccacaattaacggcaaggagctgaaggtggagggccagattacctactacaacagatacaagagacagaacgtagtcaaggacctgtccgtcgagctggatagactgagcgaagaatctgtgaacaacgacatctcctcctggacaaagggcagaagcggagaagctctgagcctcctgaagaaaagattctcccatagacccgtgcaggagaagttcgtgtgcctgaactgcggcttcgagacacacgcagccgagcaagccgccctgaacatcgccagatcctggctgttcctgcggagccaggagtacaagaaataccagacaaacaagacaaccggcaacaccgataagagagccttcgtcgagacctggcagtccttttaccggaagaagcttaaggaggtgtggaaacctgccgtgcggtctggcggatctggcggaggctcctctgcaggagagcgtgaccttcaaggacgtggccgtgctgttcacccaggacgagtgggcccagctgagccccgcccagagggccctgtacagggacgtgatgctggagaactacagccacctggtgagcctgggcctgctgggccccaagcccgacctgttcgcccagctgggcaagggcgaggagtggacccccgaggacaccagcaggggcttctgcctggactggatgaccatccccgtgggatctggctccggcagcggccccaagaaaaagagaaaagtctaagctgccttctgcggggcttgccttctggccatgcccttcttctctcccttgcacctgtacctcttggtctttgaataaagcctgagtaggaaggctagcaaaaaaaaaaaaaaaaaaaaaaaaaaaaaaaaaaaaaaaaaaaaaaaaaaaaaaaaaaaaaaaaaaaaaaaaaaaaaaaa

SEQ ID NO: 15861 - RNA, 9485 nt, synthetic construct
  source 1..9485: mol_type = other RNA
aggaaataagagagaaaagaagagtaagaagaaatataagagccaccatggcccctaagaagaagcgtaaagtgagccggatggaacgcctcgtctacgaggtgcggcagaagtgcagaaacatcgaggacatctgcatctcctgcggatctctgaacgtgaccctggagcacccactgttcatcggcggcatgtgccagaactgtaaaaactgttttctggagtgtgcctatcaatacgacgatgacggctaccagagctactgcaccatctgttgcggcggaagagaggtgctgatgtgtggaaataacaactgctgccggtgcttctgcgtggaatgcgtggacctgctggtgggccccggcgccgcccaggccgctattaaggaagatccttggaactgctacatgtgcggccacaagggcacatacggcctgctgagacggagagaggactggcctagcagactgcagatgttcttcgccaataaccacgaccaggagttcgacccccctaaggtgtaccctcccgtccccgccgagaagagaaagcccatccgggtcctgagcctgttcgatggcatcgccaccggtctgctggtgctgaaggacctgggcatccaggtggataggtacattgcctccgaggtgtgcgaggactccatcaccgtgggaatggtgcgtcatcagggcaagatcatgtacgtgggcgacgtgcggagcgtgacacagaagcatatccaggagtggggccctttcgacctggtgatcggcggcagcccttgcaatgacctgagcatcgtgaacccagcccggaagggcctgtacgagggaaccggcagactgttcttcgagttttacagactgctgcacgacgcccggcctaaggaaggcgacgaccggcccttcttttggctgttcgagaatgtggtggccatgggagtcagcgacaagcgggatattagccggttcctggagagcaaccccgtgatgatcgatgccaaggaagtgagcgccgcccaccgggccagatacttctggggcaatctgcctggcatgaacagacccctggccagcaccgtgaacgacaagctggagctgcaggagtgcctggagcacggccggatcgccaagttcagcaaggtgagaaccatcaccacccgaagcaacagcatcaaacaaggcaaggaccagcactttcctgtgttcatgaacgagaaggaggacatcctgtggtgtaccgagatggagagagtgttcgggttcccagtccactacacagatgtcagcaacatgtctagactggccagacagagactgctgggaagaagctggtccgtccctgtgatcagacacctgttcgcccctctgaaggagtacttcgcctgcgtgagcagcggcaacagcaacgccaacagccggggccccagcttctctagcggcctggtgccactgtccctgagagggagccacatgggccccatggagatctacaaaaccgtgagcgcctggaagcggcagcctgtgcgcgtgctgagcctgtttcggaatatcgataaagtcctgaaaagcctgggattcctggagagcggctctggctccggcggtggcaccctgaagtacgtggaggatgtgacaaacgtggtcagacgggatgtggagaagtggggccccttcgatctggtgtacggcagcacccaacccctgggcagctcttgtgaccggtgccctggctggtacatgtttcagttccaccggatcctgcagtacgccctgccgagacaggagtcccagcggccattcttttggattttcatggacaacttgctgctgaccgaggatgaccaggaaactaccactcggttcctgcagaccgaagccgtgaccctgcaggacgtgagaggccgggactaccagaacgccatgcgggtgtggtccaacatccctggactgaaaagcaagcacgcacctctgacccctaaagaagaggagtacctgcaggcccaggtgcggagcagaagcaagctggacgcccctaaggtggatctgctggtgaagaattgcctcctgcccctgagagagtacttcaagtatttcagccagaatagtctgcccctgggaggcagcggcggcggcgccctggtgacatttgaggacgtcgccgtgcggttcacccaggaggaatgggctctgctggatccttctcagaaaatcctgtaccgggacgtgatgagagagacataccggaatctgacctccgtgggcatcaactgggaatgttgggaccttgaagcctgcttcagaagcctgggaagaaacctgagagtgcaggtggtgaagagaaagtgcgagctgaccaacagcggcccctgcgccgagggcggcccaagcagcggcgcccctcctcccagcggcggcagcccagccggctccccaacctctaccgaggagggcacctctgagtccgccacccccgagagcggccctggcacctccaccgagcccagcgagggcagcgcacccggcagccctgccggcagccccacctccacagaggagggaaccagcaccgagcccagcgaaggcagcgccccaggcaccagcaccgagcctagtgagcaggagattaaacggatcaacaagatcagaagaagacttgtgaaagacagcaacaccaagaaggccggcaagacaggccccatgaaaaccctgctggttagagtgatgacacccgatctgagagagcggctggaaaacctgagaaagaagcctgaaaatatcccccagcccatcagcaatacatctagagccaacctgaataagctgctgaccgattacaccgaaatgaagaaggcgatcctgcatgtgtactgggaagagttccagaaggaccctgtgggcctgatgagccgggtggcccagcctgccagcaagaagatcgatcagaacaagctgaaacctgagatggacgagaagggcaacctgaccaccgccggctttgcctgctctcagtgtggccagcccctgttcgtgtacaagctggagcaggtgtctgagaagggcaaggcttacaccaactacttcggacggtgcaatgtggccgagcacgaaaagctgatcctgctggcccagctgaagcccgagaaggatagcgacgaagccgtgacatatagcctgggaaagtttgggcagagggccctggatttctacagcattcatgtgaccaaggagtccacccaccccgtgaagcccctggcccagatcgccggaaacagatacgcctccggacctgtgggaaaggccctgagcgacgcatgtatgggcacaatcgcctccttcctgtctaagtaccaggacatcatcatcgaacaccagaaggtggtgaagggcaaccagaagagactggagagcctgcgggagctggccggcaaggaaaacctggaataccctagcgtgaccctgccacctcagcctcacaccaaggagggcgttgatgcctacaacgaagtgatcgcccgggtgcgaatgtgggtgaacctgaacctgtggcagaagctgaagctaagcagagatgatgccaagcctctgctgagactgaagggattcccttcctttcctctggtcgagagacaggccaacgaagtggactggtgggacatggtgtgtaacgtgaagaagctgatcaacgagaaaaaggaggatggcaaggtgttttggcagaatctggctggctacaagagacaggaagccctgagaccatacctgagcagcgaggaagatcggaagaagggaaagaaattcgctcggtaccagctgggcgacctgctgctgcacctggaaaagaagcacggcgaggactggggaaaggtgtacgacgaggcctgggagcggattgacaagaaagtggaaggcctgagcaagcacatcaagctggaagaggaacggagaagcgaggacgcccagagcaaggccgccctgaccgactggctgcgggctaaggccagcttcgtgatcgagggcctgaaggaggccgacaaggacgagttctgcagatgcgagctgaagctgcagaagtggtacggggacctgcggggaaagcccttcgccatcgaagccgagaacagcatcctggacatcagcggcttcagcaagcagtacaactgtgccttcatctggcagaaggacggcgtgaagaagctgaacctgtacctgatcatcaactacttcaagggcggcaagctgcggttcaagaagatcaaacctgaagccttcgaagccaacagattctacaccgtgatcaacaaaaagagcggcgagatcgtgcccatggaggtgaacttcaacttcgacgaccccaacctgatcatcctgcctctggcctttggcaagagacagggcagagaattcatctggaacgacctgctgtccctggaaaccggcagcctgaagctggccaacggaagagtgatcgagaagacactgtacaacagaagaacccggcaggatgagcctgccctgttcgtggccctgaccttcgagcggcgggaggtcctggactcctccaatatcaaaccaatgaacctgatcggcgtggcaagaggcgaaaacatccccgccgtgatcgccctgaccgaccccgagggctgcccactgagccggtttaaggatagcctgggaaacccaacccacatcctgagaatcggcgagagctataaggagaagcagcggaccatccaggccaagaaggaggtggagcagcggagagccggcggctacagccggaagtacgccagcaaagccaagaatctggcagacgatatggtgagaaacaccgctagagatctgctgtactacgccgtgacccaggatgccatgctgatcttcgccaacctgagccggggcttcggccggcagggcaagcggaccttcatggccgagagacagtacacacggatggaggactggctgaccgccaagctggcctacgagggcctgagcaagacctacctgtccaagacactggcccagtacacctccaagacatgcagcaactgtgggtttaccatcaccagcgccgactacgacagggtgctggagaagctgaagaagacagcaacaggctggatgaccacaattaacggcaaggagctgaaggtggagggccagattacctactacaacagatacaagagacagaacgtagtcaaggacctgtccgtcgagctggatagactgagcgaagaatctgtgaacaacgacatctcctcctggacaaagggcagaagcggagaagctctgagcctcctgaagaaaagattctcccatagacccgtgcaggagaagttcgtgtgcctgaactgcggcttcgagacacacgcagccgagcaagccgccctgaacatcgccagatcctggctgttcctgcggagccaggagtacaagaaataccagacaaacaagacaaccggcaacaccgataagagagccttcgtcgagacctggcagtccttttaccggaagaagcttaaggaggtgtggaaacctgccgtgcggtctggcggatctggcggaggctccagcctgggcagcgtgagcttcaaggacgtgaccgtggacttcagcagggaggagtggcagcagctggacctggcccagaagagcctgtacagggacgtgaccctggagaactacttcaacctgatcagcgtgggctgccaggtgcccaagcccgaggtgatcttcaacctggagcagggcggcgagctgtgcgtgctggacggcggcctgagctgccagaactgcagcgacggcgacatcggcggcggcccaagcagcggcgcccctcctcccagcggcggcagcccagccggctccccaacctctaccgaggagggcacctctgagtccgccacccccgagagcggccctggcacctccaccgagcccagcgagggcagcgcacccggcagccctgccggcagccccacctccacagaggagggaaccagcaccgagcccagcgaaggcagcgccccaggcaccagcaccgagcctagtgagcaggagattaaacggatcaacaagatcagaagaagacttgtgaaagacagcaacaccaagaaggccggcaagacaggccccatgaaaaccctgctggttagagtgatgacacccgatctgagagagcggctggaaaacctgagaaagaagcctgaaaatatcccccagcccatcagcaatacatctagagccaacctgaataagctgctgaccgattacaccgaaatgaagaaggcgatcctgcatgtgtactgggaagagttccagaaggaccctgtgggcctgatgagccgggtggcccagcctgccagcaagaagatcgatcagaacaagctgaaacctgagatggacgagaagggcaacctgaccaccgccggctttgcctgctctcagtgtggccagcccctgttcgtgtacaagctggagcaggtgtctgagaagggcaaggcttacaccaactacttcggacggtgcaatgtggccgagcacgaaaagctgatcctgctggcccagctgaagcccgagaaggatagcgacgaagccgtgacatatagcctgggaaagtttgggcagagggccctggatttctacagcattcatgtgaccaaggagtccacccaccccgtgaagcccctggcccagatcgccggaaacagatacgcctccggacctgtgggaaaggccctgagcgacgcatgtatgggcacaatcgcctccttcctgtctaagtaccaggacatcatcatcgaacaccagaaggtggtgaagggcaaccagaagagactggagagcctgcgggagctggccggcaaggaaaacctggaataccctagcgtgaccctgccacctcagcctcacaccaaggagggcgttgatgcctacaacgaagtgatcgcccgggtgcgaatgtgggtgaacctgaacctgtggcagaagctgaagctaagcagagatgatgccaagcctctgctgagactgaagggattcccttcctttcctctggtcgagagacaggccaacgaagtggactggtgggacatggtgtgtaacgtgaagaagctgatcaacgagaaaaaggaggatggcaaggtgttttggcagaatctggctggctacaagagacaggaagccctgagaccatacctgagcagcgaggaagatcggaagaagggaaagaaattcgctcggtaccagctgggcgacctgctgctgcacctggaaaagaagcacggcgaggactggggaaaggtgtacgacgaggcctgggagcggattgacaagaaagtggaaggcctgagcaagcacatcaagctggaagaggaacggagaagcgaggacgcccagagcaaggccgccctgaccgactggctgcgggctaaggccagcttcgtgatcgagggcctgaaggaggccgacaaggacgagttctgcagatgcgagctgaagctgcagaagtggtacggggacctgcggggaaagcccttcgccatcgaagccgagaacagcatcctggacatcagcggcttcagcaagcagtacaactgtgccttcatctggcagaaggacggcgtgaagaagctgaacctgtacctgatcatcaactacttcaagggcggcaagctgcggttcaagaagatcaaacctgaagccttcgaagccaacagattctacaccgtgatcaacaaaaagagcggcgagatcgtgcccatggaggtgaacttcaacttcgacgaccccaacctgatcatcctgcctctggcctttggcaagagacagggcagagaattcatctggaacgacctgctgtccctggaaaccggcagcctgaagctggccaacggaagagtgatcgagaagacactgtacaacagaagaacccggcaggatgagcctgccctgttcgtggccctgaccttcgagcggcgggaggtcctggactcctccaatatcaaaccaatgaacctgatcggcgtggcaagaggcgaaaacatccccgccgtgatcgccctgaccgaccccgagggctgcccactgagccggtttaaggatagcctgggaaacccaacccacatcctgagaatcggcgagagctataaggagaagcagcggaccatccaggccaagaaggaggtggagcagcggagagccggcggctacagccggaagtacgccagcaaagccaagaatctggcagacgatatggtgagaaacaccgctagagatctgctgtactacgccgtgacccaggatgccatgctgatcttcgccaacctgagccggggcttcggccggcagggcaagcggaccttcatggccgagagacagtacacacggatggaggactggctgaccgccaagctggcctacgagggcctgagcaagacctacctgtccaagacactggcccagtacacctccaagacatgcagcaactgtgggtttaccatcaccagcgccgactacgacagggtgctggagaagctgaagaagacagcaacaggctggatgaccacaattaacggcaaggagctgaaggtggagggccagattacctactacaacagatacaagagacagaacgtagtcaaggacctgtccgtcgagctggatagactgagcgaagaatctgtgaacaacgacatctcctcctggacaaagggcagaagcggagaagctctgagcctcctgaagaaaagattctcccatagacccgtgcaggagaagttcgtgtgcctgaactgcggcttcgagacacacgcagccgagcaagccgccctgaacatcgccagatcctggctgttcctgcggagccaggagtacaagaaataccagacaaacaagacaaccggcaacaccgataagagagccttcgtcgagacctggcagtccttttaccggaagaagcttaaggaggtgtggaaacctgccgtgcggtctggcggatctggcggaggctcctagcctgggcagcgtgagcttcaaggacgtgaccgtggacttcagcagggaggagtggcagcagctggacctggcccagaagagcctgtacagggacgtgaccctggagaactacttcaacctgatcagcgtgggctgccaggtgcccaagcccgaggtgatcttcaacctggagcagggcggcgagctgtgcgtgctggacggcggcctgagctgccagaactgcagcgacggcgacatcggcggatctggctccggcagcggccccaagaaaaagagaaaagtctaagctgccttctgcggggcttgccttctggccatgcccttcttctctcccttgcacctgtacctcttggtctttgaataaagcctgagtaggaaggctagcaaaaaaaaaaaaaaaaaaaaaaaaaaaaaaaaaaaaaaaaaaaaaaaaaaaaaaaaaaaaaaaaaaaaaaaaaaaaaaaa

SEQ ID NO: 15862 - RNA, 9485 nt, synthetic construct
  source 1..9485: mol_type = other RNA
aggaaataagagagaaaagaagagtaagaagaaatataagagccaccatggcccctaagaagaagcgtaaagtgagccggatggaacgcctcgtctacgaggtgcggcagaagtgcagaaacatcgaggacatctgcatctcctgcggatctctgaacgtgaccctggagcacccactgttcatcggcggcatgtgccagaactgtaaaaactgttttctggagtgtgcctatcaatacgacgatgacggctaccagagctactgcaccatctgttgcggcggaagagaggtgctgatgtgtggaaataacaactgctgccggtgcttctgcgtggaatgcgtggacctgctggtgggccccggcgccgcccaggccgctattaaggaagatccttggaactgctacatgtgcggccacaagggcacatacggcctgctgagacggagagaggactggcctagcagactgcagatgttcttcgccaataaccacgaccaggagttcgacccccctaaggtgtaccctcccgtccccgccgagaagagaaagcccatccgggtcctgagcctgttcgatggcatcgccaccggtctgctggtgctgaaggacctgggcatccaggtggataggtacattgcctccgaggtgtgcgaggactccatcaccgtgggaatggtgcgtcatcagggcaagatcatgtacgtgggcgacgtgcggagcgtgacacagaagcatatccaggagtggggccctttcgacctggtgatcggcggcagcccttgcaatgacctgagcatcgtgaacccagcccggaagggcctgtacgagggaaccggcagactgttcttcgagttttacagactgctgcacgacgcccggcctaaggaaggcgacgaccggcccttcttttggctgttcgagaatgtggtggccatgggagtcagcgacaagcgggatattagccggttcctggagagcaaccccgtgatgatcgatgccaaggaagtgagcgccgcccaccgggccagatacttctggggcaatctgcctggcatgaacagacccctggccagcaccgtgaacgacaagctggagctgcaggagtgcctggagcacggccggatcgccaagttcagcaaggtgagaaccatcaccacccgaagcaacagcatcaaacaaggcaaggaccagcactttcctgtgttcatgaacgagaaggaggacatcctgtggtgtaccgagatggagagagtgttcgggttcccagtccactacacagatgtcagcaacatgtctagactggccagacagagactgctgggaagaagctggtccgtccctgtgatcagacacctgttcgcccctctgaaggagtacttcgcctgcgtgagcagcggcaacagcaacgccaacagccggggccccagcttctctagcggcctggtgccactgtccctgagagggagccacatgggccccatggagatctacaaaaccgtgagcgcctggaagcggcagcctgtgcgcgtgctgagcctgtttcggaatatcgataaagtcctgaaaagcctgggattcctggagagcggctctggctccggcggtggcaccctgaagtacgtggaggatgtgacaaacgtggtcagacgggatgtggagaagtggggccccttcgatctggtgtacggcagcacccaacccctgggcagctcttgtgaccggtgccctggctggtacatgtttcagttccaccggatcctgcagtacgccctgccgagacaggagtcccagcggccattcttttggattttcatggacaacttgctgctgaccgaggatgaccaggaaactaccactcggttcctgcagaccgaagccgtgaccctgcaggacgtgagaggccgggactaccagaacgccatgcgggtgtggtccaacatccctggactgaaaagcaagcacgcacctctgacccctaaagaagaggagtacctgcaggcccaggtgcggagcagaagcaagctggacgcccctaaggtggatctgctggtgaagaattgcctcctgcccctgagagagtacttcaagtatttcagccagaatagtctgcccctgggaggcagcggcggcggcgccctggtgacatttgaggacgtcgccgtgcggttcacccaggaggaatgggctctgctggatccttctcagaaaatcctgtaccgggacgtgatgagagagacataccggaatctgacctccgtgggcatcaactgggaatgttgggaccttgaagcctgcttcagaagcctgggaagaaacctgagagtgcaggtggtgaagagaaagtgcgagctgaccaacagcggcccctgcgccgagggcggcccaagcagcggcgcccctcctcccagcggcggcagcccagccggctccccaacctctaccgaggagggcacctctgagtccgccacccccgagagcggccctggcacctccaccgagcccagcgagggcagcgcacccggcagccctgccggcagccccacctccacagaggagggaaccagcaccgagcccagcgaaggcagcgccccaggcaccagcaccgagcctagtgagcaggagattaaacggatcaacaagatcagaagaagacttgtgaaagacagcaacaccaagaaggccggcaagacaggccccatgaaaaccctgctggttagagtgatgacacccgatctgagagagcggctggaaaacctgagaaagaagcctgaaaatatcccccagcccatcagcaatacatctagagccaacctgaataagctgctgaccgattacaccgaaatgaagaaggcgatcctgcatgtgtactgggaagagttccagaaggaccctgtgggcctgatgagccgggtggcccagcctgccagcaagaagatcgatcagaacaagctgaaacctgagatggacgagaagggcaacctgaccaccgccggctttgcctgctctcagtgtggccagcccctgttcgtgtacaagctggagcaggtgtctgagaagggcaaggcttacaccaactacttcggacggtgcaatgtggccgagcacgaaaagctgatcctgctggcccagctgaagcccgagaaggatagcgacgaagccgtgacatatagcctgggaaagtttgggcagagggccctggatttctacagcattcatgtgaccaaggagtccacccaccccgtgaagcccctggcccagatcgccggaaacagatacgcctccggacctgtgggaaaggccctgagcgacgcatgtatgggcacaatcgcctccttcctgtctaagtaccaggacatcatcatcgaacaccagaaggtggtgaagggcaaccagaagagactggagagcctgcgggagctggccggcaaggaaaacctggaataccctagcgtgaccctgccacctcagcctcacaccaaggagggcgttgatgcctacaacgaagtgatcgcccgggtgcgaatgtgggtgaacctgaacctgtggcagaagctgaagctaagcagagatgatgccaagcctctgctgagactgaagggattcccttcctttcctctggtcgagagacaggccaacgaagtggactggtgggacatggtgtgtaacgtgaagaagctgatcaacgagaaaaaggaggatggcaaggtgttttggcagaatctggctggctacaagagacaggaagccctgagaccatacctgagcagcgaggaagatcggaagaagggaaagaaattcgctcggtaccagctgggcgacctgctgctgcacctggaaaagaagcacggcgaggactggggaaaggtgtacgacgaggcctgggagcggattgacaagaaagtggaaggcctgagcaagcacatcaagctggaagaggaacggagaagcgaggacgcccagagcaaggccgccctgaccgactggctgcgggctaaggccagcttcgtgatcgagggcctgaaggaggccgacaaggacgagttctgcagatgcgagctgaagctgcagaagtggtacggggacctgcggggaaagcccttcgccatcgaagccgagaacagcatcctggacatcagcggcttcagcaagcagtacaactgtgccttcatctggcagaaggacggcgtgaagaagctgaacctgtacctgatcatcaactacttcaagggcggcaagctgcggttcaagaagatcaaacctgaagccttcgaagccaacagattctacaccgtgatcaacaaaaagagcggcgagatcgtgcccatggaggtgaacttcaacttcgacgaccccaacctgatcatcctgcctctggcctttggcaagagacagggcagagaattcatctggaacgacctgctgtccctggaaaccggcagcctgaagctggccaacggaagagtgatcgagaagacactgtacaacagaagaacccggcaggatgagcctgccctgttcgtggccctgaccttcgagcggcgggaggtcctggactcctccaatatcaaaccaatgaacctgatcggcgtggcaagaggcgaaaacatccccgccgtgatcgccctgaccgaccccgagggctgcccactgagccggtttaaggatagcctgggaaacccaacccacatcctgagaatcggcgagagctataaggagaagcagcggaccatccaggccaagaaggaggtggagcagcggagagccggcggctacagccggaagtacgccagcaaagccaagaatctggcagacgatatggtgagaaacaccgctagagatctgctgtactacgccgtgacccaggatgccatgctgatcttcgccaacctgagccggggcttcggccggcagggcaagcggaccttcatggccgagagacagtacacacggatggaggactggctgaccgccaagctggcctacgagggcctgagcaagacctacctgtccaagacactggcccagtacacctccaagacatgcagcaactgtgggtttaccatcaccagcgccgactacgacagggtgctggagaagctgaagaagacagcaacaggctggatgaccacaattaacggcaaggagctgaaggtggagggccagattacctactacaacagatacaagagacagaacgtagtcaaggacctgtccgtcgagctggatagactgagcgaagaatctgtgaacaacgacatctcctcctggacaaagggcagaagcggagaagctctgagcctcctgaagaaaagattctcccatagacccgtgcaggagaagttcgtgtgcctgaactgcggcttcgagacacacgcagccgagcaagccgccctgaacatcgccagatcctggctgttcctgcggagccaggagtacaagaaataccagacaaacaagacaaccggcaacaccgataagagagccttcgtcgagacctggcagtccttttaccggaagaagcttaaggaggtgtggaaacctgccgtgcggtctggcggatctggcggaggctcccccgcccagggccccggcgaggccaggcccagcaggaagaggggcaggaggcccagggccctgaagttcgtggacgtggccgtgtacttcagccccgaggagtggggctgcctgaggcccgcccagagggccctgtacagggacgtgatgagggagacctacggccacctgggcgccctgggctgcgccggccccaagcccgccctgatcagctggctggagaggaacaccgacgactgggagggcggcccaagcagcggcgcccctcctcccagcggcggcagcccagccggctccccaacctctaccgaggagggcacctctgagtccgccacccccgagagcggccctggcacctccaccgagcccagcgagggcagcgcacccggcagccctgccggcagccccacctccacagaggagggaaccagcaccgagcccagcgaaggcagcgccccaggcaccagcaccgagcctagtgagcaggagattaaacggatcaacaagatcagaagaagacttgtgaaagacagcaacaccaagaaggccggcaagacaggccccatgaaaaccctgctggttagagtgatgacacccgatctgagagagcggctggaaaacctgagaaagaagcctgaaaatatcccccagcccatcagcaatacatctagagccaacctgaataagctgctgaccgattacaccgaaatgaagaaggcgatcctgcatgtgtactgggaagagttccagaaggaccctgtgggcctgatgagccgggtggcccagcctgccagcaagaagatcgatcagaacaagctgaaacctgagatggacgagaagggcaacctgaccaccgccggctttgcctgctctcagtgtggccagcccctgttcgtgtacaagctggagcaggtgtctgagaagggcaaggcttacaccaactacttcggacggtgcaatgtggccgagcacgaaaagctgatcctgctggcccagctgaagcccgagaaggatagcgacgaagccgtgacatatagcctgggaaagtttgggcagagggccctggatttctacagcattcatgtgaccaaggagtccacccaccccgtgaagcccctggcccagatcgccggaaacagatacgcctccggacctgtgggaaaggccctgagcgacgcatgtatgggcacaatcgcctccttcctgtctaagtaccaggacatcatcatcgaacaccagaaggtggtgaagggcaaccagaagagactggagagcctgcgggagctggccggcaaggaaaacctggaataccctagcgtgaccctgccacctcagcctcacaccaaggagggcgttgatgcctacaacgaagtgatcgcccgggtgcgaatgtgggtgaacctgaacctgtggcagaagctgaagctaagcagagatgatgccaagcctctgctgagactgaagggattcccttcctttcctctggtcgagagacaggccaacgaagtggactggtgggacatggtgtgtaacgtgaagaagctgatcaacgagaaaaaggaggatggcaaggtgttttggcagaatctggctggctacaagagacaggaagccctgagaccatacctgagcagcgaggaagatcggaagaagggaaagaaattcgctcggtaccagctgggcgacctgctgctgcacctggaaaagaagcacggcgaggactggggaaaggtgtacgacgaggcctgggagcggattgacaagaaagtggaaggcctgagcaagcacatcaagctggaagaggaacggagaagcgaggacgcccagagcaaggccgccctgaccgactggctgcgggctaaggccagcttcgtgatcgagggcctgaaggaggccgacaaggacgagttctgcagatgcgagctgaagctgcagaagtggtacggggacctgcggggaaagcccttcgccatcgaagccgagaacagcatcctggacatcagcggcttcagcaagcagtacaactgtgccttcatctggcagaaggacggcgtgaagaagctgaacctgtacctgatcatcaactacttcaagggcggcaagctgcggttcaagaagatcaaacctgaagccttcgaagccaacagattctacaccgtgatcaacaaaaagagcggcgagatcgtgcccatggaggtgaacttcaacttcgacgaccccaacctgatcatcctgcctctggcctttggcaagagacagggcagagaattcatctggaacgacctgctgtccctggaaaccggcagcctgaagctggccaacggaagagtgatcgagaagacactgtacaacagaagaacccggcaggatgagcctgccctgttcgtggccctgaccttcgagcggcgggaggtcctggactcctccaatatcaaaccaatgaacctgatcggcgtggcaagaggcgaaaacatccccgccgtgatcgccctgaccgaccccgagggctgcccactgagccggtttaaggatagcctgggaaacccaacccacatcctgagaatcggcgagagctataaggagaagcagcggaccatccaggccaagaaggaggtggagcagcggagagccggcggctacagccggaagtacgccagcaaagccaagaatctggcagacgatatggtgagaaacaccgctagagatctgctgtactacgccgtgacccaggatgccatgctgatcttcgccaacctgagccggggcttcggccggcagggcaagcggaccttcatggccgagagacagtacacacggatggaggactggctgaccgccaagctggcctacgagggcctgagcaagacctacctgtccaagacactggcccagtacacctccaagacatgcagcaactgtgggtttaccatcaccagcgccgactacgacagggtgctggagaagctgaagaagacagcaacaggctggatgaccacaattaacggcaaggagctgaaggtggagggccagattacctactacaacagatacaagagacagaacgtagtcaaggacctgtccgtcgagctggatagactgagcgaagaatctgtgaacaacgacatctcctcctggacaaagggcagaagcggagaagctctgagcctcctgaagaaaagattctcccatagacccgtgcaggagaagttcgtgtgcctgaactgcggcttcgagacacacgcagccgagcaagccgccctgaacatcgccagatcctggctgttcctgcggagccaggagtacaagaaataccagacaaacaagacaaccggcaacaccgataagagagccttcgtcgagacctggcagtccttttaccggaagaagcttaaggaggtgtggaaacctgccgtgcggtctggcggatctggcggaggctcctcccgcccagggccccggcgaggccaggcccagcaggaagaggggcaggaggcccagggccctgaagttcgtggacgtggccgtgtacttcagccccgaggagtggggctgcctgaggcccgcccagagggccctgtacagggacgtgatgagggagacctacggccacctgggcgccctgggctgcgccggccccaagcccgccctgatcagctggctggagaggaacaccgacgactgggagggatctggctccggcagcggccccaagaaaaagagaaaagtctaagctgccttctgcggggcttgccttctggccatgcccttcttctctcccttgcacctgtacctcttggtctttgaataaagcctgagtaggaaggctagcaaaaaaaaaaaaaaaaaaaaaaaaaaaaaaaaaaaaaaaaaaaaaaaaaaaaaaaaaaaaaaaaaaaaaaaaaaaaaaaa

SEQ ID NO: 15863 - RNA, 9485 nt, synthetic construct
  source 1..9485: mol_type = other RNA
aggaaataagagagaaaagaagagtaagaagaaatataagagccaccatggcccctaagaagaagcgtaaagtgagccggatggaacgcctcgtctacgaggtgcggcagaagtgcagaaacatcgaggacatctgcatctcctgcggatctctgaacgtgaccctggagcacccactgttcatcggcggcatgtgccagaactgtaaaaactgttttctggagtgtgcctatcaatacgacgatgacggctaccagagctactgcaccatctgttgcggcggaagagaggtgctgatgtgtggaaataacaactgctgccggtgcttctgcgtggaatgcgtggacctgctggtgggccccggcgccgcccaggccgctattaaggaagatccttggaactgctacatgtgcggccacaagggcacatacggcctgctgagacggagagaggactggcctagcagactgcagatgttcttcgccaataaccacgaccaggagttcgacccccctaaggtgtaccctcccgtccccgccgagaagagaaagcccatccgggtcctgagcctgttcgatggcatcgccaccggtctgctggtgctgaaggacctgggcatccaggtggataggtacattgcctccgaggtgtgcgaggactccatcaccgtgggaatggtgcgtcatcagggcaagatcatgtacgtgggcgacgtgcggagcgtgacacagaagcatatccaggagtggggccctttcgacctggtgatcggcggcagcccttgcaatgacctgagcatcgtgaacccagcccggaagggcctgtacgagggaaccggcagactgttcttcgagttttacagactgctgcacgacgcccggcctaaggaaggcgacgaccggcccttcttttggctgttcgagaatgtggtggccatgggagtcagcgacaagcgggatattagccggttcctggagagcaaccccgtgatgatcgatgccaaggaagtgagcgccgcccaccgggccagatacttctggggcaatctgcctggcatgaacagacccctggccagcaccgtgaacgacaagctggagctgcaggagtgcctggagcacggccggatcgccaagttcagcaaggtgagaaccatcaccacccgaagcaacagcatcaaacaaggcaaggaccagcactttcctgtgttcatgaacgagaaggaggacatcctgtggtgtaccgagatggagagagtgttcgggttcccagtccactacacagatgtcagcaacatgtctagactggccagacagagactgctgggaagaagctggtccgtccctgtgatcagacacctgttcgcccctctgaaggagtacttcgcctgcgtgagcagcggcaacagcaacgccaacagccggggccccagcttctctagcggcctggtgccactgtccctgagagggagccacatgggccccatggagatctacaaaaccgtgagcgcctggaagcggcagcctgtgcgcgtgctgagcctgtttcggaatatcgataaagtcctgaaaagcctgggattcctggagagcggctctggctccggcggtggcaccctgaagtacgtggaggatgtgacaaacgtggtcagacgggatgtggagaagtggggccccttcgatctggtgtacggcagcacccaacccctgggcagctcttgtgaccggtgccctggctggtacatgtttcagttccaccggatcctgcagtacgccctgccgagacaggagtcccagcggccattcttttggattttcatggacaacttgctgctgaccgaggatgaccaggaaactaccactcggttcctgcagaccgaagccgtgaccctgcaggacgtgagaggccgggactaccagaacgccatgcgggtgtggtccaacatccctggactgaaaagcaagcacgcacctctgacccctaaagaagaggagtacctgcaggcccaggtgcggagcagaagcaagctggacgcccctaaggtggatctgctggtgaagaattgcctcctgcccctgagagagtacttcaagtatttcagccagaatagtctgcccctgggaggcagcggcggcggcgccctggtgacatttgaggacgtcgccgtgcggttcacccaggaggaatgggctctgctggatccttctcagaaaatcctgtaccgggacgtgatgagagagacataccggaatctgacctccgtgggcatcaactgggaatgttgggaccttgaagcctgcttcagaagcctgggaagaaacctgagagtgcaggtggtgaagagaaagtgcgagctgaccaacagcggcccctgcgccgagggcggcccaagcagcggcgcccctcctcccagcggcggcagcccagccggctccccaacctctaccgaggagggcacctctgagtccgccacccccgagagcggccctggcacctccaccgagcccagcgagggcagcgcacccggcagccctgccggcagccccacctccacagaggagggaaccagcaccgagcccagcgaaggcagcgccccaggcaccagcaccgagcctagtgagcaggagattaaacggatcaacaagatcagaagaagacttgtgaaagacagcaacaccaagaaggccggcaagacaggccccatgaaaaccctgctggttagagtgatgacacccgatctgagagagcggctggaaaacctgagaaagaagcctgaaaatatcccccagcccatcagcaatacatctagagccaacctgaataagctgctgaccgattacaccgaaatgaagaaggcgatcctgcatgtgtactgggaagagttccagaaggaccctgtgggcctgatgagccgggtggcccagcctgccagcaagaagatcgatcagaacaagctgaaacctgagatggacgagaagggcaacctgaccaccgccggctttgcctgctctcagtgtggccagcccctgttcgtgtacaagctggagcaggtgtctgagaagggcaaggcttacaccaactacttcggacggtgcaatgtggccgagcacgaaaagctgatcctgctggcccagctgaagcccgagaaggatagcgacgaagccgtgacatatagcctgggaaagtttgggcagagggccctggatttctacagcattcatgtgaccaaggagtccacccaccccgtgaagcccctggcccagatcgccggaaacagatacgcctccggacctgtgggaaaggccctgagcgacgcatgtatgggcacaatcgcctccttcctgtctaagtaccaggacatcatcatcgaacaccagaaggtggtgaagggcaaccagaagagactggagagcctgcgggagctggccggcaaggaaaacctggaataccctagcgtgaccctgccacctcagcctcacaccaaggagggcgttgatgcctacaacgaagtgatcgcccgggtgcgaatgtgggtgaacctgaacctgtggcagaagctgaagctaagcagagatgatgccaagcctctgctgagactgaagggattcccttcctttcctctggtcgagagacaggccaacgaagtggactggtgggacatggtgtgtaacgtgaagaagctgatcaacgagaaaaaggaggatggcaaggtgttttggcagaatctggctggctacaagagacaggaagccctgagaccatacctgagcagcgaggaagatcggaagaagggaaagaaattcgctcggtaccagctgggcgacctgctgctgcacctggaaaagaagcacggcgaggactggggaaaggtgtacgacgaggcctgggagcggattgacaagaaagtggaaggcctgagcaagcacatcaagctggaagaggaacggagaagcgaggacgcccagagcaaggccgccctgaccgactggctgcgggctaaggccagcttcgtgatcgagggcctgaaggaggccgacaaggacgagttctgcagatgcgagctgaagctgcagaagtggtacggggacctgcggggaaagcccttcgccatcgaagccgagaacagcatcctggacatcagcggcttcagcaagcagtacaactgtgccttcatctggcagaaggacggcgtgaagaagctgaacctgtacctgatcatcaactacttcaagggcggcaagctgcggttcaagaagatcaaacctgaagccttcgaagccaacagattctacaccgtgatcaacaaaaagagcggcgagatcgtgcccatggaggtgaacttcaacttcgacgaccccaacctgatcatcctgcctctggcctttggcaagagacagggcagagaattcatctggaacgacctgctgtccctggaaaccggcagcctgaagctggccaacggaagagtgatcgagaagacactgtacaacagaagaacccggcaggatgagcctgccctgttcgtggccctgaccttcgagcggcgggaggtcctggactcctccaatatcaaaccaatgaacctgatcggcgtggcaagaggcgaaaacatccccgccgtgatcgccctgaccgaccccgagggctgcccactgagccggtttaaggatagcctgggaaacccaacccacatcctgagaatcggcgagagctataaggagaagcagcggaccatccaggccaagaaggaggtggagcagcggagagccggcggctacagccggaagtacgccagcaaagccaagaatctggcagacgatatggtgagaaacaccgctagagatctgctgtactacgccgtgacccaggatgccatgctgatcttcgccaacctgagccggggcttcggccggcagggcaagcggaccttcatggccgagagacagtacacacggatggaggactggctgaccgccaagctggcctacgagggcctgagcaagacctacctgtccaagacactggcccagtacacctccaagacatgcagcaactgtgggtttaccatcaccagcgccgactacgacagggtgctggagaagctgaagaagacagcaacaggctggatgaccacaattaacggcaaggagctgaaggtggagggccagattacctactacaacagatacaagagacagaacgtagtcaaggacctgtccgtcgagctggatagactgagcgaagaatctgtgaacaacgacatctcctcctggacaaagggcagaagcggagaagctctgagcctcctgaagaaaagattctcccatagacccgtgcaggagaagttcgtgtgcctgaactgcggcttcgagacacacgcagccgagcaagccgccctgaacatcgccagatcctggctgttcctgcggagccaggagtacaagaaataccagacaaacaagacaaccggcaacaccgataagagagccttcgtcgagacctggcagtccttttaccggaagaagcttaaggaggtgtggaaacctgccgtgcggtctggcggatctggcggaggctccatgaacatggagggcctggtgatgttccaggacctgagcatcgacttcagccaggaggagtgggagtgcctgaaccccacccagaaggacctgtacagggacgtgatgatggagaactacagcagcctgctgagcctgggcctgagcatccccaagcccgacgtgatcagcctgctggagcagggcaaggagccctggatggtgagcagggacgtgctgggcggctggtgccccgacaggctgggcggcccaagcagcggcgcccctcctcccagcggcggcagcccagccggctccccaacctctaccgaggagggcacctctgagtccgccacccccgagagcggccctggcacctccaccgagcccagcgagggcagcgcacccggcagccctgccggcagccccacctccacagaggagggaaccagcaccgagcccagcgaaggcagcgccccaggcaccagcaccgagcctagtgagcaggagattaaacggatcaacaagatcagaagaagacttgtgaaagacagcaacaccaagaaggccggcaagacaggccccatgaaaaccctgctggttagagtgatgacacccgatctgagagagcggctggaaaacctgagaaagaagcctgaaaatatcccccagcccatcagcaatacatctagagccaacctgaataagctgctgaccgattacaccgaaatgaagaaggcgatcctgcatgtgtactgggaagagttccagaaggaccctgtgggcctgatgagccgggtggcccagcctgccagcaagaagatcgatcagaacaagctgaaacctgagatggacgagaagggcaacctgaccaccgccggctttgcctgctctcagtgtggccagcccctgttcgtgtacaagctggagcaggtgtctgagaagggcaaggcttacaccaactacttcggacggtgcaatgtggccgagcacgaaaagctgatcctgctggcccagctgaagcccgagaaggatagcgacgaagccgtgacatatagcctgggaaagtttgggcagagggccctggatttctacagcattcatgtgaccaaggagtccacccaccccgtgaagcccctggcccagatcgccggaaacagatacgcctccggacctgtgggaaaggccctgagcgacgcatgtatgggcacaatcgcctccttcctgtctaagtaccaggacatcatcatcgaacaccagaaggtggtgaagggcaaccagaagagactggagagcctgcgggagctggccggcaaggaaaacctggaataccctagcgtgaccctgccacctcagcctcacaccaaggagggcgttgatgcctacaacgaagtgatcgcccgggtgcgaatgtgggtgaacctgaacctgtggcagaagctgaagctaagcagagatgatgccaagcctctgctgagactgaagggattcccttcctttcctctggtcgagagacaggccaacgaagtggactggtgggacatggtgtgtaacgtgaagaagctgatcaacgagaaaaaggaggatggcaaggtgttttggcagaatctggctggctacaagagacaggaagccctgagaccatacctgagcagcgaggaagatcggaagaagggaaagaaattcgctcggtaccagctgggcgacctgctgctgcacctggaaaagaagcacggcgaggactggggaaaggtgtacgacgaggcctgggagcggattgacaagaaagtggaaggcctgagcaagcacatcaagctggaagaggaacggagaagcgaggacgcccagagcaaggccgccctgaccgactggctgcgggctaaggccagcttcgtgatcgagggcctgaaggaggccgacaaggacgagttctgcagatgcgagctgaagctgcagaagtggtacggggacctgcggggaaagcccttcgccatcgaagccgagaacagcatcctggacatcagcggcttcagcaagcagtacaactgtgccttcatctggcagaaggacggcgtgaagaagctgaacctgtacctgatcatcaactacttcaagggcggcaagctgcggttcaagaagatcaaacctgaagccttcgaagccaacagattctacaccgtgatcaacaaaaagagcggcgagatcgtgcccatggaggtgaacttcaacttcgacgaccccaacctgatcatcctgcctctggcctttggcaagagacagggcagagaattcatctggaacgacctgctgtccctggaaaccggcagcctgaagctggccaacggaagagtgatcgagaagacactgtacaacagaagaacccggcaggatgagcctgccctgttcgtggccctgaccttcgagcggcgggaggtcctggactcctccaatatcaaaccaatgaacctgatcggcgtggcaagaggcgaaaacatccccgccgtgatcgccctgaccgaccccgagggctgcccactgagccggtttaaggatagcctgggaaacccaacccacatcctgagaatcggcgagagctataaggagaagcagcggaccatccaggccaagaaggaggtggagcagcggagagccggcggctacagccggaagtacgccagcaaagccaagaatctggcagacgatatggtgagaaacaccgctagagatctgctgtactacgccgtgacccaggatgccatgctgatcttcgccaacctgagccggggcttcggccggcagggcaagcggaccttcatggccgagagacagtacacacggatggaggactggctgaccgccaagctggcctacgagggcctgagcaagacctacctgtccaagacactggcccagtacacctccaagacatgcagcaactgtgggtttaccatcaccagcgccgactacgacagggtgctggagaagctgaagaagacagcaacaggctggatgaccacaattaacggcaaggagctgaaggtggagggccagattacctactacaacagatacaagagacagaacgtagtcaaggacctgtccgtcgagctggatagactgagcgaagaatctgtgaacaacgacatctcctcctggacaaagggcagaagcggagaagctctgagcctcctgaagaaaagattctcccatagacccgtgcaggagaagttcgtgtgcctgaactgcggcttcgagacacacgcagccgagcaagccgccctgaacatcgccagatcctggctgttcctgcggagccaggagtacaagaaataccagacaaacaagacaaccggcaacaccgataagagagccttcgtcgagacctggcagtccttttaccggaagaagcttaaggaggtgtggaaacctgccgtgcggtctggcggatctggcggaggctcctatgaacatggagggcctggtgatgttccaggacctgagcatcgacttcagccaggaggagtgggagtgcctgaaccccacccagaaggacctgtacagggacgtgatgatggagaactacagcagcctgctgagcctgggcctgagcatccccaagcccgacgtgatcagcctgctggagcagggcaaggagccctggatggtgagcagggacgtgctgggcggctggtgccccgacaggctgggatctggctccggcagcggccccaagaaaaagagaaaagtctaagctgccttctgcggggcttgccttctggccatgcccttcttctctcccttgcacctgtacctcttggtctttgaataaagcctgagtaggaaggctagcaaaaaaaaaaaaaaaaaaaaaaaaaaaaaaaaaaaaaaaaaaaaaaaaaaaaaaaaaaaaaaaaaaaaaaaaaaaaaaaa

SEQ ID NO: 15864 - RNA, 9485 nt, synthetic construct
  source 1..9485: mol_type = other RNA
aggaaataagagagaaaagaagagtaagaagaaatataagagccaccatggcccctaagaagaagcgtaaagtgagccggatggaacgcctcgtctacgaggtgcggcagaagtgcagaaacatcgaggacatctgcatctcctgcggatctctgaacgtgaccctggagcacccactgttcatcggcggcatgtgccagaactgtaaaaactgttttctggagtgtgcctatcaatacgacgatgacggctaccagagctactgcaccatctgttgcggcggaagagaggtgctgatgtgtggaaataacaactgctgccggtgcttctgcgtggaatgcgtggacctgctggtgggccccggcgccgcccaggccgctattaaggaagatccttggaactgctacatgtgcggccacaagggcacatacggcctgctgagacggagagaggactggcctagcagactgcagatgttcttcgccaataaccacgaccaggagttcgacccccctaaggtgtaccctcccgtccccgccgagaagagaaagcccatccgggtcctgagcctgttcgatggcatcgccaccggtctgctggtgctgaaggacctgggcatccaggtggataggtacattgcctccgaggtgtgcgaggactccatcaccgtgggaatggtgcgtcatcagggcaagatcatgtacgtgggcgacgtgcggagcgtgacacagaagcatatccaggagtggggccctttcgacctggtgatcggcggcagcccttgcaatgacctgagcatcgtgaacccagcccggaagggcctgtacgagggaaccggcagactgttcttcgagttttacagactgctgcacgacgcccggcctaaggaaggcgacgaccggcccttcttttggctgttcgagaatgtggtggccatgggagtcagcgacaagcgggatattagccggttcctggagagcaaccccgtgatgatcgatgccaaggaagtgagcgccgcccaccgggccagatacttctggggcaatctgcctggcatgaacagacccctggccagcaccgtgaacgacaagctggagctgcaggagtgcctggagcacggccggatcgccaagttcagcaaggtgagaaccatcaccacccgaagcaacagcatcaaacaaggcaaggaccagcactttcctgtgttcatgaacgagaaggaggacatcctgtggtgtaccgagatggagagagtgttcgggttcccagtccactacacagatgtcagcaacatgtctagactggccagacagagactgctgggaagaagctggtccgtccctgtgatcagacacctgttcgcccctctgaaggagtacttcgcctgcgtgagcagcggcaacagcaacgccaacagccggggccccagcttctctagcggcctggtgccactgtccctgagagggagccacatgggccccatggagatctacaaaaccgtgagcgcctggaagcggcagcctgtgcgcgtgctgagcctgtttcggaatatcgataaagtcctgaaaagcctgggattcctggagagcggctctggctccggcggtggcaccctgaagtacgtggaggatgtgacaaacgtggtcagacgggatgtggagaagtggggccccttcgatctggtgtacggcagcacccaacccctgggcagctcttgtgaccggtgccctggctggtacatgtttcagttccaccggatcctgcagtacgccctgccgagacaggagtcccagcggccattcttttggattttcatggacaacttgctgctgaccgaggatgaccaggaaactaccactcggttcctgcagaccgaagccgtgaccctgcaggacgtgagaggccgggactaccagaacgccatgcgggtgtggtccaacatccctggactgaaaagcaagcacgcacctctgacccctaaagaagaggagtacctgcaggcccaggtgcggagcagaagcaagctggacgcccctaaggtggatctgctggtgaagaattgcctcctgcccctgagagagtacttcaagtatttcagccagaatagtctgcccctgggaggcagcggcggcggcgccctggtgacatttgaggacgtcgccgtgcggttcacccaggaggaatgggctctgctggatccttctcagaaaatcctgtaccgggacgtgatgagagagacataccggaatctgacctccgtgggcatcaactgggaatgttgggaccttgaagcctgcttcagaagcctgggaagaaacctgagagtgcaggtggtgaagagaaagtgcgagctgaccaacagcggcccctgcgccgagggcggcccaagcagcggcgcccctcctcccagcggcggcagcccagccggctccccaacctctaccgaggagggcacctctgagtccgccacccccgagagcggccctggcacctccaccgagcccagcgagggcagcgcacccggcagccctgccggcagccccacctccacagaggagggaaccagcaccgagcccagcgaaggcagcgccccaggcaccagcaccgagcctagtgagcaggagattaaacggatcaacaagatcagaagaagacttgtgaaagacagcaacaccaagaaggccggcaagacaggccccatgaaaaccctgctggttagagtgatgacacccgatctgagagagcggctggaaaacctgagaaagaagcctgaaaatatcccccagcccatcagcaatacatctagagccaacctgaataagctgctgaccgattacaccgaaatgaagaaggcgatcctgcatgtgtactgggaagagttccagaaggaccctgtgggcctgatgagccgggtggcccagcctgccagcaagaagatcgatcagaacaagctgaaacctgagatggacgagaagggcaacctgaccaccgccggctttgcctgctctcagtgtggccagcccctgttcgtgtacaagctggagcaggtgtctgagaagggcaaggcttacaccaactacttcggacggtgcaatgtggccgagcacgaaaagctgatcctgctggcccagctgaagcccgagaaggatagcgacgaagccgtgacatatagcctgggaaagtttgggcagagggccctggatttctacagcattcatgtgaccaaggagtccacccaccccgtgaagcccctggcccagatcgccggaaacagatacgcctccggacctgtgggaaaggccctgagcgacgcatgtatgggcacaatcgcctccttcctgtctaagtaccaggacatcatcatcgaacaccagaaggtggtgaagggcaaccagaagagactggagagcctgcgggagctggccggcaaggaaaacctggaataccctagcgtgaccctgccacctcagcctcacaccaaggagggcgttgatgcctacaacgaagtgatcgcccgggtgcgaatgtgggtgaacctgaacctgtggcagaagctgaagctaagcagagatgatgccaagcctctgctgagactgaagggattcccttcctttcctctggtcgagagacaggccaacgaagtggactggtgggacatggtgtgtaacgtgaagaagctgatcaacgagaaaaaggaggatggcaaggtgttttggcagaatctggctggctacaagagacaggaagccctgagaccatacctgagcagcgaggaagatcggaagaagggaaagaaattcgctcggtaccagctgggcgacctgctgctgcacctggaaaagaagcacggcgaggactggggaaaggtgtacgacgaggcctgggagcggattgacaagaaagtggaaggcctgagcaagcacatcaagctggaagaggaacggagaagcgaggacgcccagagcaaggccgccctgaccgactggctgcgggctaaggccagcttcgtgatcgagggcctgaaggaggccgacaaggacgagttctgcagatgcgagctgaagctgcagaagtggtacggggacctgcggggaaagcccttcgccatcgaagccgagaacagcatcctggacatcagcggcttcagcaagcagtacaactgtgccttcatctggcagaaggacggcgtgaagaagctgaacctgtacctgatcatcaactacttcaagggcggcaagctgcggttcaagaagatcaaacctgaagccttcgaagccaacagattctacaccgtgatcaacaaaaagagcggcgagatcgtgcccatggaggtgaacttcaacttcgacgaccccaacctgatcatcctgcctctggcctttggcaagagacagggcagagaattcatctggaacgacctgctgtccctggaaaccggcagcctgaagctggccaacggaagagtgatcgagaagacactgtacaacagaagaacccggcaggatgagcctgccctgttcgtggccctgaccttcgagcggcgggaggtcctggactcctccaatatcaaaccaatgaacctgatcggcgtggcaagaggcgaaaacatccccgccgtgatcgccctgaccgaccccgagggctgcccactgagccggtttaaggatagcctgggaaacccaacccacatcctgagaatcggcgagagctataaggagaagcagcggaccatccaggccaagaaggaggtggagcagcggagagccggcggctacagccggaagtacgccagcaaagccaagaatctggcagacgatatggtgagaaacaccgctagagatctgctgtactacgccgtgacccaggatgccatgctgatcttcgccaacctgagccggggcttcggccggcagggcaagcggaccttcatggccgagagacagtacacacggatggaggactggctgaccgccaagctggcctacgagggcctgagcaagacctacctgtccaagacactggcccagtacacctccaagacatgcagcaactgtgggtttaccatcaccagcgccgactacgacagggtgctggagaagctgaagaagacagcaacaggctggatgaccacaattaacggcaaggagctgaaggtggagggccagattacctactacaacagatacaagagacagaacgtagtcaaggacctgtccgtcgagctggatagactgagcgaagaatctgtgaacaacgacatctcctcctggacaaagggcagaagcggagaagctctgagcctcctgaagaaaagattctcccatagacccgtgcaggagaagttcgtgtgcctgaactgcggcttcgagacacacgcagccgagcaagccgccctgaacatcgccagatcctggctgttcctgcggagccaggagtacaagaaataccagacaaacaagacaaccggcaacaccgataagagagccttcgtcgagacctggcagtccttttaccggaagaagcttaaggaggtgtggaaacctgccgtgcggtctggcggatctggcggaggctccatgaccttcgaggacgtgagcgtggagttcacccagggcgagtggggccagctgaaccccgcccagaaggacctgtacagggaggtgatgctggagaacttcaggaacctggccttcctgggcctgcccgtgagcaagccctacgtgatctgccagctggaggagggcggcgagcccttcatcgtggagagggaggtgagcaccggcgcctacagcgactgggagaggaggagcaagagcaagggcggcccaagcagcggcgcccctcctcccagcggcggcagcccagccggctccccaacctctaccgaggagggcacctctgagtccgccacccccgagagcggccctggcacctccaccgagcccagcgagggcagcgcacccggcagccctgccggcagccccacctccacagaggagggaaccagcaccgagcccagcgaaggcagcgccccaggcaccagcaccgagcctagtgagcaggagattaaacggatcaacaagatcagaagaagacttgtgaaagacagcaacaccaagaaggccggcaagacaggccccatgaaaaccctgctggttagagtgatgacacccgatctgagagagcggctggaaaacctgagaaagaagcctgaaaatatcccccagcccatcagcaatacatctagagccaacctgaataagctgctgaccgattacaccgaaatgaagaaggcgatcctgcatgtgtactgggaagagttccagaaggaccctgtgggcctgatgagccgggtggcccagcctgccagcaagaagatcgatcagaacaagctgaaacctgagatggacgagaagggcaacctgaccaccgccggctttgcctgctctcagtgtggccagcccctgttcgtgtacaagctggagcaggtgtctgagaagggcaaggcttacaccaactacttcggacggtgcaatgtggccgagcacgaaaagctgatcctgctggcccagctgaagcccgagaaggatagcgacgaagccgtgacatatagcctgggaaagtttgggcagagggccctggatttctacagcattcatgtgaccaaggagtccacccaccccgtgaagcccctggcccagatcgccggaaacagatacgcctccggacctgtgggaaaggccctgagcgacgcatgtatgggcacaatcgcctccttcctgtctaagtaccaggacatcatcatcgaacaccagaaggtggtgaagggcaaccagaagagactggagagcctgcgggagctggccggcaaggaaaacctggaataccctagcgtgaccctgccacctcagcctcacaccaaggagggcgttgatgcctacaacgaagtgatcgcccgggtgcgaatgtgggtgaacctgaacctgtggcagaagctgaagctaagcagagatgatgccaagcctctgctgagactgaagggattcccttcctttcctctggtcgagagacaggccaacgaagtggactggtgggacatggtgtgtaacgtgaagaagctgatcaacgagaaaaaggaggatggcaaggtgttttggcagaatctggctggctacaagagacaggaagccctgagaccatacctgagcagcgaggaagatcggaagaagggaaagaaattcgctcggtaccagctgggcgacctgctgctgcacctggaaaagaagcacggcgaggactggggaaaggtgtacgacgaggcctgggagcggattgacaagaaagtggaaggcctgagcaagcacatcaagctggaagaggaacggagaagcgaggacgcccagagcaaggccgccctgaccgactggctgcgggctaaggccagcttcgtgatcgagggcctgaaggaggccgacaaggacgagttctgcagatgcgagctgaagctgcagaagtggtacggggacctgcggggaaagcccttcgccatcgaagccgagaacagcatcctggacatcagcggcttcagcaagcagtacaactgtgccttcatctggcagaaggacggcgtgaagaagctgaacctgtacctgatcatcaactacttcaagggcggcaagctgcggttcaagaagatcaaacctgaagccttcgaagccaacagattctacaccgtgatcaacaaaaagagcggcgagatcgtgcccatggaggtgaacttcaacttcgacgaccccaacctgatcatcctgcctctggcctttggcaagagacagggcagagaattcatctggaacgacctgctgtccctggaaaccggcagcctgaagctggccaacggaagagtgatcgagaagacactgtacaacagaagaacccggcaggatgagcctgccctgttcgtggccctgaccttcgagcggcgggaggtcctggactcctccaatatcaaaccaatgaacctgatcggcgtggcaagaggcgaaaacatccccgccgtgatcgccctgaccgaccccgagggctgcccactgagccggtttaaggatagcctgggaaacccaacccacatcctgagaatcggcgagagctataaggagaagcagcggaccatccaggccaagaaggaggtggagcagcggagagccggcggctacagccggaagtacgccagcaaagccaagaatctggcagacgatatggtgagaaacaccgctagagatctgctgtactacgccgtgacccaggatgccatgctgatcttcgccaacctgagccggggcttcggccggcagggcaagcggaccttcatggccgagagacagtacacacggatggaggactggctgaccgccaagctggcctacgagggcctgagcaagacctacctgtccaagacactggcccagtacacctccaagacatgcagcaactgtgggtttaccatcaccagcgccgactacgacagggtgctggagaagctgaagaagacagcaacaggctggatgaccacaattaacggcaaggagctgaaggtggagggccagattacctactacaacagatacaagagacagaacgtagtcaaggacctgtccgtcgagctggatagactgagcgaagaatctgtgaacaacgacatctcctcctggacaaagggcagaagcggagaagctctgagcctcctgaagaaaagattctcccatagacccgtgcaggagaagttcgtgtgcctgaactgcggcttcgagacacacgcagccgagcaagccgccctgaacatcgccagatcctggctgttcctgcggagccaggagtacaagaaataccagacaaacaagacaaccggcaacaccgataagagagccttcgtcgagacctggcagtccttttaccggaagaagcttaaggaggtgtggaaacctgccgtgcggtctggcggatctggcggaggctcctatgaccttcgaggacgtgagcgtggagttcacccagggcgagtggggccagctgaaccccgcccagaaggacctgtacagggaggtgatgctggagaacttcaggaacctggccttcctgggcctgcccgtgagcaagccctacgtgatctgccagctggaggagggcggcgagcccttcatcgtggagagggaggtgagcaccggcgcctacagcgactgggagaggaggagcaagagcaagggatctggctccggcagcggccccaagaaaaagagaaaagtctaagctgccttctgcggggcttgccttctggccatgcccttcttctctcccttgcacctgtacctcttggtctttgaataaagcctgagtaggaaggctagcaaaaaaaaaaaaaaaaaaaaaaaaaaaaaaaaaaaaaaaaaaaaaaaaaaaaaaaaaaaaaaaaaaaaaaaaaaaaaaaa

SEQ ID NO: 15865 - RNA, 9485 nt, synthetic construct
  source 1..9485: mol_type = other RNA
aggaaataagagagaaaagaagagtaagaagaaatataagagccaccatggcccctaagaagaagcgtaaagtgagccggatggaacgcctcgtctacgaggtgcggcagaagtgcagaaacatcgaggacatctgcatctcctgcggatctctgaacgtgaccctggagcacccactgttcatcggcggcatgtgccagaactgtaaaaactgttttctggagtgtgcctatcaatacgacgatgacggctaccagagctactgcaccatctgttgcggcggaagagaggtgctgatgtgtggaaataacaactgctgccggtgcttctgcgtggaatgcgtggacctgctggtgggccccggcgccgcccaggccgctattaaggaagatccttggaactgctacatgtgcggccacaagggcacatacggcctgctgagacggagagaggactggcctagcagactgcagatgttcttcgccaataaccacgaccaggagttcgacccccctaaggtgtaccctcccgtccccgccgagaagagaaagcccatccgggtcctgagcctgttcgatggcatcgccaccggtctgctggtgctgaaggacctgggcatccaggtggataggtacattgcctccgaggtgtgcgaggactccatcaccgtgggaatggtgcgtcatcagggcaagatcatgtacgtgggcgacgtgcggagcgtgacacagaagcatatccaggagtggggccctttcgacctggtgatcggcggcagcccttgcaatgacctgagcatcgtgaacccagcccggaagggcctgtacgagggaaccggcagactgttcttcgagttttacagactgctgcacgacgcccggcctaaggaaggcgacgaccggcccttcttttggctgttcgagaatgtggtggccatgggagtcagcgacaagcgggatattagccggttcctggagagcaaccccgtgatgatcgatgccaaggaagtgagcgccgcccaccgggccagatacttctggggcaatctgcctggcatgaacagacccctggccagcaccgtgaacgacaagctggagctgcaggagtgcctggagcacggccggatcgccaagttcagcaaggtgagaaccatcaccacccgaagcaacagcatcaaacaaggcaaggaccagcactttcctgtgttcatgaacgagaaggaggacatcctgtggtgtaccgagatggagagagtgttcgggttcccagtccactacacagatgtcagcaacatgtctagactggccagacagagactgctgggaagaagctggtccgtccctgtgatcagacacctgttcgcccctctgaaggagtacttcgcctgcgtgagcagcggcaacagcaacgccaacagccggggccccagcttctctagcggcctggtgccactgtccctgagagggagccacatgggccccatggagatctacaaaaccgtgagcgcctggaagcggcagcctgtgcgcgtgctgagcctgtttcggaatatcgataaagtcctgaaaagcctgggattcctggagagcggctctggctccggcggtggcaccctgaagtacgtggaggatgtgacaaacgtggtcagacgggatgtggagaagtggggccccttcgatctggtgtacggcagcacccaacccctgggcagctcttgtgaccggtgccctggctggtacatgtttcagttccaccggatcctgcagtacgccctgccgagacaggagtcccagcggccattcttttggattttcatggacaacttgctgctgaccgaggatgaccaggaaactaccactcggttcctgcagaccgaagccgtgaccctgcaggacgtgagaggccgggactaccagaacgccatgcgggtgtggtccaacatccctggactgaaaagcaagcacgcacctctgacccctaaagaagaggagtacctgcaggcccaggtgcggagcagaagcaagctggacgcccctaaggtggatctgctggtgaagaattgcctcctgcccctgagagagtacttcaagtatttcagccagaatagtctgcccctgggaggcagcggcggcggcgccctggtgacatttgaggacgtcgccgtgcggttcacccaggaggaatgggctctgctggatccttctcagaaaatcctgtaccgggacgtgatgagagagacataccggaatctgacctccgtgggcatcaactgggaatgttgggaccttgaagcctgcttcagaagcctgggaagaaacctgagagtgcaggtggtgaagagaaagtgcgagctgaccaacagcggcccctgcgccgagggcggcccaagcagcggcgcccctcctcccagcggcggcagcccagccggctccccaacctctaccgaggagggcacctctgagtccgccacccccgagagcggccctggcacctccaccgagcccagcgagggcagcgcacccggcagccctgccggcagccccacctccacagaggagggaaccagcaccgagcccagcgaaggcagcgccccaggcaccagcaccgagcctagtgagcaggagattaaacggatcaacaagatcagaagaagacttgtgaaagacagcaacaccaagaaggccggcaagacaggccccatgaaaaccctgctggttagagtgatgacacccgatctgagagagcggctggaaaacctgagaaagaagcctgaaaatatcccccagcccatcagcaatacatctagagccaacctgaataagctgctgaccgattacaccgaaatgaagaaggcgatcctgcatgtgtactgggaagagttccagaaggaccctgtgggcctgatgagccgggtggcccagcctgccagcaagaagatcgatcagaacaagctgaaacctgagatggacgagaagggcaacctgaccaccgccggctttgcctgctctcagtgtggccagcccctgttcgtgtacaagctggagcaggtgtctgagaagggcaaggcttacaccaactacttcggacggtgcaatgtggccgagcacgaaaagctgatcctgctggcccagctgaagcccgagaaggatagcgacgaagccgtgacatatagcctgggaaagtttgggcagagggccctggatttctacagcattcatgtgaccaaggagtccacccaccccgtgaagcccctggcccagatcgccggaaacagatacgcctccggacctgtgggaaaggccctgagcgacgcatgtatgggcacaatcgcctccttcctgtctaagtaccaggacatcatcatcgaacaccagaaggtggtgaagggcaaccagaagagactggagagcctgcgggagctggccggcaaggaaaacctggaataccctagcgtgaccctgccacctcagcctcacaccaaggagggcgttgatgcctacaacgaagtgatcgcccgggtgcgaatgtgggtgaacctgaacctgtggcagaagctgaagctaagcagagatgatgccaagcctctgctgagactgaagggattcccttcctttcctctggtcgagagacaggccaacgaagtggactggtgggacatggtgtgtaacgtgaagaagctgatcaacgagaaaaaggaggatggcaaggtgttttggcagaatctggctggctacaagagacaggaagccctgagaccatacctgagcagcgaggaagatcggaagaagggaaagaaattcgctcggtaccagctgggcgacctgctgctgcacctggaaaagaagcacggcgaggactggggaaaggtgtacgacgaggcctgggagcggattgacaagaaagtggaaggcctgagcaagcacatcaagctggaagaggaacggagaagcgaggacgcccagagcaaggccgccctgaccgactggctgcgggctaaggccagcttcgtgatcgagggcctgaaggaggccgacaaggacgagttctgcagatgcgagctgaagctgcagaagtggtacggggacctgcggggaaagcccttcgccatcgaagccgagaacagcatcctggacatcagcggcttcagcaagcagtacaactgtgccttcatctggcagaaggacggcgtgaagaagctgaacctgtacctgatcatcaactacttcaagggcggcaagctgcggttcaagaagatcaaacctgaagccttcgaagccaacagattctacaccgtgatcaacaaaaagagcggcgagatcgtgcccatggaggtgaacttcaacttcgacgaccccaacctgatcatcctgcctctggcctttggcaagagacagggcagagaattcatctggaacgacctgctgtccctggaaaccggcagcctgaagctggccaacggaagagtgatcgagaagacactgtacaacagaagaacccggcaggatgagcctgccctgttcgtggccctgaccttcgagcggcgggaggtcctggactcctccaatatcaaaccaatgaacctgatcggcgtggcaagaggcgaaaacatccccgccgtgatcgccctgaccgaccccgagggctgcccactgagccggtttaaggatagcctgggaaacccaacccacatcctgagaatcggcgagagctataaggagaagcagcggaccatccaggccaagaaggaggtggagcagcggagagccggcggctacagccggaagtacgccagcaaagccaagaatctggcagacgatatggtgagaaacaccgctagagatctgctgtactacgccgtgacccaggatgccatgctgatcttcgccaacctgagccggggcttcggccggcagggcaagcggaccttcatggccgagagacagtacacacggatggaggactggctgaccgccaagctggcctacgagggcctgagcaagacctacctgtccaagacactggcccagtacacctccaagacatgcagcaactgtgggtttaccatcaccagcgccgactacgacagggtgctggagaagctgaagaagacagcaacaggctggatgaccacaattaacggcaaggagctgaaggtggagggccagattacctactacaacagatacaagagacagaacgtagtcaaggacctgtccgtcgagctggatagactgagcgaagaatctgtgaacaacgacatctcctcctggacaaagggcagaagcggagaagctctgagcctcctgaagaaaagattctcccatagacccgtgcaggagaagttcgtgtgcctgaactgcggcttcgagacacacgcagccgagcaagccgccctgaacatcgccagatcctggctgttcctgcggagccaggagtacaagaaataccagacaaacaagacaaccggcaacaccgataagagagccttcgtcgagacctggcagtccttttaccggaagaagcttaaggaggtgtggaaacctgccgtgcggtctggcggatctggcggaggctccctgcagaagagcgtgaccttcgaggacgtggccgtgtacttcacccagaccgagtgggacggcctgagccccgcccagagggccctgtacagggacgtgatgctggagaactacggcaacgtggccagcctgggcttcagcctgttcaagcccgccgtgatcagccagctggagggcgccggcgagctgggcggccccagccccctggtggacggcaccgagaccggcccccagggcctgtggggcggcccaagcagcggcgcccctcctcccagcggcggcagcccagccggctccccaacctctaccgaggagggcacctctgagtccgccacccccgagagcggccctggcacctccaccgagcccagcgagggcagcgcacccggcagccctgccggcagccccacctccacagaggagggaaccagcaccgagcccagcgaaggcagcgccccaggcaccagcaccgagcctagtgagcaggagattaaacggatcaacaagatcagaagaagacttgtgaaagacagcaacaccaagaaggccggcaagacaggccccatgaaaaccctgctggttagagtgatgacacccgatctgagagagcggctggaaaacctgagaaagaagcctgaaaatatcccccagcccatcagcaatacatctagagccaacctgaataagctgctgaccgattacaccgaaatgaagaaggcgatcctgcatgtgtactgggaagagttccagaaggaccctgtgggcctgatgagccgggtggcccagcctgccagcaagaagatcgatcagaacaagctgaaacctgagatggacgagaagggcaacctgaccaccgccggctttgcctgctctcagtgtggccagcccctgttcgtgtacaagctggagcaggtgtctgagaagggcaaggcttacaccaactacttcggacggtgcaatgtggccgagcacgaaaagctgatcctgctggcccagctgaagcccgagaaggatagcgacgaagccgtgacatatagcctgggaaagtttgggcagagggccctggatttctacagcattcatgtgaccaaggagtccacccaccccgtgaagcccctggcccagatcgccggaaacagatacgcctccggacctgtgggaaaggccctgagcgacgcatgtatgggcacaatcgcctccttcctgtctaagtaccaggacatcatcatcgaacaccagaaggtggtgaagggcaaccagaagagactggagagcctgcgggagctggccggcaaggaaaacctggaataccctagcgtgaccctgccacctcagcctcacaccaaggagggcgttgatgcctacaacgaagtgatcgcccgggtgcgaatgtgggtgaacctgaacctgtggcagaagctgaagctaagcagagatgatgccaagcctctgctgagactgaagggattcccttcctttcctctggtcgagagacaggccaacgaagtggactggtgggacatggtgtgtaacgtgaagaagctgatcaacgagaaaaaggaggatggcaaggtgttttggcagaatctggctggctacaagagacaggaagccctgagaccatacctgagcagcgaggaagatcggaagaagggaaagaaattcgctcggtaccagctgggcgacctgctgctgcacctggaaaagaagcacggcgaggactggggaaaggtgtacgacgaggcctgggagcggattgacaagaaagtggaaggcctgagcaagcacatcaagctggaagaggaacggagaagcgaggacgcccagagcaaggccgccctgaccgactggctgcgggctaaggccagcttcgtgatcgagggcctgaaggaggccgacaaggacgagttctgcagatgcgagctgaagctgcagaagtggtacggggacctgcggggaaagcccttcgccatcgaagccgagaacagcatcctggacatcagcggcttcagcaagcagtacaactgtgccttcatctggcagaaggacggcgtgaagaagctgaacctgtacctgatcatcaactacttcaagggcggcaagctgcggttcaagaagatcaaacctgaagccttcgaagccaacagattctacaccgtgatcaacaaaaagagcggcgagatcgtgcccatggaggtgaacttcaacttcgacgaccccaacctgatcatcctgcctctggcctttggcaagagacagggcagagaattcatctggaacgacctgctgtccctggaaaccggcagcctgaagctggccaacggaagagtgatcgagaagacactgtacaacagaagaacccggcaggatgagcctgccctgttcgtggccctgaccttcgagcggcgggaggtcctggactcctccaatatcaaaccaatgaacctgatcggcgtggcaagaggcgaaaacatccccgccgtgatcgccctgaccgaccccgagggctgcccactgagccggtttaaggatagcctgggaaacccaacccacatcctgagaatcggcgagagctataaggagaagcagcggaccatccaggccaagaaggaggtggagcagcggagagccggcggctacagccggaagtacgccagcaaagccaagaatctggcagacgatatggtgagaaacaccgctagagatctgctgtactacgccgtgacccaggatgccatgctgatcttcgccaacctgagccggggcttcggccggcagggcaagcggaccttcatggccgagagacagtacacacggatggaggactggctgaccgccaagctggcctacgagggcctgagcaagacctacctgtccaagacactggcccagtacacctccaagacatgcagcaactgtgggtttaccatcaccagcgccgactacgacagggtgctggagaagctgaagaagacagcaacaggctggatgaccacaattaacggcaaggagctgaaggtggagggccagattacctactacaacagatacaagagacagaacgtagtcaaggacctgtccgtcgagctggatagactgagcgaagaatctgtgaacaacgacatctcctcctggacaaagggcagaagcggagaagctctgagcctcctgaagaaaagattctcccatagacccgtgcaggagaagttcgtgtgcctgaactgcggcttcgagacacacgcagccgagcaagccgccctgaacatcgccagatcctggctgttcctgcggagccaggagtacaagaaataccagacaaacaagacaaccggcaacaccgataagagagccttcgtcgagacctggcagtccttttaccggaagaagcttaaggaggtgtggaaacctgccgtgcggtctggcggatctggcggaggctcctctgcagaagagcgtgaccttcgaggacgtggccgtgtacttcacccagaccgagtgggacggcctgagccccgcccagagggccctgtacagggacgtgatgctggagaactacggcaacgtggccagcctgggcttcagcctgttcaagcccgccgtgatcagccagctggagggcgccggcgagctgggcggccccagccccctggtggacggcaccgagaccggcccccagggcctgtggggatctggctccggcagcggccccaagaaaaagagaaaagtctaagctgccttctgcggggcttgccttctggccatgcccttcttctctcccttgcacctgtacctcttggtctttgaataaagcctgagtaggaaggctagcaaaaaaaaaaaaaaaaaaaaaaaaaaaaaaaaaaaaaaaaaaaaaaaaaaaaaaaaaaaaaaaaaaaaaaaaaaaaaaaa

SEQ ID NO: 15866 - RNA, 9485 nt, synthetic construct
  source 1..9485: mol_type = other RNA
aggaaataagagagaaaagaagagtaagaagaaatataagagccaccatggcccctaagaagaagcgtaaagtgagccggatggaacgcctcgtctacgaggtgcggcagaagtgcagaaacatcgaggacatctgcatctcctgcggatctctgaacgtgaccctggagcacccactgttcatcggcggcatgtgccagaactgtaaaaactgttttctggagtgtgcctatcaatacgacgatgacggctaccagagctactgcaccatctgttgcggcggaagagaggtgctgatgtgtggaaataacaactgctgccggtgcttctgcgtggaatgcgtggacctgctggtgggccccggcgccgcccaggccgctattaaggaagatccttggaactgctacatgtgcggccacaagggcacatacggcctgctgagacggagagaggactggcctagcagactgcagatgttcttcgccaataaccacgaccaggagttcgacccccctaaggtgtaccctcccgtccccgccgagaagagaaagcccatccgggtcctgagcctgttcgatggcatcgccaccggtctgctggtgctgaaggacctgggcatccaggtggataggtacattgcctccgaggtgtgcgaggactccatcaccgtgggaatggtgcgtcatcagggcaagatcatgtacgtgggcgacgtgcggagcgtgacacagaagcatatccaggagtggggccctttcgacctggtgatcggcggcagcccttgcaatgacctgagcatcgtgaacccagcccggaagggcctgtacgagggaaccggcagactgttcttcgagttttacagactgctgcacgacgcccggcctaaggaaggcgacgaccggcccttcttttggctgttcgagaatgtggtggccatgggagtcagcgacaagcgggatattagccggttcctggagagcaaccccgtgatgatcgatgccaaggaagtgagcgccgcccaccgggccagatacttctggggcaatctgcctggcatgaacagacccctggccagcaccgtgaacgacaagctggagctgcaggagtgcctggagcacggccggatcgccaagttcagcaaggtgagaaccatcaccacccgaagcaacagcatcaaacaaggcaaggaccagcactttcctgtgttcatgaacgagaaggaggacatcctgtggtgtaccgagatggagagagtgttcgggttcccagtccactacacagatgtcagcaacatgtctagactggccagacagagactgctgggaagaagctggtccgtccctgtgatcagacacctgttcgcccctctgaaggagtacttcgcctgcgtgagcagcggcaacagcaacgccaacagccggggccccagcttctctagcggcctggtgccactgtccctgagagggagccacatgggccccatggagatctacaaaaccgtgagcgcctggaagcggcagcctgtgcgcgtgctgagcctgtttcggaatatcgataaagtcctgaaaagcctgggattcctggagagcggctctggctccggcggtggcaccctgaagtacgtggaggatgtgacaaacgtggtcagacgggatgtggagaagtggggccccttcgatctggtgtacggcagcacccaacccctgggcagctcttgtgaccggtgccctggctggtacatgtttcagttccaccggatcctgcagtacgccctgccgagacaggagtcccagcggccattcttttggattttcatggacaacttgctgctgaccgaggatgaccaggaaactaccactcggttcctgcagaccgaagccgtgaccctgcaggacgtgagaggccgggactaccagaacgccatgcgggtgtggtccaacatccctggactgaaaagcaagcacgcacctctgacccctaaagaagaggagtacctgcaggcccaggtgcggagcagaagcaagctggacgcccctaaggtggatctgctggtgaagaattgcctcctgcccctgagagagtacttcaagtatttcagccagaatagtctgcccctgggaggcagcggcggcggcgccctggtgacatttgaggacgtcgccgtgcggttcacccaggaggaatgggctctgctggatccttctcagaaaatcctgtaccgggacgtgatgagagagacataccggaatctgacctccgtgggcatcaactgggaatgttgggaccttgaagcctgcttcagaagcctgggaagaaacctgagagtgcaggtggtgaagagaaagtgcgagctgaccaacagcggcccctgcgccgagggcggcccaagcagcggcgcccctcctcccagcggcggcagcccagccggctccccaacctctaccgaggagggcacctctgagtccgccacccccgagagcggccctggcacctccaccgagcccagcgagggcagcgcacccggcagccctgccggcagccccacctccacagaggagggaaccagcaccgagcccagcgaaggcagcgccccaggcaccagcaccgagcctagtgagcaggagattaaacggatcaacaagatcagaagaagacttgtgaaagacagcaacaccaagaaggccggcaagacaggccccatgaaaaccctgctggttagagtgatgacacccgatctgagagagcggctggaaaacctgagaaagaagcctgaaaatatcccccagcccatcagcaatacatctagagccaacctgaataagctgctgaccgattacaccgaaatgaagaaggcgatcctgcatgtgtactgggaagagttccagaaggaccctgtgggcctgatgagccgggtggcccagcctgccagcaagaagatcgatcagaacaagctgaaacctgagatggacgagaagggcaacctgaccaccgccggctttgcctgctctcagtgtggccagcccctgttcgtgtacaagctggagcaggtgtctgagaagggcaaggcttacaccaactacttcggacggtgcaatgtggccgagcacgaaaagctgatcctgctggcccagctgaagcccgagaaggatagcgacgaagccgtgacatatagcctgggaaagtttgggcagagggccctggatttctacagcattcatgtgaccaaggagtccacccaccccgtgaagcccctggcccagatcgccggaaacagatacgcctccggacctgtgggaaaggccctgagcgacgcatgtatgggcacaatcgcctccttcctgtctaagtaccaggacatcatcatcgaacaccagaaggtggtgaagggcaaccagaagagactggagagcctgcgggagctggccggcaaggaaaacctggaataccctagcgtgaccctgccacctcagcctcacaccaaggagggcgttgatgcctacaacgaagtgatcgcccgggtgcgaatgtgggtgaacctgaacctgtggcagaagctgaagctaagcagagatgatgccaagcctctgctgagactgaagggattcccttcctttcctctggtcgagagacaggccaacgaagtggactggtgggacatggtgtgtaacgtgaagaagctgatcaacgagaaaaaggaggatggcaaggtgttttggcagaatctggctggctacaagagacaggaagccctgagaccatacctgagcagcgaggaagatcggaagaagggaaagaaattcgctcggtaccagctgggcgacctgctgctgcacctggaaaagaagcacggcgaggactggggaaaggtgtacgacgaggcctgggagcggattgacaagaaagtggaaggcctgagcaagcacatcaagctggaagaggaacggagaagcgaggacgcccagagcaaggccgccctgaccgactggctgcgggctaaggccagcttcgtgatcgagggcctgaaggaggccgacaaggacgagttctgcagatgcgagctgaagctgcagaagtggtacggggacctgcggggaaagcccttcgccatcgaagccgagaacagcatcctggacatcagcggcttcagcaagcagtacaactgtgccttcatctggcagaaggacggcgtgaagaagctgaacctgtacctgatcatcaactacttcaagggcggcaagctgcggttcaagaagatcaaacctgaagccttcgaagccaacagattctacaccgtgatcaacaaaaagagcggcgagatcgtgcccatggaggtgaacttcaacttcgacgaccccaacctgatcatcctgcctctggcctttggcaagagacagggcagagaattcatctggaacgacctgctgtccctggaaaccggcagcctgaagctggccaacggaagagtgatcgagaagacactgtacaacagaagaacccggcaggatgagcctgccctgttcgtggccctgaccttcgagcggcgggaggtcctggactcctccaatatcaaaccaatgaacctgatcggcgtggcaagaggcgaaaacatccccgccgtgatcgccctgaccgaccccgagggctgcccactgagccggtttaaggatagcctgggaaacccaacccacatcctgagaatcggcgagagctataaggagaagcagcggaccatccaggccaagaaggaggtggagcagcggagagccggcggctacagccggaagtacgccagcaaagccaagaatctggcagacgatatggtgagaaacaccgctagagatctgctgtactacgccgtgacccaggatgccatgctgatcttcgccaacctgagccggggcttcggccggcagggcaagcggaccttcatggccgagagacagtacacacggatggaggactggctgaccgccaagctggcctacgagggcctgagcaagacctacctgtccaagacactggcccagtacacctccaagacatgcagcaactgtgggtttaccatcaccagcgccgactacgacagggtgctggagaagctgaagaagacagcaacaggctggatgaccacaattaacggcaaggagctgaaggtggagggccagattacctactacaacagatacaagagacagaacgtagtcaaggacctgtccgtcgagctggatagactgagcgaagaatctgtgaacaacgacatctcctcctggacaaagggcagaagcggagaagctctgagcctcctgaagaaaagattctcccatagacccgtgcaggagaagttcgtgtgcctgaactgcggcttcgagacacacgcagccgagcaagccgccctgaacatcgccagatcctggctgttcctgcggagccaggagtacaagaaataccagacaaacaagacaaccggcaacaccgataagagagccttcgtcgagacctggcagtccttttaccggaagaagcttaaggaggtgtggaaacctgccgtgcggtctggcggatctggcggaggctccatccagggcagcctgaccttcaaggacgtggccgtggacttcacccaggacgagtggtgcctgctggacaacagccagaaggagctgtacctggaggtgatgctggagaacgtgcagaacctgctgagcgtgggcctgcccgtgcccagggagtacctgaccagctgcttccagcagggcgaggccccctggctgctggagcaggaggtgcccaggagcagctgccccgaggccgagaccaacggcggcccaagcagcggcgcccctcctcccagcggcggcagcccagccggctccccaacctctaccgaggagggcacctctgagtccgccacccccgagagcggccctggcacctccaccgagcccagcgagggcagcgcacccggcagccctgccggcagccccacctccacagaggagggaaccagcaccgagcccagcgaaggcagcgccccaggcaccagcaccgagcctagtgagcaggagattaaacggatcaacaagatcagaagaagacttgtgaaagacagcaacaccaagaaggccggcaagacaggccccatgaaaaccctgctggttagagtgatgacacccgatctgagagagcggctggaaaacctgagaaagaagcctgaaaatatcccccagcccatcagcaatacatctagagccaacctgaataagctgctgaccgattacaccgaaatgaagaaggcgatcctgcatgtgtactgggaagagttccagaaggaccctgtgggcctgatgagccgggtggcccagcctgccagcaagaagatcgatcagaacaagctgaaacctgagatggacgagaagggcaacctgaccaccgccggctttgcctgctctcagtgtggccagcccctgttcgtgtacaagctggagcaggtgtctgagaagggcaaggcttacaccaactacttcggacggtgcaatgtggccgagcacgaaaagctgatcctgctggcccagctgaagcccgagaaggatagcgacgaagccgtgacatatagcctgggaaagtttgggcagagggccctggatttctacagcattcatgtgaccaaggagtccacccaccccgtgaagcccctggcccagatcgccggaaacagatacgcctccggacctgtgggaaaggccctgagcgacgcatgtatgggcacaatcgcctccttcctgtctaagtaccaggacatcatcatcgaacaccagaaggtggtgaagggcaaccagaagagactggagagcctgcgggagctggccggcaaggaaaacctggaataccctagcgtgaccctgccacctcagcctcacaccaaggagggcgttgatgcctacaacgaagtgatcgcccgggtgcgaatgtgggtgaacctgaacctgtggcagaagctgaagctaagcagagatgatgccaagcctctgctgagactgaagggattcccttcctttcctctggtcgagagacaggccaacgaagtggactggtgggacatggtgtgtaacgtgaagaagctgatcaacgagaaaaaggaggatggcaaggtgttttggcagaatctggctggctacaagagacaggaagccctgagaccatacctgagcagcgaggaagatcggaagaagggaaagaaattcgctcggtaccagctgggcgacctgctgctgcacctggaaaagaagcacggcgaggactggggaaaggtgtacgacgaggcctgggagcggattgacaagaaagtggaaggcctgagcaagcacatcaagctggaagaggaacggagaagcgaggacgcccagagcaaggccgccctgaccgactggctgcgggctaaggccagcttcgtgatcgagggcctgaaggaggccgacaaggacgagttctgcagatgcgagctgaagctgcagaagtggtacggggacctgcggggaaagcccttcgccatcgaagccgagaacagcatcctggacatcagcggcttcagcaagcagtacaactgtgccttcatctggcagaaggacggcgtgaagaagctgaacctgtacctgatcatcaactacttcaagggcggcaagctgcggttcaagaagatcaaacctgaagccttcgaagccaacagattctacaccgtgatcaacaaaaagagcggcgagatcgtgcccatggaggtgaacttcaacttcgacgaccccaacctgatcatcctgcctctggcctttggcaagagacagggcagagaattcatctggaacgacctgctgtccctggaaaccggcagcctgaagctggccaacggaagagtgatcgagaagacactgtacaacagaagaacccggcaggatgagcctgccctgttcgtggccctgaccttcgagcggcgggaggtcctggactcctccaatatcaaaccaatgaacctgatcggcgtggcaagaggcgaaaacatccccgccgtgatcgccctgaccgaccccgagggctgcccactgagccggtttaaggatagcctgggaaacccaacccacatcctgagaatcggcgagagctataaggagaagcagcggaccatccaggccaagaaggaggtggagcagcggagagccggcggctacagccggaagtacgccagcaaagccaagaatctggcagacgatatggtgagaaacaccgctagagatctgctgtactacgccgtgacccaggatgccatgctgatcttcgccaacctgagccggggcttcggccggcagggcaagcggaccttcatggccgagagacagtacacacggatggaggactggctgaccgccaagctggcctacgagggcctgagcaagacctacctgtccaagacactggcccagtacacctccaagacatgcagcaactgtgggtttaccatcaccagcgccgactacgacagggtgctggagaagctgaagaagacagcaacaggctggatgaccacaattaacggcaaggagctgaaggtggagggccagattacctactacaacagatacaagagacagaacgtagtcaaggacctgtccgtcgagctggatagactgagcgaagaatctgtgaacaacgacatctcctcctggacaaagggcagaagcggagaagctctgagcctcctgaagaaaagattctcccatagacccgtgcaggagaagttcgtgtgcctgaactgcggcttcgagacacacgcagccgagcaagccgccctgaacatcgccagatcctggctgttcctgcggagccaggagtacaagaaataccagacaaacaagacaaccggcaacaccgataagagagccttcgtcgagacctggcagtccttttaccggaagaagcttaaggaggtgtggaaacctgccgtgcggtctggcggatctggcggaggctcctatccagggcagcctgaccttcaaggacgtggccgtggacttcacccaggacgagtggtgcctgctggacaacagccagaaggagctgtacctggaggtgatgctggagaacgtgcagaacctgctgagcgtgggcctgcccgtgcccagggagtacctgaccagctgcttccagcagggcgaggccccctggctgctggagcaggaggtgcccaggagcagctgccccgaggccgagaccaacggatctggctccggcagcggccccaagaaaaagagaaaagtctaagctgccttctgcggggcttgccttctggccatgcccttcttctctcccttgcacctgtacctcttggtctttgaataaagcctgagtaggaaggctagcaaaaaaaaaaaaaaaaaaaaaaaaaaaaaaaaaaaaaaaaaaaaaaaaaaaaaaaaaaaaaaaaaaaaaaaaaaaaaaaa

SEQ ID NO: 15867 - RNA, 9485 nt, synthetic construct
  source 1..9485: mol_type = other RNA
aggaaataagagagaaaagaagagtaagaagaaatataagagccaccatggcccctaagaagaagcgtaaagtgagccggatggaacgcctcgtctacgaggtgcggcagaagtgcagaaacatcgaggacatctgcatctcctgcggatctctgaacgtgaccctggagcacccactgttcatcggcggcatgtgccagaactgtaaaaactgttttctggagtgtgcctatcaatacgacgatgacggctaccagagctactgcaccatctgttgcggcggaagagaggtgctgatgtgtggaaataacaactgctgccggtgcttctgcgtggaatgcgtggacctgctggtgggccccggcgccgcccaggccgctattaaggaagatccttggaactgctacatgtgcggccacaagggcacatacggcctgctgagacggagagaggactggcctagcagactgcagatgttcttcgccaataaccacgaccaggagttcgacccccctaaggtgtaccctcccgtccccgccgagaagagaaagcccatccgggtcctgagcctgttcgatggcatcgccaccggtctgctggtgctgaaggacctgggcatccaggtggataggtacattgcctccgaggtgtgcgaggactccatcaccgtgggaatggtgcgtcatcagggcaagatcatgtacgtgggcgacgtgcggagcgtgacacagaagcatatccaggagtggggccctttcgacctggtgatcggcggcagcccttgcaatgacctgagcatcgtgaacccagcccggaagggcctgtacgagggaaccggcagactgttcttcgagttttacagactgctgcacgacgcccggcctaaggaaggcgacgaccggcccttcttttggctgttcgagaatgtggtggccatgggagtcagcgacaagcgggatattagccggttcctggagagcaaccccgtgatgatcgatgccaaggaagtgagcgccgcccaccgggccagatacttctggggcaatctgcctggcatgaacagacccctggccagcaccgtgaacgacaagctggagctgcaggagtgcctggagcacggccggatcgccaagttcagcaaggtgagaaccatcaccacccgaagcaacagcatcaaacaaggcaaggaccagcactttcctgtgttcatgaacgagaaggaggacatcctgtggtgtaccgagatggagagagtgttcgggttcccagtccactacacagatgtcagcaacatgtctagactggccagacagagactgctgggaagaagctggtccgtccctgtgatcagacacctgttcgcccctctgaaggagtacttcgcctgcgtgagcagcggcaacagcaacgccaacagccggggccccagcttctctagcggcctggtgccactgtccctgagagggagccacatgggccccatggagatctacaaaaccgtgagcgcctggaagcggcagcctgtgcgcgtgctgagcctgtttcggaatatcgataaagtcctgaaaagcctgggattcctggagagcggctctggctccggcggtggcaccctgaagtacgtggaggatgtgacaaacgtggtcagacgggatgtggagaagtggggccccttcgatctggtgtacggcagcacccaacccctgggcagctcttgtgaccggtgccctggctggtacatgtttcagttccaccggatcctgcagtacgccctgccgagacaggagtcccagcggccattcttttggattttcatggacaacttgctgctgaccgaggatgaccaggaaactaccactcggttcctgcagaccgaagccgtgaccctgcaggacgtgagaggccgggactaccagaacgccatgcgggtgtggtccaacatccctggactgaaaagcaagcacgcacctctgacccctaaagaagaggagtacctgcaggcccaggtgcggagcagaagcaagctggacgcccctaaggtggatctgctggtgaagaattgcctcctgcccctgagagagtacttcaagtatttcagccagaatagtctgcccctgggaggcagcggcggcggcgccctggtgacatttgaggacgtcgccgtgcggttcacccaggaggaatgggctctgctggatccttctcagaaaatcctgtaccgggacgtgatgagagagacataccggaatctgacctccgtgggcatcaactgggaatgttgggaccttgaagcctgcttcagaagcctgggaagaaacctgagagtgcaggtggtgaagagaaagtgcgagctgaccaacagcggcccctgcgccgagggcggcccaagcagcggcgcccctcctcccagcggcggcagcccagccggctccccaacctctaccgaggagggcacctctgagtccgccacccccgagagcggccctggcacctccaccgagcccagcgagggcagcgcacccggcagccctgccggcagccccacctccacagaggagggaaccagcaccgagcccagcgaaggcagcgccccaggcaccagcaccgagcctagtgagcaggagattaaacggatcaacaagatcagaagaagacttgtgaaagacagcaacaccaagaaggccggcaagacaggccccatgaaaaccctgctggttagagtgatgacacccgatctgagagagcggctggaaaacctgagaaagaagcctgaaaatatcccccagcccatcagcaatacatctagagccaacctgaataagctgctgaccgattacaccgaaatgaagaaggcgatcctgcatgtgtactgggaagagttccagaaggaccctgtgggcctgatgagccgggtggcccagcctgccagcaagaagatcgatcagaacaagctgaaacctgagatggacgagaagggcaacctgaccaccgccggctttgcctgctctcagtgtggccagcccctgttcgtgtacaagctggagcaggtgtctgagaagggcaaggcttacaccaactacttcggacggtgcaatgtggccgagcacgaaaagctgatcctgctggcccagctgaagcccgagaaggatagcgacgaagccgtgacatatagcctgggaaagtttgggcagagggccctggatttctacagcattcatgtgaccaaggagtccacccaccccgtgaagcccctggcccagatcgccggaaacagatacgcctccggacctgtgggaaaggccctgagcgacgcatgtatgggcacaatcgcctccttcctgtctaagtaccaggacatcatcatcgaacaccagaaggtggtgaagggcaaccagaagagactggagagcctgcgggagctggccggcaaggaaaacctggaataccctagcgtgaccctgccacctcagcctcacaccaaggagggcgttgatgcctacaacgaagtgatcgcccgggtgcgaatgtgggtgaacctgaacctgtggcagaagctgaagctaagcagagatgatgccaagcctctgctgagactgaagggattcccttcctttcctctggtcgagagacaggccaacgaagtggactggtgggacatggtgtgtaacgtgaagaagctgatcaacgagaaaaaggaggatggcaaggtgttttggcagaatctggctggctacaagagacaggaagccctgagaccatacctgagcagcgaggaagatcggaagaagggaaagaaattcgctcggtaccagctgggcgacctgctgctgcacctggaaaagaagcacggcgaggactggggaaaggtgtacgacgaggcctgggagcggattgacaagaaagtggaaggcctgagcaagcacatcaagctggaagaggaacggagaagcgaggacgcccagagcaaggccgccctgaccgactggctgcgggctaaggccagcttcgtgatcgagggcctgaaggaggccgacaaggacgagttctgcagatgcgagctgaagctgcagaagtggtacggggacctgcggggaaagcccttcgccatcgaagccgagaacagcatcctggacatcagcggcttcagcaagcagtacaactgtgccttcatctggcagaaggacggcgtgaagaagctgaacctgtacctgatcatcaactacttcaagggcggcaagctgcggttcaagaagatcaaacctgaagccttcgaagccaacagattctacaccgtgatcaacaaaaagagcggcgagatcgtgcccatggaggtgaacttcaacttcgacgaccccaacctgatcatcctgcctctggcctttggcaagagacagggcagagaattcatctggaacgacctgctgtccctggaaaccggcagcctgaagctggccaacggaagagtgatcgagaagacactgtacaacagaagaacccggcaggatgagcctgccctgttcgtggccctgaccttcgagcggcgggaggtcctggactcctccaatatcaaaccaatgaacctgatcggcgtggcaagaggcgaaaacatccccgccgtgatcgccctgaccgaccccgagggctgcccactgagccggtttaaggatagcctgggaaacccaacccacatcctgagaatcggcgagagctataaggagaagcagcggaccatccaggccaagaaggaggtggagcagcggagagccggcggctacagccggaagtacgccagcaaagccaagaatctggcagacgatatggtgagaaacaccgctagagatctgctgtactacgccgtgacccaggatgccatgctgatcttcgccaacctgagccggggcttcggccggcagggcaagcggaccttcatggccgagagacagtacacacggatggaggactggctgaccgccaagctggcctacgagggcctgagcaagacctacctgtccaagacactggcccagtacacctccaagacatgcagcaactgtgggtttaccatcaccagcgccgactacgacagggtgctggagaagctgaagaagacagcaacaggctggatgaccacaattaacggcaaggagctgaaggtggagggccagattacctactacaacagatacaagagacagaacgtagtcaaggacctgtccgtcgagctggatagactgagcgaagaatctgtgaacaacgacatctcctcctggacaaagggcagaagcggagaagctctgagcctcctgaagaaaagattctcccatagacccgtgcaggagaagttcgtgtgcctgaactgcggcttcgagacacacgcagccgagcaagccgccctgaacatcgccagatcctggctgttcctgcggagccaggagtacaagaaataccagacaaacaagacaaccggcaacaccgataagagagccttcgtcgagacctggcagtccttttaccggaagaagcttaaggaggtgtggaaacctgccgtgcggtctggcggatctggcggaggctccttccagggcagcgtgaccttcagggacgtggccatcgacttcagccaggaggagtggaagtggctgcagcccgcccagagggacctgtacaggtgcgtgatgctggagaactacggccacctggtgagcctgggcctgagcatcagcaagcccgacgtggtgagcctgctggagcagggcaaggagccctggctgggcaagaggaacgtgaacagggacctgcaggccctgtgcatccccatcggcggcccaagcagcggcgcccctcctcccagcggcggcagcccagccggctccccaacctctaccgaggagggcacctctgagtccgccacccccgagagcggccctggcacctccaccgagcccagcgagggcagcgcacccggcagccctgccggcagccccacctccacagaggagggaaccagcaccgagcccagcgaaggcagcgccccaggcaccagcaccgagcctagtgagcaggagattaaacggatcaacaagatcagaagaagacttgtgaaagacagcaacaccaagaaggccggcaagacaggccccatgaaaaccctgctggttagagtgatgacacccgatctgagagagcggctggaaaacctgagaaagaagcctgaaaatatcccccagcccatcagcaatacatctagagccaacctgaataagctgctgaccgattacaccgaaatgaagaaggcgatcctgcatgtgtactgggaagagttccagaaggaccctgtgggcctgatgagccgggtggcccagcctgccagcaagaagatcgatcagaacaagctgaaacctgagatggacgagaagggcaacctgaccaccgccggctttgcctgctctcagtgtggccagcccctgttcgtgtacaagctggagcaggtgtctgagaagggcaaggcttacaccaactacttcggacggtgcaatgtggccgagcacgaaaagctgatcctgctggcccagctgaagcccgagaaggatagcgacgaagccgtgacatatagcctgggaaagtttgggcagagggccctggatttctacagcattcatgtgaccaaggagtccacccaccccgtgaagcccctggcccagatcgccggaaacagatacgcctccggacctgtgggaaaggccctgagcgacgcatgtatgggcacaatcgcctccttcctgtctaagtaccaggacatcatcatcgaacaccagaaggtggtgaagggcaaccagaagagactggagagcctgcgggagctggccggcaaggaaaacctggaataccctagcgtgaccctgccacctcagcctcacaccaaggagggcgttgatgcctacaacgaagtgatcgcccgggtgcgaatgtgggtgaacctgaacctgtggcagaagctgaagctaagcagagatgatgccaagcctctgctgagactgaagggattcccttcctttcctctggtcgagagacaggccaacgaagtggactggtgggacatggtgtgtaacgtgaagaagctgatcaacgagaaaaaggaggatggcaaggtgttttggcagaatctggctggctacaagagacaggaagccctgagaccatacctgagcagcgaggaagatcggaagaagggaaagaaattcgctcggtaccagctgggcgacctgctgctgcacctggaaaagaagcacggcgaggactggggaaaggtgtacgacgaggcctgggagcggattgacaagaaagtggaaggcctgagcaagcacatcaagctggaagaggaacggagaagcgaggacgcccagagcaaggccgccctgaccgactggctgcgggctaaggccagcttcgtgatcgagggcctgaaggaggccgacaaggacgagttctgcagatgcgagctgaagctgcagaagtggtacggggacctgcggggaaagcccttcgccatcgaagccgagaacagcatcctggacatcagcggcttcagcaagcagtacaactgtgccttcatctggcagaaggacggcgtgaagaagctgaacctgtacctgatcatcaactacttcaagggcggcaagctgcggttcaagaagatcaaacctgaagccttcgaagccaacagattctacaccgtgatcaacaaaaagagcggcgagatcgtgcccatggaggtgaacttcaacttcgacgaccccaacctgatcatcctgcctctggcctttggcaagagacagggcagagaattcatctggaacgacctgctgtccctggaaaccggcagcctgaagctggccaacggaagagtgatcgagaagacactgtacaacagaagaacccggcaggatgagcctgccctgttcgtggccctgaccttcgagcggcgggaggtcctggactcctccaatatcaaaccaatgaacctgatcggcgtggcaagaggcgaaaacatccccgccgtgatcgccctgaccgaccccgagggctgcccactgagccggtttaaggatagcctgggaaacccaacccacatcctgagaatcggcgagagctataaggagaagcagcggaccatccaggccaagaaggaggtggagcagcggagagccggcggctacagccggaagtacgccagcaaagccaagaatctggcagacgatatggtgagaaacaccgctagagatctgctgtactacgccgtgacccaggatgccatgctgatcttcgccaacctgagccggggcttcggccggcagggcaagcggaccttcatggccgagagacagtacacacggatggaggactggctgaccgccaagctggcctacgagggcctgagcaagacctacctgtccaagacactggcccagtacacctccaagacatgcagcaactgtgggtttaccatcaccagcgccgactacgacagggtgctggagaagctgaagaagacagcaacaggctggatgaccacaattaacggcaaggagctgaaggtggagggccagattacctactacaacagatacaagagacagaacgtagtcaaggacctgtccgtcgagctggatagactgagcgaagaatctgtgaacaacgacatctcctcctggacaaagggcagaagcggagaagctctgagcctcctgaagaaaagattctcccatagacccgtgcaggagaagttcgtgtgcctgaactgcggcttcgagacacacgcagccgagcaagccgccctgaacatcgccagatcctggctgttcctgcggagccaggagtacaagaaataccagacaaacaagacaaccggcaacaccgataagagagccttcgtcgagacctggcagtccttttaccggaagaagcttaaggaggtgtggaaacctgccgtgcggtctggcggatctggcggaggctcctttccagggcagcgtgaccttcagggacgtggccatcgacttcagccaggaggagtggaagtggctgcagcccgcccagagggacctgtacaggtgcgtgatgctggagaactacggccacctggtgagcctgggcctgagcatcagcaagcccgacgtggtgagcctgctggagcagggcaaggagccctggctgggcaagaggaacgtgaacagggacctgcaggccctgtgcatccccatcggatctggctccggcagcggccccaagaaaaagagaaaagtctaagctgccttctgcggggcttgccttctggccatgcccttcttctctcccttgcacctgtacctcttggtctttgaataaagcctgagtaggaaggctagcaaaaaaaaaaaaaaaaaaaaaaaaaaaaaaaaaaaaaaaaaaaaaaaaaaaaaaaaaaaaaaaaaaaaaaaaaaaaaaaa

SEQ ID NO: 15868 - RNA, 9485 nt, synthetic construct
  source 1..9485: mol_type = other RNA
aggaaataagagagaaaagaagagtaagaagaaatataagagccaccatggcccctaagaagaagcgtaaagtgagccggatggaacgcctcgtctacgaggtgcggcagaagtgcagaaacatcgaggacatctgcatctcctgcggatctctgaacgtgaccctggagcacccactgttcatcggcggcatgtgccagaactgtaaaaactgttttctggagtgtgcctatcaatacgacgatgacggctaccagagctactgcaccatctgttgcggcggaagagaggtgctgatgtgtggaaataacaactgctgccggtgcttctgcgtggaatgcgtggacctgctggtgggccccggcgccgcccaggccgctattaaggaagatccttggaactgctacatgtgcggccacaagggcacatacggcctgctgagacggagagaggactggcctagcagactgcagatgttcttcgccaataaccacgaccaggagttcgacccccctaaggtgtaccctcccgtccccgccgagaagagaaagcccatccgggtcctgagcctgttcgatggcatcgccaccggtctgctggtgctgaaggacctgggcatccaggtggataggtacattgcctccgaggtgtgcgaggactccatcaccgtgggaatggtgcgtcatcagggcaagatcatgtacgtgggcgacgtgcggagcgtgacacagaagcatatccaggagtggggccctttcgacctggtgatcggcggcagcccttgcaatgacctgagcatcgtgaacccagcccggaagggcctgtacgagggaaccggcagactgttcttcgagttttacagactgctgcacgacgcccggcctaaggaaggcgacgaccggcccttcttttggctgttcgagaatgtggtggccatgggagtcagcgacaagcgggatattagccggttcctggagagcaaccccgtgatgatcgatgccaaggaagtgagcgccgcccaccgggccagatacttctggggcaatctgcctggcatgaacagacccctggccagcaccgtgaacgacaagctggagctgcaggagtgcctggagcacggccggatcgccaagttcagcaaggtgagaaccatcaccacccgaagcaacagcatcaaacaaggcaaggaccagcactttcctgtgttcatgaacgagaaggaggacatcctgtggtgtaccgagatggagagagtgttcgggttcccagtccactacacagatgtcagcaacatgtctagactggccagacagagactgctgggaagaagctggtccgtccctgtgatcagacacctgttcgcccctctgaaggagtacttcgcctgcgtgagcagcggcaacagcaacgccaacagccggggccccagcttctctagcggcctggtgccactgtccctgagagggagccacatgggccccatggagatctacaaaaccgtgagcgcctggaagcggcagcctgtgcgcgtgctgagcctgtttcggaatatcgataaagtcctgaaaagcctgggattcctggagagcggctctggctccggcggtggcaccctgaagtacgtggaggatgtgacaaacgtggtcagacgggatgtggagaagtggggccccttcgatctggtgtacggcagcacccaacccctgggcagctcttgtgaccggtgccctggctggtacatgtttcagttccaccggatcctgcagtacgccctgccgagacaggagtcccagcggccattcttttggattttcatggacaacttgctgctgaccgaggatgaccaggaaactaccactcggttcctgcagaccgaagccgtgaccctgcaggacgtgagaggccgggactaccagaacgccatgcgggtgtggtccaacatccctggactgaaaagcaagcacgcacctctgacccctaaagaagaggagtacctgcaggcccaggtgcggagcagaagcaagctggacgcccctaaggtggatctgctggtgaagaattgcctcctgcccctgagagagtacttcaagtatttcagccagaatagtctgcccctgggaggcagcggcggcggcgccctggtgacatttgaggacgtcgccgtgcggttcacccaggaggaatgggctctgctggatccttctcagaaaatcctgtaccgggacgtgatgagagagacataccggaatctgacctccgtgggcatcaactgggaatgttgggaccttgaagcctgcttcagaagcctgggaagaaacctgagagtgcaggtggtgaagagaaagtgcgagctgaccaacagcggcccctgcgccgagggcggcccaagcagcggcgcccctcctcccagcggcggcagcccagccggctccccaacctctaccgaggagggcacctctgagtccgccacccccgagagcggccctggcacctccaccgagcccagcgagggcagcgcacccggcagccctgccggcagccccacctccacagaggagggaaccagcaccgagcccagcgaaggcagcgccccaggcaccagcaccgagcctagtgagcaggagattaaacggatcaacaagatcagaagaagacttgtgaaagacagcaacaccaagaaggccggcaagacaggccccatgaaaaccctgctggttagagtgatgacacccgatctgagagagcggctggaaaacctgagaaagaagcctgaaaatatcccccagcccatcagcaatacatctagagccaacctgaataagctgctgaccgattacaccgaaatgaagaaggcgatcctgcatgtgtactgggaagagttccagaaggaccctgtgggcctgatgagccgggtggcccagcctgccagcaagaagatcgatcagaacaagctgaaacctgagatggacgagaagggcaacctgaccaccgccggctttgcctgctctcagtgtggccagcccctgttcgtgtacaagctggagcaggtgtctgagaagggcaaggcttacaccaactacttcggacggtgcaatgtggccgagcacgaaaagctgatcctgctggcccagctgaagcccgagaaggatagcgacgaagccgtgacatatagcctgggaaagtttgggcagagggccctggatttctacagcattcatgtgaccaaggagtccacccaccccgtgaagcccctggcccagatcgccggaaacagatacgcctccggacctgtgggaaaggccctgagcgacgcatgtatgggcacaatcgcctccttcctgtctaagtaccaggacatcatcatcgaacaccagaaggtggtgaagggcaaccagaagagactggagagcctgcgggagctggccggcaaggaaaacctggaataccctagcgtgaccctgccacctcagcctcacaccaaggagggcgttgatgcctacaacgaagtgatcgcccgggtgcgaatgtgggtgaacctgaacctgtggcagaagctgaagctaagcagagatgatgccaagcctctgctgagactgaagggattcccttcctttcctctggtcgagagacaggccaacgaagtggactggtgggacatggtgtgtaacgtgaagaagctgatcaacgagaaaaaggaggatggcaaggtgttttggcagaatctggctggctacaagagacaggaagccctgagaccatacctgagcagcgaggaagatcggaagaagggaaagaaattcgctcggtaccagctgggcgacctgctgctgcacctggaaaagaagcacggcgaggactggggaaaggtgtacgacgaggcctgggagcggattgacaagaaagtggaaggcctgagcaagcacatcaagctggaagaggaacggagaagcgaggacgcccagagcaaggccgccctgaccgactggctgcgggctaaggccagcttcgtgatcgagggcctgaaggaggccgacaaggacgagttctgcagatgcgagctgaagctgcagaagtggtacggggacctgcggggaaagcccttcgccatcgaagccgagaacagcatcctggacatcagcggcttcagcaagcagtacaactgtgccttcatctggcagaaggacggcgtgaagaagctgaacctgtacctgatcatcaactacttcaagggcggcaagctgcggttcaagaagatcaaacctgaagccttcgaagccaacagattctacaccgtgatcaacaaaaagagcggcgagatcgtgcccatggaggtgaacttcaacttcgacgaccccaacctgatcatcctgcctctggcctttggcaagagacagggcagagaattcatctggaacgacctgctgtccctggaaaccggcagcctgaagctggccaacggaagagtgatcgagaagacactgtacaacagaagaacccggcaggatgagcctgccctgttcgtggccctgaccttcgagcggcgggaggtcctggactcctccaatatcaaaccaatgaacctgatcggcgtggcaagaggcgaaaacatccccgccgtgatcgccctgaccgaccccgagggctgcccactgagccggtttaaggatagcctgggaaacccaacccacatcctgagaatcggcgagagctataaggagaagcagcggaccatccaggccaagaaggaggtggagcagcggagagccggcggctacagccggaagtacgccagcaaagccaagaatctggcagacgatatggtgagaaacaccgctagagatctgctgtactacgccgtgacccaggatgccatgctgatcttcgccaacctgagccggggcttcggccggcagggcaagcggaccttcatggccgagagacagtacacacggatggaggactggctgaccgccaagctggcctacgagggcctgagcaagacctacctgtccaagacactggcccagtacacctccaagacatgcagcaactgtgggtttaccatcaccagcgccgactacgacagggtgctggagaagctgaagaagacagcaacaggctggatgaccacaattaacggcaaggagctgaaggtggagggccagattacctactacaacagatacaagagacagaacgtagtcaaggacctgtccgtcgagctggatagactgagcgaagaatctgtgaacaacgacatctcctcctggacaaagggcagaagcggagaagctctgagcctcctgaagaaaagattctcccatagacccgtgcaggagaagttcgtgtgcctgaactgcggcttcgagacacacgcagccgagcaagccgccctgaacatcgccagatcctggctgttcctgcggagccaggagtacaagaaataccagacaaacaagacaaccggcaacaccgataagagagccttcgtcgagacctggcagtccttttaccggaagaagcttaaggaggtgtggaaacctgccgtgcggtctggcggatctggcggaggctccaacctggaggccgtgaccttccaggacgtggccgtggagttcacctgcgaggagtggaggcacctggcccccccccagaaggagctgtacagggacgtgatgctggagaactacaagaacctggtgaggctgggcctggccgtgagcaagcccgacgtgatcagccagctggagaggagggaggccccctggatgcccggcggcatccagaggagcaggtgccccgactgggaggccagctgcggcggcccaagcagcggcgcccctcctcccagcggcggcagcccagccggctccccaacctctaccgaggagggcacctctgagtccgccacccccgagagcggccctggcacctccaccgagcccagcgagggcagcgcacccggcagccctgccggcagccccacctccacagaggagggaaccagcaccgagcccagcgaaggcagcgccccaggcaccagcaccgagcctagtgagcaggagattaaacggatcaacaagatcagaagaagacttgtgaaagacagcaacaccaagaaggccggcaagacaggccccatgaaaaccctgctggttagagtgatgacacccgatctgagagagcggctggaaaacctgagaaagaagcctgaaaatatcccccagcccatcagcaatacatctagagccaacctgaataagctgctgaccgattacaccgaaatgaagaaggcgatcctgcatgtgtactgggaagagttccagaaggaccctgtgggcctgatgagccgggtggcccagcctgccagcaagaagatcgatcagaacaagctgaaacctgagatggacgagaagggcaacctgaccaccgccggctttgcctgctctcagtgtggccagcccctgttcgtgtacaagctggagcaggtgtctgagaagggcaaggcttacaccaactacttcggacggtgcaatgtggccgagcacgaaaagctgatcctgctggcccagctgaagcccgagaaggatagcgacgaagccgtgacatatagcctgggaaagtttgggcagagggccctggatttctacagcattcatgtgaccaaggagtccacccaccccgtgaagcccctggcccagatcgccggaaacagatacgcctccggacctgtgggaaaggccctgagcgacgcatgtatgggcacaatcgcctccttcctgtctaagtaccaggacatcatcatcgaacaccagaaggtggtgaagggcaaccagaagagactggagagcctgcgggagctggccggcaaggaaaacctggaataccctagcgtgaccctgccacctcagcctcacaccaaggagggcgttgatgcctacaacgaagtgatcgcccgggtgcgaatgtgggtgaacctgaacctgtggcagaagctgaagctaagcagagatgatgccaagcctctgctgagactgaagggattcccttcctttcctctggtcgagagacaggccaacgaagtggactggtgggacatggtgtgtaacgtgaagaagctgatcaacgagaaaaaggaggatggcaaggtgttttggcagaatctggctggctacaagagacaggaagccctgagaccatacctgagcagcgaggaagatcggaagaagggaaagaaattcgctcggtaccagctgggcgacctgctgctgcacctggaaaagaagcacggcgaggactggggaaaggtgtacgacgaggcctgggagcggattgacaagaaagtggaaggcctgagcaagcacatcaagctggaagaggaacggagaagcgaggacgcccagagcaaggccgccctgaccgactggctgcgggctaaggccagcttcgtgatcgagggcctgaaggaggccgacaaggacgagttctgcagatgcgagctgaagctgcagaagtggtacggggacctgcggggaaagcccttcgccatcgaagccgagaacagcatcctggacatcagcggcttcagcaagcagtacaactgtgccttcatctggcagaaggacggcgtgaagaagctgaacctgtacctgatcatcaactacttcaagggcggcaagctgcggttcaagaagatcaaacctgaagccttcgaagccaacagattctacaccgtgatcaacaaaaagagcggcgagatcgtgcccatggaggtgaacttcaacttcgacgaccccaacctgatcatcctgcctctggcctttggcaagagacagggcagagaattcatctggaacgacctgctgtccctggaaaccggcagcctgaagctggccaacggaagagtgatcgagaagacactgtacaacagaagaacccggcaggatgagcctgccctgttcgtggccctgaccttcgagcggcgggaggtcctggactcctccaatatcaaaccaatgaacctgatcggcgtggcaagaggcgaaaacatccccgccgtgatcgccctgaccgaccccgagggctgcccactgagccggtttaaggatagcctgggaaacccaacccacatcctgagaatcggcgagagctataaggagaagcagcggaccatccaggccaagaaggaggtggagcagcggagagccggcggctacagccggaagtacgccagcaaagccaagaatctggcagacgatatggtgagaaacaccgctagagatctgctgtactacgccgtgacccaggatgccatgctgatcttcgccaacctgagccggggcttcggccggcagggcaagcggaccttcatggccgagagacagtacacacggatggaggactggctgaccgccaagctggcctacgagggcctgagcaagacctacctgtccaagacactggcccagtacacctccaagacatgcagcaactgtgggtttaccatcaccagcgccgactacgacagggtgctggagaagctgaagaagacagcaacaggctggatgaccacaattaacggcaaggagctgaaggtggagggccagattacctactacaacagatacaagagacagaacgtagtcaaggacctgtccgtcgagctggatagactgagcgaagaatctgtgaacaacgacatctcctcctggacaaagggcagaagcggagaagctctgagcctcctgaagaaaagattctcccatagacccgtgcaggagaagttcgtgtgcctgaactgcggcttcgagacacacgcagccgagcaagccgccctgaacatcgccagatcctggctgttcctgcggagccaggagtacaagaaataccagacaaacaagacaaccggcaacaccgataagagagccttcgtcgagacctggcagtccttttaccggaagaagcttaaggaggtgtggaaacctgccgtgcggtctggcggatctggcggaggctcctaacctggaggccgtgaccttccaggacgtggccgtggagttcacctgcgaggagtggaggcacctggcccccccccagaaggagctgtacagggacgtgatgctggagaactacaagaacctggtgaggctgggcctggccgtgagcaagcccgacgtgatcagccagctggagaggagggaggccccctggatgcccggcggcatccagaggagcaggtgccccgactgggaggccagctgcggatctggctccggcagcggccccaagaaaaagagaaaagtctaagctgccttctgcggggcttgccttctggccatgcccttcttctctcccttgcacctgtacctcttggtctttgaataaagcctgagtaggaaggctagcaaaaaaaaaaaaaaaaaaaaaaaaaaaaaaaaaaaaaaaaaaaaaaaaaaaaaaaaaaaaaaaaaaaaaaaaaaaaaaaa

SEQ ID NO: 15869 - RNA, 9485 nt, synthetic construct
  source 1..9485: mol_type = other RNA
aggaaataagagagaaaagaagagtaagaagaaatataagagccaccatggcccctaagaagaagcgtaaagtgagccggatggaacgcctcgtctacgaggtgcggcagaagtgcagaaacatcgaggacatctgcatctcctgcggatctctgaacgtgaccctggagcacccactgttcatcggcggcatgtgccagaactgtaaaaactgttttctggagtgtgcctatcaatacgacgatgacggctaccagagctactgcaccatctgttgcggcggaagagaggtgctgatgtgtggaaataacaactgctgccggtgcttctgcgtggaatgcgtggacctgctggtgggccccggcgccgcccaggccgctattaaggaagatccttggaactgctacatgtgcggccacaagggcacatacggcctgctgagacggagagaggactggcctagcagactgcagatgttcttcgccaataaccacgaccaggagttcgacccccctaaggtgtaccctcccgtccccgccgagaagagaaagcccatccgggtcctgagcctgttcgatggcatcgccaccggtctgctggtgctgaaggacctgggcatccaggtggataggtacattgcctccgaggtgtgcgaggactccatcaccgtgggaatggtgcgtcatcagggcaagatcatgtacgtgggcgacgtgcggagcgtgacacagaagcatatccaggagtggggccctttcgacctggtgatcggcggcagcccttgcaatgacctgagcatcgtgaacccagcccggaagggcctgtacgagggaaccggcagactgttcttcgagttttacagactgctgcacgacgcccggcctaaggaaggcgacgaccggcccttcttttggctgttcgagaatgtggtggccatgggagtcagcgacaagcgggatattagccggttcctggagagcaaccccgtgatgatcgatgccaaggaagtgagcgccgcccaccgggccagatacttctggggcaatctgcctggcatgaacagacccctggccagcaccgtgaacgacaagctggagctgcaggagtgcctggagcacggccggatcgccaagttcagcaaggtgagaaccatcaccacccgaagcaacagcatcaaacaaggcaaggaccagcactttcctgtgttcatgaacgagaaggaggacatcctgtggtgtaccgagatggagagagtgttcgggttcccagtccactacacagatgtcagcaacatgtctagactggccagacagagactgctgggaagaagctggtccgtccctgtgatcagacacctgttcgcccctctgaaggagtacttcgcctgcgtgagcagcggcaacagcaacgccaacagccggggccccagcttctctagcggcctggtgccactgtccctgagagggagccacatgggccccatggagatctacaaaaccgtgagcgcctggaagcggcagcctgtgcgcgtgctgagcctgtttcggaatatcgataaagtcctgaaaagcctgggattcctggagagcggctctggctccggcggtggcaccctgaagtacgtggaggatgtgacaaacgtggtcagacgggatgtggagaagtggggccccttcgatctggtgtacggcagcacccaacccctgggcagctcttgtgaccggtgccctggctggtacatgtttcagttccaccggatcctgcagtacgccctgccgagacaggagtcccagcggccattcttttggattttcatggacaacttgctgctgaccgaggatgaccaggaaactaccactcggttcctgcagaccgaagccgtgaccctgcaggacgtgagaggccgggactaccagaacgccatgcgggtgtggtccaacatccctggactgaaaagcaagcacgcacctctgacccctaaagaagaggagtacctgcaggcccaggtgcggagcagaagcaagctggacgcccctaaggtggatctgctggtgaagaattgcctcctgcccctgagagagtacttcaagtatttcagccagaatagtctgcccctgggaggcagcggcggcggcgccctggtgacatttgaggacgtcgccgtgcggttcacccaggaggaatgggctctgctggatccttctcagaaaatcctgtaccgggacgtgatgagagagacataccggaatctgacctccgtgggcatcaactgggaatgttgggaccttgaagcctgcttcagaagcctgggaagaaacctgagagtgcaggtggtgaagagaaagtgcgagctgaccaacagcggcccctgcgccgagggcggcccaagcagcggcgcccctcctcccagcggcggcagcccagccggctccccaacctctaccgaggagggcacctctgagtccgccacccccgagagcggccctggcacctccaccgagcccagcgagggcagcgcacccggcagccctgccggcagccccacctccacagaggagggaaccagcaccgagcccagcgaaggcagcgccccaggcaccagcaccgagcctagtgagcaggagattaaacggatcaacaagatcagaagaagacttgtgaaagacagcaacaccaagaaggccggcaagacaggccccatgaaaaccctgctggttagagtgatgacacccgatctgagagagcggctggaaaacctgagaaagaagcctgaaaatatcccccagcccatcagcaatacatctagagccaacctgaataagctgctgaccgattacaccgaaatgaagaaggcgatcctgcatgtgtactgggaagagttccagaaggaccctgtgggcctgatgagccgggtggcccagcctgccagcaagaagatcgatcagaacaagctgaaacctgagatggacgagaagggcaacctgaccaccgccggctttgcctgctctcagtgtggccagcccctgttcgtgtacaagctggagcaggtgtctgagaagggcaaggcttacaccaactacttcggacggtgcaatgtggccgagcacgaaaagctgatcctgctggcccagctgaagcccgagaaggatagcgacgaagccgtgacatatagcctgggaaagtttgggcagagggccctggatttctacagcattcatgtgaccaaggagtccacccaccccgtgaagcccctggcccagatcgccggaaacagatacgcctccggacctgtgggaaaggccctgagcgacgcatgtatgggcacaatcgcctccttcctgtctaagtaccaggacatcatcatcgaacaccagaaggtggtgaagggcaaccagaagagactggagagcctgcgggagctggccggcaaggaaaacctggaataccctagcgtgaccctgccacctcagcctcacaccaaggagggcgttgatgcctacaacgaagtgatcgcccgggtgcgaatgtgggtgaacctgaacctgtggcagaagctgaagctaagcagagatgatgccaagcctctgctgagactgaagggattcccttcctttcctctggtcgagagacaggccaacgaagtggactggtgggacatggtgtgtaacgtgaagaagctgatcaacgagaaaaaggaggatggcaaggtgttttggcagaatctggctggctacaagagacaggaagccctgagaccatacctgagcagcgaggaagatcggaagaagggaaagaaattcgctcggtaccagctgggcgacctgctgctgcacctggaaaagaagcacggcgaggactggggaaaggtgtacgacgaggcctgggagcggattgacaagaaagtggaaggcctgagcaagcacatcaagctggaagaggaacggagaagcgaggacgcccagagcaaggccgccctgaccgactggctgcgggctaaggccagcttcgtgatcgagggcctgaaggaggccgacaaggacgagttctgcagatgcgagctgaagctgcagaagtggtacggggacctgcggggaaagcccttcgccatcgaagccgagaacagcatcctggacatcagcggcttcagcaagcagtacaactgtgccttcatctggcagaaggacggcgtgaagaagctgaacctgtacctgatcatcaactacttcaagggcggcaagctgcggttcaagaagatcaaacctgaagccttcgaagccaacagattctacaccgtgatcaacaaaaagagcggcgagatcgtgcccatggaggtgaacttcaacttcgacgaccccaacctgatcatcctgcctctggcctttggcaagagacagggcagagaattcatctggaacgacctgctgtccctggaaaccggcagcctgaagctggccaacggaagagtgatcgagaagacactgtacaacagaagaacccggcaggatgagcctgccctgttcgtggccctgaccttcgagcggcgggaggtcctggactcctccaatatcaaaccaatgaacctgatcggcgtggcaagaggcgaaaacatccccgccgtgatcgccctgaccgaccccgagggctgcccactgagccggtttaaggatagcctgggaaacccaacccacatcctgagaatcggcgagagctataaggagaagcagcggaccatccaggccaagaaggaggtggagcagcggagagccggcggctacagccggaagtacgccagcaaagccaagaatctggcagacgatatggtgagaaacaccgctagagatctgctgtactacgccgtgacccaggatgccatgctgatcttcgccaacctgagccggggcttcggccggcagggcaagcggaccttcatggccgagagacagtacacacggatggaggactggctgaccgccaagctggcctacgagggcctgagcaagacctacctgtccaagacactggcccagtacacctccaagacatgcagcaactgtgggtttaccatcaccagcgccgactacgacagggtgctggagaagctgaagaagacagcaacaggctggatgaccacaattaacggcaaggagctgaaggtggagggccagattacctactacaacagatacaagagacagaacgtagtcaaggacctgtccgtcgagctggatagactgagcgaagaatctgtgaacaacgacatctcctcctggacaaagggcagaagcggagaagctctgagcctcctgaagaaaagattctcccatagacccgtgcaggagaagttcgtgtgcctgaactgcggcttcgagacacacgcagccgagcaagccgccctgaacatcgccagatcctggctgttcctgcggagccaggagtacaagaaataccagacaaacaagacaaccggcaacaccgataagagagccttcgtcgagacctggcagtccttttaccggaagaagcttaaggaggtgtggaaacctgccgtgcggtctggcggatctggcggaggctccaggcccagggccgtgaagttcgccgacgtggccgtgtacttcagccccgaggagtggggctgcctgaggcccgcccagagggccctgtacagggacgtgatgagggagacctacggccacctgagcgccctgggctgcagcggccccaagcccgccctgatcagctggctggagaggaacaccgacgactgggagcccgccgccctggacccccaggagtgccccaggggcctgaccgtgcagggcggcccaagcagcggcgcccctcctcccagcggcggcagcccagccggctccccaacctctaccgaggagggcacctctgagtccgccacccccgagagcggccctggcacctccaccgagcccagcgagggcagcgcacccggcagccctgccggcagccccacctccacagaggagggaaccagcaccgagcccagcgaaggcagcgccccaggcaccagcaccgagcctagtgagcaggagattaaacggatcaacaagatcagaagaagacttgtgaaagacagcaacaccaagaaggccggcaagacaggccccatgaaaaccctgctggttagagtgatgacacccgatctgagagagcggctggaaaacctgagaaagaagcctgaaaatatcccccagcccatcagcaatacatctagagccaacctgaataagctgctgaccgattacaccgaaatgaagaaggcgatcctgcatgtgtactgggaagagttccagaaggaccctgtgggcctgatgagccgggtggcccagcctgccagcaagaagatcgatcagaacaagctgaaacctgagatggacgagaagggcaacctgaccaccgccggctttgcctgctctcagtgtggccagcccctgttcgtgtacaagctggagcaggtgtctgagaagggcaaggcttacaccaactacttcggacggtgcaatgtggccgagcacgaaaagctgatcctgctggcccagctgaagcccgagaaggatagcgacgaagccgtgacatatagcctgggaaagtttgggcagagggccctggatttctacagcattcatgtgaccaaggagtccacccaccccgtgaagcccctggcccagatcgccggaaacagatacgcctccggacctgtgggaaaggccctgagcgacgcatgtatgggcacaatcgcctccttcctgtctaagtaccaggacatcatcatcgaacaccagaaggtggtgaagggcaaccagaagagactggagagcctgcgggagctggccggcaaggaaaacctggaataccctagcgtgaccctgccacctcagcctcacaccaaggagggcgttgatgcctacaacgaagtgatcgcccgggtgcgaatgtgggtgaacctgaacctgtggcagaagctgaagctaagcagagatgatgccaagcctctgctgagactgaagggattcccttcctttcctctggtcgagagacaggccaacgaagtggactggtgggacatggtgtgtaacgtgaagaagctgatcaacgagaaaaaggaggatggcaaggtgttttggcagaatctggctggctacaagagacaggaagccctgagaccatacctgagcagcgaggaagatcggaagaagggaaagaaattcgctcggtaccagctgggcgacctgctgctgcacctggaaaagaagcacggcgaggactggggaaaggtgtacgacgaggcctgggagcggattgacaagaaagtggaaggcctgagcaagcacatcaagctggaagaggaacggagaagcgaggacgcccagagcaaggccgccctgaccgactggctgcgggctaaggccagcttcgtgatcgagggcctgaaggaggccgacaaggacgagttctgcagatgcgagctgaagctgcagaagtggtacggggacctgcggggaaagcccttcgccatcgaagccgagaacagcatcctggacatcagcggcttcagcaagcagtacaactgtgccttcatctggcagaaggacggcgtgaagaagctgaacctgtacctgatcatcaactacttcaagggcggcaagctgcggttcaagaagatcaaacctgaagccttcgaagccaacagattctacaccgtgatcaacaaaaagagcggcgagatcgtgcccatggaggtgaacttcaacttcgacgaccccaacctgatcatcctgcctctggcctttggcaagagacagggcagagaattcatctggaacgacctgctgtccctggaaaccggcagcctgaagctggccaacggaagagtgatcgagaagacactgtacaacagaagaacccggcaggatgagcctgccctgttcgtggccctgaccttcgagcggcgggaggtcctggactcctccaatatcaaaccaatgaacctgatcggcgtggcaagaggcgaaaacatccccgccgtgatcgccctgaccgaccccgagggctgcccactgagccggtttaaggatagcctgggaaacccaacccacatcctgagaatcggcgagagctataaggagaagcagcggaccatccaggccaagaaggaggtggagcagcggagagccggcggctacagccggaagtacgccagcaaagccaagaatctggcagacgatatggtgagaaacaccgctagagatctgctgtactacgccgtgacccaggatgccatgctgatcttcgccaacctgagccggggcttcggccggcagggcaagcggaccttcatggccgagagacagtacacacggatggaggactggctgaccgccaagctggcctacgagggcctgagcaagacctacctgtccaagacactggcccagtacacctccaagacatgcagcaactgtgggtttaccatcaccagcgccgactacgacagggtgctggagaagctgaagaagacagcaacaggctggatgaccacaattaacggcaaggagctgaaggtggagggccagattacctactacaacagatacaagagacagaacgtagtcaaggacctgtccgtcgagctggatagactgagcgaagaatctgtgaacaacgacatctcctcctggacaaagggcagaagcggagaagctctgagcctcctgaagaaaagattctcccatagacccgtgcaggagaagttcgtgtgcctgaactgcggcttcgagacacacgcagccgagcaagccgccctgaacatcgccagatcctggctgttcctgcggagccaggagtacaagaaataccagacaaacaagacaaccggcaacaccgataagagagccttcgtcgagacctggcagtccttttaccggaagaagcttaaggaggtgtggaaacctgccgtgcggtctggcggatctggcggaggctcctaggcccagggccgtgaagttcgccgacgtggccgtgtacttcagccccgaggagtggggctgcctgaggcccgcccagagggccctgtacagggacgtgatgagggagacctacggccacctgagcgccctgggctgcagcggccccaagcccgccctgatcagctggctggagaggaacaccgacgactgggagcccgccgccctggacccccaggagtgccccaggggcctgaccgtgcagggatctggctccggcagcggccccaagaaaaagagaaaagtctaagctgccttctgcggggcttgccttctggccatgcccttcttctctcccttgcacctgtacctcttggtctttgaataaagcctgagtaggaaggctagcaaaaaaaaaaaaaaaaaaaaaaaaaaaaaaaaaaaaaaaaaaaaaaaaaaaaaaaaaaaaaaaaaaaaaaaaaaaaaaaa

SEQ ID NO: 15870 - RNA, 9485 nt, synthetic construct
  source 1..9485: mol_type = other RNA
aggaaataagagagaaaagaagagtaagaagaaatataagagccaccatggcccctaagaagaagcgtaaagtgagccggatggaacgcctcgtctacgaggtgcggcagaagtgcagaaacatcgaggacatctgcatctcctgcggatctctgaacgtgaccctggagcacccactgttcatcggcggcatgtgccagaactgtaaaaactgttttctggagtgtgcctatcaatacgacgatgacggctaccagagctactgcaccatctgttgcggcggaagagaggtgctgatgtgtggaaataacaactgctgccggtgcttctgcgtggaatgcgtggacctgctggtgggccccggcgccgcccaggccgctattaaggaagatccttggaactgctacatgtgcggccacaagggcacatacggcctgctgagacggagagaggactggcctagcagactgcagatgttcttcgccaataaccacgaccaggagttcgacccccctaaggtgtaccctcccgtccccgccgagaagagaaagcccatccgggtcctgagcctgttcgatggcatcgccaccggtctgctggtgctgaaggacctgggcatccaggtggataggtacattgcctccgaggtgtgcgaggactccatcaccgtgggaatggtgcgtcatcagggcaagatcatgtacgtgggcgacgtgcggagcgtgacacagaagcatatccaggagtggggccctttcgacctggtgatcggcggcagcccttgcaatgacctgagcatcgtgaacccagcccggaagggcctgtacgagggaaccggcagactgttcttcgagttttacagactgctgcacgacgcccggcctaaggaaggcgacgaccggcccttcttttggctgttcgagaatgtggtggccatgggagtcagcgacaagcgggatattagccggttcctggagagcaaccccgtgatgatcgatgccaaggaagtgagcgccgcccaccgggccagatacttctggggcaatctgcctggcatgaacagacccctggccagcaccgtgaacgacaagctggagctgcaggagtgcctggagcacggccggatcgccaagttcagcaaggtgagaaccatcaccacccgaagcaacagcatcaaacaaggcaaggaccagcactttcctgtgttcatgaacgagaaggaggacatcctgtggtgtaccgagatggagagagtgttcgggttcccagtccactacacagatgtcagcaacatgtctagactggccagacagagactgctgggaagaagctggtccgtccctgtgatcagacacctgttcgcccctctgaaggagtacttcgcctgcgtgagcagcggcaacagcaacgccaacagccggggccccagcttctctagcggcctggtgccactgtccctgagagggagccacatgggccccatggagatctacaaaaccgtgagcgcctggaagcggcagcctgtgcgcgtgctgagcctgtttcggaatatcgataaagtcctgaaaagcctgggattcctggagagcggctctggctccggcggtggcaccctgaagtacgtggaggatgtgacaaacgtggtcagacgggatgtggagaagtggggccccttcgatctggtgtacggcagcacccaacccctgggcagctcttgtgaccggtgccctggctggtacatgtttcagttccaccggatcctgcagtacgccctgccgagacaggagtcccagcggccattcttttggattttcatggacaacttgctgctgaccgaggatgaccaggaaactaccactcggttcctgcagaccgaagccgtgaccctgcaggacgtgagaggccgggactaccagaacgccatgcgggtgtggtccaacatccctggactgaaaagcaagcacgcacctctgacccctaaagaagaggagtacctgcaggcccaggtgcggagcagaagcaagctggacgcccctaaggtggatctgctggtgaagaattgcctcctgcccctgagagagtacttcaagtatttcagccagaatagtctgcccctgggaggcagcggcggcggcgccctggtgacatttgaggacgtcgccgtgcggttcacccaggaggaatgggctctgctggatccttctcagaaaatcctgtaccgggacgtgatgagagagacataccggaatctgacctccgtgggcatcaactgggaatgttgggaccttgaagcctgcttcagaagcctgggaagaaacctgagagtgcaggtggtgaagagaaagtgcgagctgaccaacagcggcccctgcgccgagggcggcccaagcagcggcgcccctcctcccagcggcggcagcccagccggctccccaacctctaccgaggagggcacctctgagtccgccacccccgagagcggccctggcacctccaccgagcccagcgagggcagcgcacccggcagccctgccggcagccccacctccacagaggagggaaccagcaccgagcccagcgaaggcagcgccccaggcaccagcaccgagcctagtgagcaggagattaaacggatcaacaagatcagaagaagacttgtgaaagacagcaacaccaagaaggccggcaagacaggccccatgaaaaccctgctggttagagtgatgacacccgatctgagagagcggctggaaaacctgagaaagaagcctgaaaatatcccccagcccatcagcaatacatctagagccaacctgaataagctgctgaccgattacaccgaaatgaagaaggcgatcctgcatgtgtactgggaagagttccagaaggaccctgtgggcctgatgagccgggtggcccagcctgccagcaagaagatcgatcagaacaagctgaaacctgagatggacgagaagggcaacctgaccaccgccggctttgcctgctctcagtgtggccagcccctgttcgtgtacaagctggagcaggtgtctgagaagggcaaggcttacaccaactacttcggacggtgcaatgtggccgagcacgaaaagctgatcctgctggcccagctgaagcccgagaaggatagcgacgaagccgtgacatatagcctgggaaagtttgggcagagggccctggatttctacagcattcatgtgaccaaggagtccacccaccccgtgaagcccctggcccagatcgccggaaacagatacgcctccggacctgtgggaaaggccctgagcgacgcatgtatgggcacaatcgcctccttcctgtctaagtaccaggacatcatcatcgaacaccagaaggtggtgaagggcaaccagaagagactggagagcctgcgggagctggccggcaaggaaaacctggaataccctagcgtgaccctgccacctcagcctcacaccaaggagggcgttgatgcctacaacgaagtgatcgcccgggtgcgaatgtgggtgaacctgaacctgtggcagaagctgaagctaagcagagatgatgccaagcctctgctgagactgaagggattcccttcctttcctctggtcgagagacaggccaacgaagtggactggtgggacatggtgtgtaacgtgaagaagctgatcaacgagaaaaaggaggatggcaaggtgttttggcagaatctggctggctacaagagacaggaagccctgagaccatacctgagcagcgaggaagatcggaagaagggaaagaaattcgctcggtaccagctgggcgacctgctgctgcacctggaaaagaagcacggcgaggactggggaaaggtgtacgacgaggcctgggagcggattgacaagaaagtggaaggcctgagcaagcacatcaagctggaagaggaacggagaagcgaggacgcccagagcaaggccgccctgaccgactggctgcgggctaaggccagcttcgtgatcgagggcctgaaggaggccgacaaggacgagttctgcagatgcgagctgaagctgcagaagtggtacggggacctgcggggaaagcccttcgccatcgaagccgagaacagcatcctggacatcagcggcttcagcaagcagtacaactgtgccttcatctggcagaaggacggcgtgaagaagctgaacctgtacctgatcatcaactacttcaagggcggcaagctgcggttcaagaagatcaaacctgaagccttcgaagccaacagattctacaccgtgatcaacaaaaagagcggcgagatcgtgcccatggaggtgaacttcaacttcgacgaccccaacctgatcatcctgcctctggcctttggcaagagacagggcagagaattcatctggaacgacctgctgtccctggaaaccggcagcctgaagctggccaacggaagagtgatcgagaagacactgtacaacagaagaacccggcaggatgagcctgccctgttcgtggccctgaccttcgagcggcgggaggtcctggactcctccaatatcaaaccaatgaacctgatcggcgtggcaagaggcgaaaacatccccgccgtgatcgccctgaccgaccccgagggctgcccactgagccggtttaaggatagcctgggaaacccaacccacatcctgagaatcggcgagagctataaggagaagcagcggaccatccaggccaagaaggaggtggagcagcggagagccggcggctacagccggaagtacgccagcaaagccaagaatctggcagacgatatggtgagaaacaccgctagagatctgctgtactacgccgtgacccaggatgccatgctgatcttcgccaacctgagccggggcttcggccggcagggcaagcggaccttcatggccgagagacagtacacacggatggaggactggctgaccgccaagctggcctacgagggcctgagcaagacctacctgtccaagacactggcccagtacacctccaagacatgcagcaactgtgggtttaccatcaccagcgccgactacgacagggtgctggagaagctgaagaagacagcaacaggctggatgaccacaattaacggcaaggagctgaaggtggagggccagattacctactacaacagatacaagagacagaacgtagtcaaggacctgtccgtcgagctggatagactgagcgaagaatctgtgaacaacgacatctcctcctggacaaagggcagaagcggagaagctctgagcctcctgaagaaaagattctcccatagacccgtgcaggagaagttcgtgtgcctgaactgcggcttcgagacacacgcagccgagcaagccgccctgaacatcgccagatcctggctgttcctgcggagccaggagtacaagaaataccagacaaacaagacaaccggcaacaccgataagagagccttcgtcgagacctggcagtccttttaccggaagaagcttaaggaggtgtggaaacctgccgtgcggtctggcggatctggcggaggctccaggcagggcagcgtgaccttccaggacgtggccgtggacttcagctgggaggagtggggcaggctgggccccacccagaaggagctgtacagggaggtgatgctggagaactacaggaacctggtgtgcctgggcctggaggtgagcaagcccgacgtggtgtaccagctggagaggggcgaggccccctggatgcccgagggcgccgtgaggaggagctgcagccagaactggggcgccaggggcggcccaagcagcggcgcccctcctcccagcggcggcagcccagccggctccccaacctctaccgaggagggcacctctgagtccgccacccccgagagcggccctggcacctccaccgagcccagcgagggcagcgcacccggcagccctgccggcagccccacctccacagaggagggaaccagcaccgagcccagcgaaggcagcgccccaggcaccagcaccgagcctagtgagcaggagattaaacggatcaacaagatcagaagaagacttgtgaaagacagcaacaccaagaaggccggcaagacaggccccatgaaaaccctgctggttagagtgatgacacccgatctgagagagcggctggaaaacctgagaaagaagcctgaaaatatcccccagcccatcagcaatacatctagagccaacctgaataagctgctgaccgattacaccgaaatgaagaaggcgatcctgcatgtgtactgggaagagttccagaaggaccctgtgggcctgatgagccgggtggcccagcctgccagcaagaagatcgatcagaacaagctgaaacctgagatggacgagaagggcaacctgaccaccgccggctttgcctgctctcagtgtggccagcccctgttcgtgtacaagctggagcaggtgtctgagaagggcaaggcttacaccaactacttcggacggtgcaatgtggccgagcacgaaaagctgatcctgctggcccagctgaagcccgagaaggatagcgacgaagccgtgacatatagcctgggaaagtttgggcagagggccctggatttctacagcattcatgtgaccaaggagtccacccaccccgtgaagcccctggcccagatcgccggaaacagatacgcctccggacctgtgggaaaggccctgagcgacgcatgtatgggcacaatcgcctccttcctgtctaagtaccaggacatcatcatcgaacaccagaaggtggtgaagggcaaccagaagagactggagagcctgcgggagctggccggcaaggaaaacctggaataccctagcgtgaccctgccacctcagcctcacaccaaggagggcgttgatgcctacaacgaagtgatcgcccgggtgcgaatgtgggtgaacctgaacctgtggcagaagctgaagctaagcagagatgatgccaagcctctgctgagactgaagggattcccttcctttcctctggtcgagagacaggccaacgaagtggactggtgggacatggtgtgtaacgtgaagaagctgatcaacgagaaaaaggaggatggcaaggtgttttggcagaatctggctggctacaagagacaggaagccctgagaccatacctgagcagcgaggaagatcggaagaagggaaagaaattcgctcggtaccagctgggcgacctgctgctgcacctggaaaagaagcacggcgaggactggggaaaggtgtacgacgaggcctgggagcggattgacaagaaagtggaaggcctgagcaagcacatcaagctggaagaggaacggagaagcgaggacgcccagagcaaggccgccctgaccgactggctgcgggctaaggccagcttcgtgatcgagggcctgaaggaggccgacaaggacgagttctgcagatgcgagctgaagctgcagaagtggtacggggacctgcggggaaagcccttcgccatcgaagccgagaacagcatcctggacatcagcggcttcagcaagcagtacaactgtgccttcatctggcagaaggacggcgtgaagaagctgaacctgtacctgatcatcaactacttcaagggcggcaagctgcggttcaagaagatcaaacctgaagccttcgaagccaacagattctacaccgtgatcaacaaaaagagcggcgagatcgtgcccatggaggtgaacttcaacttcgacgaccccaacctgatcatcctgcctctggcctttggcaagagacagggcagagaattcatctggaacgacctgctgtccctggaaaccggcagcctgaagctggccaacggaagagtgatcgagaagacactgtacaacagaagaacccggcaggatgagcctgccctgttcgtggccctgaccttcgagcggcgggaggtcctggactcctccaatatcaaaccaatgaacctgatcggcgtggcaagaggcgaaaacatccccgccgtgatcgccctgaccgaccccgagggctgcccactgagccggtttaaggatagcctgggaaacccaacccacatcctgagaatcggcgagagctataaggagaagcagcggaccatccaggccaagaaggaggtggagcagcggagagccggcggctacagccggaagtacgccagcaaagccaagaatctggcagacgatatggtgagaaacaccgctagagatctgctgtactacgccgtgacccaggatgccatgctgatcttcgccaacctgagccggggcttcggccggcagggcaagcggaccttcatggccgagagacagtacacacggatggaggactggctgaccgccaagctggcctacgagggcctgagcaagacctacctgtccaagacactggcccagtacacctccaagacatgcagcaactgtgggtttaccatcaccagcgccgactacgacagggtgctggagaagctgaagaagacagcaacaggctggatgaccacaattaacggcaaggagctgaaggtggagggccagattacctactacaacagatacaagagacagaacgtagtcaaggacctgtccgtcgagctggatagactgagcgaagaatctgtgaacaacgacatctcctcctggacaaagggcagaagcggagaagctctgagcctcctgaagaaaagattctcccatagacccgtgcaggagaagttcgtgtgcctgaactgcggcttcgagacacacgcagccgagcaagccgccctgaacatcgccagatcctggctgttcctgcggagccaggagtacaagaaataccagacaaacaagacaaccggcaacaccgataagagagccttcgtcgagacctggcagtccttttaccggaagaagcttaaggaggtgtggaaacctgccgtgcggtctggcggatctggcggaggctcctaggcagggcagcgtgaccttccaggacgtggccgtggacttcagctgggaggagtggggcaggctgggccccacccagaaggagctgtacagggaggtgatgctggagaactacaggaacctggtgtgcctgggcctggaggtgagcaagcccgacgtggtgtaccagctggagaggggcgaggccccctggatgcccgagggcgccgtgaggaggagctgcagccagaactggggcgccaggggatctggctccggcagcggccccaagaaaaagagaaaagtctaagctgccttctgcggggcttgccttctggccatgcccttcttctctcccttgcacctgtacctcttggtctttgaataaagcctgagtaggaaggctagcaaaaaaaaaaaaaaaaaaaaaaaaaaaaaaaaaaaaaaaaaaaaaaaaaaaaaaaaaaaaaaaaaaaaaaaaaaaaaaaa

SEQ ID NO: 15871 - RNA, 9485 nt, synthetic construct
  source 1..9485: mol_type = other RNA
aggaaataagagagaaaagaagagtaagaagaaatataagagccaccatggcccctaagaagaagcgtaaagtgagccggatggaacgcctcgtctacgaggtgcggcagaagtgcagaaacatcgaggacatctgcatctcctgcggatctctgaacgtgaccctggagcacccactgttcatcggcggcatgtgccagaactgtaaaaactgttttctggagtgtgcctatcaatacgacgatgacggctaccagagctactgcaccatctgttgcggcggaagagaggtgctgatgtgtggaaataacaactgctgccggtgcttctgcgtggaatgcgtggacctgctggtgggccccggcgccgcccaggccgctattaaggaagatccttggaactgctacatgtgcggccacaagggcacatacggcctgctgagacggagagaggactggcctagcagactgcagatgttcttcgccaataaccacgaccaggagttcgacccccctaaggtgtaccctcccgtccccgccgagaagagaaagcccatccgggtcctgagcctgttcgatggcatcgccaccggtctgctggtgctgaaggacctgggcatccaggtggataggtacattgcctccgaggtgtgcgaggactccatcaccgtgggaatggtgcgtcatcagggcaagatcatgtacgtgggcgacgtgcggagcgtgacacagaagcatatccaggagtggggccctttcgacctggtgatcggcggcagcccttgcaatgacctgagcatcgtgaacccagcccggaagggcctgtacgagggaaccggcagactgttcttcgagttttacagactgctgcacgacgcccggcctaaggaaggcgacgaccggcccttcttttggctgttcgagaatgtggtggccatgggagtcagcgacaagcgggatattagccggttcctggagagcaaccccgtgatgatcgatgccaaggaagtgagcgccgcccaccgggccagatacttctggggcaatctgcctggcatgaacagacccctggccagcaccgtgaacgacaagctggagctgcaggagtgcctggagcacggccggatcgccaagttcagcaaggtgagaaccatcaccacccgaagcaacagcatcaaacaaggcaaggaccagcactttcctgtgttcatgaacgagaaggaggacatcctgtggtgtaccgagatggagagagtgttcgggttcccagtccactacacagatgtcagcaacatgtctagactggccagacagagactgctgggaagaagctggtccgtccctgtgatcagacacctgttcgcccctctgaaggagtacttcgcctgcgtgagcagcggcaacagcaacgccaacagccggggccccagcttctctagcggcctggtgccactgtccctgagagggagccacatgggccccatggagatctacaaaaccgtgagcgcctggaagcggcagcctgtgcgcgtgctgagcctgtttcggaatatcgataaagtcctgaaaagcctgggattcctggagagcggctctggctccggcggtggcaccctgaagtacgtggaggatgtgacaaacgtggtcagacgggatgtggagaagtggggccccttcgatctggtgtacggcagcacccaacccctgggcagctcttgtgaccggtgccctggctggtacatgtttcagttccaccggatcctgcagtacgccctgccgagacaggagtcccagcggccattcttttggattttcatggacaacttgctgctgaccgaggatgaccaggaaactaccactcggttcctgcagaccgaagccgtgaccctgcaggacgtgagaggccgggactaccagaacgccatgcgggtgtggtccaacatccctggactgaaaagcaagcacgcacctctgacccctaaagaagaggagtacctgcaggcccaggtgcggagcagaagcaagctggacgcccctaaggtggatctgctggtgaagaattgcctcctgcccctgagagagtacttcaagtatttcagccagaatagtctgcccctgggaggcagcggcggcggcgccctggtgacatttgaggacgtcgccgtgcggttcacccaggaggaatgggctctgctggatccttctcagaaaatcctgtaccgggacgtgatgagagagacataccggaatctgacctccgtgggcatcaactgggaatgttgggaccttgaagcctgcttcagaagcctgggaagaaacctgagagtgcaggtggtgaagagaaagtgcgagctgaccaacagcggcccctgcgccgagggcggcccaagcagcggcgcccctcctcccagcggcggcagcccagccggctccccaacctctaccgaggagggcacctctgagtccgccacccccgagagcggccctggcacctccaccgagcccagcgagggcagcgcacccggcagccctgccggcagccccacctccacagaggagggaaccagcaccgagcccagcgaaggcagcgccccaggcaccagcaccgagcctagtgagcaggagattaaacggatcaacaagatcagaagaagacttgtgaaagacagcaacaccaagaaggccggcaagacaggccccatgaaaaccctgctggttagagtgatgacacccgatctgagagagcggctggaaaacctgagaaagaagcctgaaaatatcccccagcccatcagcaatacatctagagccaacctgaataagctgctgaccgattacaccgaaatgaagaaggcgatcctgcatgtgtactgggaagagttccagaaggaccctgtgggcctgatgagccgggtggcccagcctgccagcaagaagatcgatcagaacaagctgaaacctgagatggacgagaagggcaacctgaccaccgccggctttgcctgctctcagtgtggccagcccctgttcgtgtacaagctggagcaggtgtctgagaagggcaaggcttacaccaactacttcggacggtgcaatgtggccgagcacgaaaagctgatcctgctggcccagctgaagcccgagaaggatagcgacgaagccgtgacatatagcctgggaaagtttgggcagagggccctggatttctacagcattcatgtgaccaaggagtccacccaccccgtgaagcccctggcccagatcgccggaaacagatacgcctccggacctgtgggaaaggccctgagcgacgcatgtatgggcacaatcgcctccttcctgtctaagtaccaggacatcatcatcgaacaccagaaggtggtgaagggcaaccagaagagactggagagcctgcgggagctggccggcaaggaaaacctggaataccctagcgtgaccctgccacctcagcctcacaccaaggagggcgttgatgcctacaacgaagtgatcgcccgggtgcgaatgtgggtgaacctgaacctgtggcagaagctgaagctaagcagagatgatgccaagcctctgctgagactgaagggattcccttcctttcctctggtcgagagacaggccaacgaagtggactggtgggacatggtgtgtaacgtgaagaagctgatcaacgagaaaaaggaggatggcaaggtgttttggcagaatctggctggctacaagagacaggaagccctgagaccatacctgagcagcgaggaagatcggaagaagggaaagaaattcgctcggtaccagctgggcgacctgctgctgcacctggaaaagaagcacggcgaggactggggaaaggtgtacgacgaggcctgggagcggattgacaagaaagtggaaggcctgagcaagcacatcaagctggaagaggaacggagaagcgaggacgcccagagcaaggccgccctgaccgactggctgcgggctaaggccagcttcgtgatcgagggcctgaaggaggccgacaaggacgagttctgcagatgcgagctgaagctgcagaagtggtacggggacctgcggggaaagcccttcgccatcgaagccgagaacagcatcctggacatcagcggcttcagcaagcagtacaactgtgccttcatctggcagaaggacggcgtgaagaagctgaacctgtacctgatcatcaactacttcaagggcggcaagctgcggttcaagaagatcaaacctgaagccttcgaagccaacagattctacaccgtgatcaacaaaaagagcggcgagatcgtgcccatggaggtgaacttcaacttcgacgaccccaacctgatcatcctgcctctggcctttggcaagagacagggcagagaattcatctggaacgacctgctgtccctggaaaccggcagcctgaagctggccaacggaagagtgatcgagaagacactgtacaacagaagaacccggcaggatgagcctgccctgttcgtggccctgaccttcgagcggcgggaggtcctggactcctccaatatcaaaccaatgaacctgatcggcgtggcaagaggcgaaaacatccccgccgtgatcgccctgaccgaccccgagggctgcccactgagccggtttaaggatagcctgggaaacccaacccacatcctgagaatcggcgagagctataaggagaagcagcggaccatccaggccaagaaggaggtggagcagcggagagccggcggctacagccggaagtacgccagcaaagccaagaatctggcagacgatatggtgagaaacaccgctagagatctgctgtactacgccgtgacccaggatgccatgctgatcttcgccaacctgagccggggcttcggccggcagggcaagcggaccttcatggccgagagacagtacacacggatggaggactggctgaccgccaagctggcctacgagggcctgagcaagacctacctgtccaagacactggcccagtacacctccaagacatgcagcaactgtgggtttaccatcaccagcgccgactacgacagggtgctggagaagctgaagaagacagcaacaggctggatgaccacaattaacggcaaggagctgaaggtggagggccagattacctactacaacagatacaagagacagaacgtagtcaaggacctgtccgtcgagctggatagactgagcgaagaatctgtgaacaacgacatctcctcctggacaaagggcagaagcggagaagctctgagcctcctgaagaaaagattctcccatagacccgtgcaggagaagttcgtgtgcctgaactgcggcttcgagacacacgcagccgagcaagccgccctgaacatcgccagatcctggctgttcctgcggagccaggagtacaagaaataccagacaaacaagacaaccggcaacaccgataagagagccttcgtcgagacctggcagtccttttaccggaagaagcttaaggaggtgtggaaacctgccgtgcggtctggcggatctggcggaggctcccaggccgaggtgaccttcgaggacgtggccgtgctgctgagcagggaggagtggggcaggctgggccccgcccagaagggcctgtacagggacgtgatgctggagacctacaggaacctggtgagcctgggcgccggccacgccggccccaagcccggcgtgatcgcccagctggagaggggcgacgagccctgggtgctggacatgcagggcagggagcagagcaccatcgacggcagcgccggcggcccaagcagcggcgcccctcctcccagcggcggcagcccagccggctccccaacctctaccgaggagggcacctctgagtccgccacccccgagagcggccctggcacctccaccgagcccagcgagggcagcgcacccggcagccctgccggcagccccacctccacagaggagggaaccagcaccgagcccagcgaaggcagcgccccaggcaccagcaccgagcctagtgagcaggagattaaacggatcaacaagatcagaagaagacttgtgaaagacagcaacaccaagaaggccggcaagacaggccccatgaaaaccctgctggttagagtgatgacacccgatctgagagagcggctggaaaacctgagaaagaagcctgaaaatatcccccagcccatcagcaatacatctagagccaacctgaataagctgctgaccgattacaccgaaatgaagaaggcgatcctgcatgtgtactgggaagagttccagaaggaccctgtgggcctgatgagccgggtggcccagcctgccagcaagaagatcgatcagaacaagctgaaacctgagatggacgagaagggcaacctgaccaccgccggctttgcctgctctcagtgtggccagcccctgttcgtgtacaagctggagcaggtgtctgagaagggcaaggcttacaccaactacttcggacggtgcaatgtggccgagcacgaaaagctgatcctgctggcccagctgaagcccgagaaggatagcgacgaagccgtgacatatagcctgggaaagtttgggcagagggccctggatttctacagcattcatgtgaccaaggagtccacccaccccgtgaagcccctggcccagatcgccggaaacagatacgcctccggacctgtgggaaaggccctgagcgacgcatgtatgggcacaatcgcctccttcctgtctaagtaccaggacatcatcatcgaacaccagaaggtggtgaagggcaaccagaagagactggagagcctgcgggagctggccggcaaggaaaacctggaataccctagcgtgaccctgccacctcagcctcacaccaaggagggcgttgatgcctacaacgaagtgatcgcccgggtgcgaatgtgggtgaacctgaacctgtggcagaagctgaagctaagcagagatgatgccaagcctctgctgagactgaagggattcccttcctttcctctggtcgagagacaggccaacgaagtggactggtgggacatggtgtgtaacgtgaagaagctgatcaacgagaaaaaggaggatggcaaggtgttttggcagaatctggctggctacaagagacaggaagccctgagaccatacctgagcagcgaggaagatcggaagaagggaaagaaattcgctcggtaccagctgggcgacctgctgctgcacctggaaaagaagcacggcgaggactggggaaaggtgtacgacgaggcctgggagcggattgacaagaaagtggaaggcctgagcaagcacatcaagctggaagaggaacggagaagcgaggacgcccagagcaaggccgccctgaccgactggctgcgggctaaggccagcttcgtgatcgagggcctgaaggaggccgacaaggacgagttctgcagatgcgagctgaagctgcagaagtggtacggggacctgcggggaaagcccttcgccatcgaagccgagaacagcatcctggacatcagcggcttcagcaagcagtacaactgtgccttcatctggcagaaggacggcgtgaagaagctgaacctgtacctgatcatcaactacttcaagggcggcaagctgcggttcaagaagatcaaacctgaagccttcgaagccaacagattctacaccgtgatcaacaaaaagagcggcgagatcgtgcccatggaggtgaacttcaacttcgacgaccccaacctgatcatcctgcctctggcctttggcaagagacagggcagagaattcatctggaacgacctgctgtccctggaaaccggcagcctgaagctggccaacggaagagtgatcgagaagacactgtacaacagaagaacccggcaggatgagcctgccctgttcgtggccctgaccttcgagcggcgggaggtcctggactcctccaatatcaaaccaatgaacctgatcggcgtggcaagaggcgaaaacatccccgccgtgatcgccctgaccgaccccgagggctgcccactgagccggtttaaggatagcctgggaaacccaacccacatcctgagaatcggcgagagctataaggagaagcagcggaccatccaggccaagaaggaggtggagcagcggagagccggcggctacagccggaagtacgccagcaaagccaagaatctggcagacgatatggtgagaaacaccgctagagatctgctgtactacgccgtgacccaggatgccatgctgatcttcgccaacctgagccggggcttcggccggcagggcaagcggaccttcatggccgagagacagtacacacggatggaggactggctgaccgccaagctggcctacgagggcctgagcaagacctacctgtccaagacactggcccagtacacctccaagacatgcagcaactgtgggtttaccatcaccagcgccgactacgacagggtgctggagaagctgaagaagacagcaacaggctggatgaccacaattaacggcaaggagctgaaggtggagggccagattacctactacaacagatacaagagacagaacgtagtcaaggacctgtccgtcgagctggatagactgagcgaagaatctgtgaacaacgacatctcctcctggacaaagggcagaagcggagaagctctgagcctcctgaagaaaagattctcccatagacccgtgcaggagaagttcgtgtgcctgaactgcggcttcgagacacacgcagccgagcaagccgccctgaacatcgccagatcctggctgttcctgcggagccaggagtacaagaaataccagacaaacaagacaaccggcaacaccgataagagagccttcgtcgagacctggcagtccttttaccggaagaagcttaaggaggtgtggaaacctgccgtgcggtctggcggatctggcggaggctcctcaggccgaggtgaccttcgaggacgtggccgtgctgctgagcagggaggagtggggcaggctgggccccgcccagaagggcctgtacagggacgtgatgctggagacctacaggaacctggtgagcctgggcgccggccacgccggccccaagcccggcgtgatcgcccagctggagaggggcgacgagccctgggtgctggacatgcagggcagggagcagagcaccatcgacggcagcgccggatctggctccggcagcggccccaagaaaaagagaaaagtctaagctgccttctgcggggcttgccttctggccatgcccttcttctctcccttgcacctgtacctcttggtctttgaataaagcctgagtaggaaggctagcaaaaaaaaaaaaaaaaaaaaaaaaaaaaaaaaaaaaaaaaaaaaaaaaaaaaaaaaaaaaaaaaaaaaaaaaaaaaaaaa

SEQ ID NO: 15872 - RNA, 9485 nt, synthetic construct
  source 1..9485: mol_type = other RNA
aggaaataagagagaaaagaagagtaagaagaaatataagagccaccatggcccctaagaagaagcgtaaagtgagccggatggaacgcctcgtctacgaggtgcggcagaagtgcagaaacatcgaggacatctgcatctcctgcggatctctgaacgtgaccctggagcacccactgttcatcggcggcatgtgccagaactgtaaaaactgttttctggagtgtgcctatcaatacgacgatgacggctaccagagctactgcaccatctgttgcggcggaagagaggtgctgatgtgtggaaataacaactgctgccggtgcttctgcgtggaatgcgtggacctgctggtgggccccggcgccgcccaggccgctattaaggaagatccttggaactgctacatgtgcggccacaagggcacatacggcctgctgagacggagagaggactggcctagcagactgcagatgttcttcgccaataaccacgaccaggagttcgacccccctaaggtgtaccctcccgtccccgccgagaagagaaagcccatccgggtcctgagcctgttcgatggcatcgccaccggtctgctggtgctgaaggacctgggcatccaggtggataggtacattgcctccgaggtgtgcgaggactccatcaccgtgggaatggtgcgtcatcagggcaagatcatgtacgtgggcgacgtgcggagcgtgacacagaagcatatccaggagtggggccctttcgacctggtgatcggcggcagcccttgcaatgacctgagcatcgtgaacccagcccggaagggcctgtacgagggaaccggcagactgttcttcgagttttacagactgctgcacgacgcccggcctaaggaaggcgacgaccggcccttcttttggctgttcgagaatgtggtggccatgggagtcagcgacaagcgggatattagccggttcctggagagcaaccccgtgatgatcgatgccaaggaagtgagcgccgcccaccgggccagatacttctggggcaatctgcctggcatgaacagacccctggccagcaccgtgaacgacaagctggagctgcaggagtgcctggagcacggccggatcgccaagttcagcaaggtgagaaccatcaccacccgaagcaacagcatcaaacaaggcaaggaccagcactttcctgtgttcatgaacgagaaggaggacatcctgtggtgtaccgagatggagagagtgttcgggttcccagtccactacacagatgtcagcaacatgtctagactggccagacagagactgctgggaagaagctggtccgtccctgtgatcagacacctgttcgcccctctgaaggagtacttcgcctgcgtgagcagcggcaacagcaacgccaacagccggggccccagcttctctagcggcctggtgccactgtccctgagagggagccacatgggccccatggagatctacaaaaccgtgagcgcctggaagcggcagcctgtgcgcgtgctgagcctgtttcggaatatcgataaagtcctgaaaagcctgggattcctggagagcggctctggctccggcggtggcaccctgaagtacgtggaggatgtgacaaacgtggtcagacgggatgtggagaagtggggccccttcgatctggtgtacggcagcacccaacccctgggcagctcttgtgaccggtgccctggctggtacatgtttcagttccaccggatcctgcagtacgccctgccgagacaggagtcccagcggccattcttttggattttcatggacaacttgctgctgaccgaggatgaccaggaaactaccactcggttcctgcagaccgaagccgtgaccctgcaggacgtgagaggccgggactaccagaacgccatgcgggtgtggtccaacatccctggactgaaaagcaagcacgcacctctgacccctaaagaagaggagtacctgcaggcccaggtgcggagcagaagcaagctggacgcccctaaggtggatctgctggtgaagaattgcctcctgcccctgagagagtacttcaagtatttcagccagaatagtctgcccctgggaggcagcggcggcggcgccctggtgacatttgaggacgtcgccgtgcggttcacccaggaggaatgggctctgctggatccttctcagaaaatcctgtaccgggacgtgatgagagagacataccggaatctgacctccgtgggcatcaactgggaatgttgggaccttgaagcctgcttcagaagcctgggaagaaacctgagagtgcaggtggtgaagagaaagtgcgagctgaccaacagcggcccctgcgccgagggcggcccaagcagcggcgcccctcctcccagcggcggcagcccagccggctccccaacctctaccgaggagggcacctctgagtccgccacccccgagagcggccctggcacctccaccgagcccagcgagggcagcgcacccggcagccctgccggcagccccacctccacagaggagggaaccagcaccgagcccagcgaaggcagcgccccaggcaccagcaccgagcctagtgagcaggagattaaacggatcaacaagatcagaagaagacttgtgaaagacagcaacaccaagaaggccggcaagacaggccccatgaaaaccctgctggttagagtgatgacacccgatctgagagagcggctggaaaacctgagaaagaagcctgaaaatatcccccagcccatcagcaatacatctagagccaacctgaataagctgctgaccgattacaccgaaatgaagaaggcgatcctgcatgtgtactgggaagagttccagaaggaccctgtgggcctgatgagccgggtggcccagcctgccagcaagaagatcgatcagaacaagctgaaacctgagatggacgagaagggcaacctgaccaccgccggctttgcctgctctcagtgtggccagcccctgttcgtgtacaagctggagcaggtgtctgagaagggcaaggcttacaccaactacttcggacggtgcaatgtggccgagcacgaaaagctgatcctgctggcccagctgaagcccgagaaggatagcgacgaagccgtgacatatagcctgggaaagtttgggcagagggccctggatttctacagcattcatgtgaccaaggagtccacccaccccgtgaagcccctggcccagatcgccggaaacagatacgcctccggacctgtgggaaaggccctgagcgacgcatgtatgggcacaatcgcctccttcctgtctaagtaccaggacatcatcatcgaacaccagaaggtggtgaagggcaaccagaagagactggagagcctgcgggagctggccggcaaggaaaacctggaataccctagcgtgaccctgccacctcagcctcacaccaaggagggcgttgatgcctacaacgaagtgatcgcccgggtgcgaatgtgggtgaacctgaacctgtggcagaagctgaagctaagcagagatgatgccaagcctctgctgagactgaagggattcccttcctttcctctggtcgagagacaggccaacgaagtggactggtgggacatggtgtgtaacgtgaagaagctgatcaacgagaaaaaggaggatggcaaggtgttttggcagaatctggctggctacaagagacaggaagccctgagaccatacctgagcagcgaggaagatcggaagaagggaaagaaattcgctcggtaccagctgggcgacctgctgctgcacctggaaaagaagcacggcgaggactggggaaaggtgtacgacgaggcctgggagcggattgacaagaaagtggaaggcctgagcaagcacatcaagctggaagaggaacggagaagcgaggacgcccagagcaaggccgccctgaccgactggctgcgggctaaggccagcttcgtgatcgagggcctgaaggaggccgacaaggacgagttctgcagatgcgagctgaagctgcagaagtggtacggggacctgcggggaaagcccttcgccatcgaagccgagaacagcatcctggacatcagcggcttcagcaagcagtacaactgtgccttcatctggcagaaggacggcgtgaagaagctgaacctgtacctgatcatcaactacttcaagggcggcaagctgcggttcaagaagatcaaacctgaagccttcgaagccaacagattctacaccgtgatcaacaaaaagagcggcgagatcgtgcccatggaggtgaacttcaacttcgacgaccccaacctgatcatcctgcctctggcctttggcaagagacagggcagagaattcatctggaacgacctgctgtccctggaaaccggcagcctgaagctggccaacggaagagtgatcgagaagacactgtacaacagaagaacccggcaggatgagcctgccctgttcgtggccctgaccttcgagcggcgggaggtcctggactcctccaatatcaaaccaatgaacctgatcggcgtggcaagaggcgaaaacatccccgccgtgatcgccctgaccgaccccgagggctgcccactgagccggtttaaggatagcctgggaaacccaacccacatcctgagaatcggcgagagctataaggagaagcagcggaccatccaggccaagaaggaggtggagcagcggagagccggcggctacagccggaagtacgccagcaaagccaagaatctggcagacgatatggtgagaaacaccgctagagatctgctgtactacgccgtgacccaggatgccatgctgatcttcgccaacctgagccggggcttcggccggcagggcaagcggaccttcatggccgagagacagtacacacggatggaggactggctgaccgccaagctggcctacgagggcctgagcaagacctacctgtccaagacactggcccagtacacctccaagacatgcagcaactgtgggtttaccatcaccagcgccgactacgacagggtgctggagaagctgaagaagacagcaacaggctggatgaccacaattaacggcaaggagctgaaggtggagggccagattacctactacaacagatacaagagacagaacgtagtcaaggacctgtccgtcgagctggatagactgagcgaagaatctgtgaacaacgacatctcctcctggacaaagggcagaagcggagaagctctgagcctcctgaagaaaagattctcccatagacccgtgcaggagaagttcgtgtgcctgaactgcggcttcgagacacacgcagccgagcaagccgccctgaacatcgccagatcctggctgttcctgcggagccaggagtacaagaaataccagacaaacaagacaaccggcaacaccgataagagagccttcgtcgagacctggcagtccttttaccggaagaagcttaaggaggtgtggaaacctgccgtgcggtctggcggatctggcggaggctccagcagccaggagctgctgaccttcagggacgtggccatcgagttcagccaggaggagtggaggtgcctgaaccacacccagagggagctgtacagggacgtgatgctggagaactacggccacctgctgttcctgggcctgatcgtgagcaagcccgacctggtgagcttcctggagcagaccaaggacccctgggacggcaagagcaagaagaccgtggccttccaccccggcaggtgggagggcggcccaagcagcggcgcccctcctcccagcggcggcagcccagccggctccccaacctctaccgaggagggcacctctgagtccgccacccccgagagcggccctggcacctccaccgagcccagcgagggcagcgcacccggcagccctgccggcagccccacctccacagaggagggaaccagcaccgagcccagcgaaggcagcgccccaggcaccagcaccgagcctagtgagcaggagattaaacggatcaacaagatcagaagaagacttgtgaaagacagcaacaccaagaaggccggcaagacaggccccatgaaaaccctgctggttagagtgatgacacccgatctgagagagcggctggaaaacctgagaaagaagcctgaaaatatcccccagcccatcagcaatacatctagagccaacctgaataagctgctgaccgattacaccgaaatgaagaaggcgatcctgcatgtgtactgggaagagttccagaaggaccctgtgggcctgatgagccgggtggcccagcctgccagcaagaagatcgatcagaacaagctgaaacctgagatggacgagaagggcaacctgaccaccgccggctttgcctgctctcagtgtggccagcccctgttcgtgtacaagctggagcaggtgtctgagaagggcaaggcttacaccaactacttcggacggtgcaatgtggccgagcacgaaaagctgatcctgctggcccagctgaagcccgagaaggatagcgacgaagccgtgacatatagcctgggaaagtttgggcagagggccctggatttctacagcattcatgtgaccaaggagtccacccaccccgtgaagcccctggcccagatcgccggaaacagatacgcctccggacctgtgggaaaggccctgagcgacgcatgtatgggcacaatcgcctccttcctgtctaagtaccaggacatcatcatcgaacaccagaaggtggtgaagggcaaccagaagagactggagagcctgcgggagctggccggcaaggaaaacctggaataccctagcgtgaccctgccacctcagcctcacaccaaggagggcgttgatgcctacaacgaagtgatcgcccgggtgcgaatgtgggtgaacctgaacctgtggcagaagctgaagctaagcagagatgatgccaagcctctgctgagactgaagggattcccttcctttcctctggtcgagagacaggccaacgaagtggactggtgggacatggtgtgtaacgtgaagaagctgatcaacgagaaaaaggaggatggcaaggtgttttggcagaatctggctggctacaagagacaggaagccctgagaccatacctgagcagcgaggaagatcggaagaagggaaagaaattcgctcggtaccagctgggcgacctgctgctgcacctggaaaagaagcacggcgaggactggggaaaggtgtacgacgaggcctgggagcggattgacaagaaagtggaaggcctgagcaagcacatcaagctggaagaggaacggagaagcgaggacgcccagagcaaggccgccctgaccgactggctgcgggctaaggccagcttcgtgatcgagggcctgaaggaggccgacaaggacgagttctgcagatgcgagctgaagctgcagaagtggtacggggacctgcggggaaagcccttcgccatcgaagccgagaacagcatcctggacatcagcggcttcagcaagcagtacaactgtgccttcatctggcagaaggacggcgtgaagaagctgaacctgtacctgatcatcaactacttcaagggcggcaagctgcggttcaagaagatcaaacctgaagccttcgaagccaacagattctacaccgtgatcaacaaaaagagcggcgagatcgtgcccatggaggtgaacttcaacttcgacgaccccaacctgatcatcctgcctctggcctttggcaagagacagggcagagaattcatctggaacgacctgctgtccctggaaaccggcagcctgaagctggccaacggaagagtgatcgagaagacactgtacaacagaagaacccggcaggatgagcctgccctgttcgtggccctgaccttcgagcggcgggaggtcctggactcctccaatatcaaaccaatgaacctgatcggcgtggcaagaggcgaaaacatccccgccgtgatcgccctgaccgaccccgagggctgcccactgagccggtttaaggatagcctgggaaacccaacccacatcctgagaatcggcgagagctataaggagaagcagcggaccatccaggccaagaaggaggtggagcagcggagagccggcggctacagccggaagtacgccagcaaagccaagaatctggcagacgatatggtgagaaacaccgctagagatctgctgtactacgccgtgacccaggatgccatgctgatcttcgccaacctgagccggggcttcggccggcagggcaagcggaccttcatggccgagagacagtacacacggatggaggactggctgaccgccaagctggcctacgagggcctgagcaagacctacctgtccaagacactggcccagtacacctccaagacatgcagcaactgtgggtttaccatcaccagcgccgactacgacagggtgctggagaagctgaagaagacagcaacaggctggatgaccacaattaacggcaaggagctgaaggtggagggccagattacctactacaacagatacaagagacagaacgtagtcaaggacctgtccgtcgagctggatagactgagcgaagaatctgtgaacaacgacatctcctcctggacaaagggcagaagcggagaagctctgagcctcctgaagaaaagattctcccatagacccgtgcaggagaagttcgtgtgcctgaactgcggcttcgagacacacgcagccgagcaagccgccctgaacatcgccagatcctggctgttcctgcggagccaggagtacaagaaataccagacaaacaagacaaccggcaacaccgataagagagccttcgtcgagacctggcagtccttttaccggaagaagcttaaggaggtgtggaaacctgccgtgcggtctggcggatctggcggaggctcctagcagccaggagctgctgaccttcagggacgtggccatcgagttcagccaggaggagtggaggtgcctgaaccacacccagagggagctgtacagggacgtgatgctggagaactacggccacctgctgttcctgggcctgatcgtgagcaagcccgacctggtgagcttcctggagcagaccaaggacccctgggacggcaagagcaagaagaccgtggccttccaccccggcaggtgggagggatctggctccggcagcggccccaagaaaaagagaaaagtctaagctgccttctgcggggcttgccttctggccatgcccttcttctctcccttgcacctgtacctcttggtctttgaataaagcctgagtaggaaggctagcaaaaaaaaaaaaaaaaaaaaaaaaaaaaaaaaaaaaaaaaaaaaaaaaaaaaaaaaaaaaaaaaaaaaaaaaaaaaaaaa

SEQ ID NO: 15873 - RNA, 9485 nt, synthetic construct
  source 1..9485: mol_type = other RNA
aggaaataagagagaaaagaagagtaagaagaaatataagagccaccatggcccctaagaagaagcgtaaagtgagccggatggaacgcctcgtctacgaggtgcggcagaagtgcagaaacatcgaggacatctgcatctcctgcggatctctgaacgtgaccctggagcacccactgttcatcggcggcatgtgccagaactgtaaaaactgttttctggagtgtgcctatcaatacgacgatgacggctaccagagctactgcaccatctgttgcggcggaagagaggtgctgatgtgtggaaataacaactgctgccggtgcttctgcgtggaatgcgtggacctgctggtgggccccggcgccgcccaggccgctattaaggaagatccttggaactgctacatgtgcggccacaagggcacatacggcctgctgagacggagagaggactggcctagcagactgcagatgttcttcgccaataaccacgaccaggagttcgacccccctaaggtgtaccctcccgtccccgccgagaagagaaagcccatccgggtcctgagcctgttcgatggcatcgccaccggtctgctggtgctgaaggacctgggcatccaggtggataggtacattgcctccgaggtgtgcgaggactccatcaccgtgggaatggtgcgtcatcagggcaagatcatgtacgtgggcgacgtgcggagcgtgacacagaagcatatccaggagtggggccctttcgacctggtgatcggcggcagcccttgcaatgacctgagcatcgtgaacccagcccggaagggcctgtacgagggaaccggcagactgttcttcgagttttacagactgctgcacgacgcccggcctaaggaaggcgacgaccggcccttcttttggctgttcgagaatgtggtggccatgggagtcagcgacaagcgggatattagccggttcctggagagcaaccccgtgatgatcgatgccaaggaagtgagcgccgcccaccgggccagatacttctggggcaatctgcctggcatgaacagacccctggccagcaccgtgaacgacaagctggagctgcaggagtgcctggagcacggccggatcgccaagttcagcaaggtgagaaccatcaccacccgaagcaacagcatcaaacaaggcaaggaccagcactttcctgtgttcatgaacgagaaggaggacatcctgtggtgtaccgagatggagagagtgttcgggttcccagtccactacacagatgtcagcaacatgtctagactggccagacagagactgctgggaagaagctggtccgtccctgtgatcagacacctgttcgcccctctgaaggagtacttcgcctgcgtgagcagcggcaacagcaacgccaacagccggggccccagcttctctagcggcctggtgccactgtccctgagagggagccacatgggccccatggagatctacaaaaccgtgagcgcctggaagcggcagcctgtgcgcgtgctgagcctgtttcggaatatcgataaagtcctgaaaagcctgggattcctggagagcggctctggctccggcggtggcaccctgaagtacgtggaggatgtgacaaacgtggtcagacgggatgtggagaagtggggccccttcgatctggtgtacggcagcacccaacccctgggcagctcttgtgaccggtgccctggctggtacatgtttcagttccaccggatcctgcagtacgccctgccgagacaggagtcccagcggccattcttttggattttcatggacaacttgctgctgaccgaggatgaccaggaaactaccactcggttcctgcagaccgaagccgtgaccctgcaggacgtgagaggccgggactaccagaacgccatgcgggtgtggtccaacatccctggactgaaaagcaagcacgcacctctgacccctaaagaagaggagtacctgcaggcccaggtgcggagcagaagcaagctggacgcccctaaggtggatctgctggtgaagaattgcctcctgcccctgagagagtacttcaagtatttcagccagaatagtctgcccctgggaggcagcggcggcggcgccctggtgacatttgaggacgtcgccgtgcggttcacccaggaggaatgggctctgctggatccttctcagaaaatcctgtaccgggacgtgatgagagagacataccggaatctgacctccgtgggcatcaactgggaatgttgggaccttgaagcctgcttcagaagcctgggaagaaacctgagagtgcaggtggtgaagagaaagtgcgagctgaccaacagcggcccctgcgccgagggcggcccaagcagcggcgcccctcctcccagcggcggcagcccagccggctccccaacctctaccgaggagggcacctctgagtccgccacccccgagagcggccctggcacctccaccgagcccagcgagggcagcgcacccggcagccctgccggcagccccacctccacagaggagggaaccagcaccgagcccagcgaaggcagcgccccaggcaccagcaccgagcctagtgagcaggagattaaacggatcaacaagatcagaagaagacttgtgaaagacagcaacaccaagaaggccggcaagacaggccccatgaaaaccctgctggttagagtgatgacacccgatctgagagagcggctggaaaacctgagaaagaagcctgaaaatatcccccagcccatcagcaatacatctagagccaacctgaataagctgctgaccgattacaccgaaatgaagaaggcgatcctgcatgtgtactgggaagagttccagaaggaccctgtgggcctgatgagccgggtggcccagcctgccagcaagaagatcgatcagaacaagctgaaacctgagatggacgagaagggcaacctgaccaccgccggctttgcctgctctcagtgtggccagcccctgttcgtgtacaagctggagcaggtgtctgagaagggcaaggcttacaccaactacttcggacggtgcaatgtggccgagcacgaaaagctgatcctgctggcccagctgaagcccgagaaggatagcgacgaagccgtgacatatagcctgggaaagtttgggcagagggccctggatttctacagcattcatgtgaccaaggagtccacccaccccgtgaagcccctggcccagatcgccggaaacagatacgcctccggacctgtgggaaaggccctgagcgacgcatgtatgggcacaatcgcctccttcctgtctaagtaccaggacatcatcatcgaacaccagaaggtggtgaagggcaaccagaagagactggagagcctgcgggagctggccggcaaggaaaacctggaataccctagcgtgaccctgccacctcagcctcacaccaaggagggcgttgatgcctacaacgaagtgatcgcccgggtgcgaatgtgggtgaacctgaacctgtggcagaagctgaagctaagcagagatgatgccaagcctctgctgagactgaagggattcccttcctttcctctggtcgagagacaggccaacgaagtggactggtgggacatggtgtgtaacgtgaagaagctgatcaacgagaaaaaggaggatggcaaggtgttttggcagaatctggctggctacaagagacaggaagccctgagaccatacctgagcagcgaggaagatcggaagaagggaaagaaattcgctcggtaccagctgggcgacctgctgctgcacctggaaaagaagcacggcgaggactggggaaaggtgtacgacgaggcctgggagcggattgacaagaaagtggaaggcctgagcaagcacatcaagctggaagaggaacggagaagcgaggacgcccagagcaaggccgccctgaccgactggctgcgggctaaggccagcttcgtgatcgagggcctgaaggaggccgacaaggacgagttctgcagatgcgagctgaagctgcagaagtggtacggggacctgcggggaaagcccttcgccatcgaagccgagaacagcatcctggacatcagcggcttcagcaagcagtacaactgtgccttcatctggcagaaggacggcgtgaagaagctgaacctgtacctgatcatcaactacttcaagggcggcaagctgcggttcaagaagatcaaacctgaagccttcgaagccaacagattctacaccgtgatcaacaaaaagagcggcgagatcgtgcccatggaggtgaacttcaacttcgacgaccccaacctgatcatcctgcctctggcctttggcaagagacagggcagagaattcatctggaacgacctgctgtccctggaaaccggcagcctgaagctggccaacggaagagtgatcgagaagacactgtacaacagaagaacccggcaggatgagcctgccctgttcgtggccctgaccttcgagcggcgggaggtcctggactcctccaatatcaaaccaatgaacctgatcggcgtggcaagaggcgaaaacatccccgccgtgatcgccctgaccgaccccgagggctgcccactgagccggtttaaggatagcctgggaaacccaacccacatcctgagaatcggcgagagctataaggagaagcagcggaccatccaggccaagaaggaggtggagcagcggagagccggcggctacagccggaagtacgccagcaaagccaagaatctggcagacgatatggtgagaaacaccgctagagatctgctgtactacgccgtgacccaggatgccatgctgatcttcgccaacctgagccggggcttcggccggcagggcaagcggaccttcatggccgagagacagtacacacggatggaggactggctgaccgccaagctggcctacgagggcctgagcaagacctacctgtccaagacactggcccagtacacctccaagacatgcagcaactgtgggtttaccatcaccagcgccgactacgacagggtgctggagaagctgaagaagacagcaacaggctggatgaccacaattaacggcaaggagctgaaggtggagggccagattacctactacaacagatacaagagacagaacgtagtcaaggacctgtccgtcgagctggatagactgagcgaagaatctgtgaacaacgacatctcctcctggacaaagggcagaagcggagaagctctgagcctcctgaagaaaagattctcccatagacccgtgcaggagaagttcgtgtgcctgaactgcggcttcgagacacacgcagccgagcaagccgccctgaacatcgccagatcctggctgttcctgcggagccaggagtacaagaaataccagacaaacaagacaaccggcaacaccgataagagagccttcgtcgagacctggcagtccttttaccggaagaagcttaaggaggtgtggaaacctgccgtgcggtctggcggatctggcggaggctccctgcaggtgagcgtgagcttcgaggacgtgaccgtgaacttcagcagggaggagtggcagcacctggaccccgcccagaggaggctgtacagggacgtgaccctggagaactacagccacctgaggagcgtgggctaccaggtgcccaagcccgaggtgatcttcaagctggagcagggcgagggcccctggaccctggagggcgagaccccccaccagagctgcagcggcgaggacatcggcggcggcccaagcagcggcgcccctcctcccagcggcggcagcccagccggctccccaacctctaccgaggagggcacctctgagtccgccacccccgagagcggccctggcacctccaccgagcccagcgagggcagcgcacccggcagccctgccggcagccccacctccacagaggagggaaccagcaccgagcccagcgaaggcagcgccccaggcaccagcaccgagcctagtgagcaggagattaaacggatcaacaagatcagaagaagacttgtgaaagacagcaacaccaagaaggccggcaagacaggccccatgaaaaccctgctggttagagtgatgacacccgatctgagagagcggctggaaaacctgagaaagaagcctgaaaatatcccccagcccatcagcaatacatctagagccaacctgaataagctgctgaccgattacaccgaaatgaagaaggcgatcctgcatgtgtactgggaagagttccagaaggaccctgtgggcctgatgagccgggtggcccagcctgccagcaagaagatcgatcagaacaagctgaaacctgagatggacgagaagggcaacctgaccaccgccggctttgcctgctctcagtgtggccagcccctgttcgtgtacaagctggagcaggtgtctgagaagggcaaggcttacaccaactacttcggacggtgcaatgtggccgagcacgaaaagctgatcctgctggcccagctgaagcccgagaaggatagcgacgaagccgtgacatatagcctgggaaagtttgggcagagggccctggatttctacagcattcatgtgaccaaggagtccacccaccccgtgaagcccctggcccagatcgccggaaacagatacgcctccggacctgtgggaaaggccctgagcgacgcatgtatgggcacaatcgcctccttcctgtctaagtaccaggacatcatcatcgaacaccagaaggtggtgaagggcaaccagaagagactggagagcctgcgggagctggccggcaaggaaaacctggaataccctagcgtgaccctgccacctcagcctcacaccaaggagggcgttgatgcctacaacgaagtgatcgcccgggtgcgaatgtgggtgaacctgaacctgtggcagaagctgaagctaagcagagatgatgccaagcctctgctgagactgaagggattcccttcctttcctctggtcgagagacaggccaacgaagtggactggtgggacatggtgtgtaacgtgaagaagctgatcaacgagaaaaaggaggatggcaaggtgttttggcagaatctggctggctacaagagacaggaagccctgagaccatacctgagcagcgaggaagatcggaagaagggaaagaaattcgctcggtaccagctgggcgacctgctgctgcacctggaaaagaagcacggcgaggactggggaaaggtgtacgacgaggcctgggagcggattgacaagaaagtggaaggcctgagcaagcacatcaagctggaagaggaacggagaagcgaggacgcccagagcaaggccgccctgaccgactggctgcgggctaaggccagcttcgtgatcgagggcctgaaggaggccgacaaggacgagttctgcagatgcgagctgaagctgcagaagtggtacggggacctgcggggaaagcccttcgccatcgaagccgagaacagcatcctggacatcagcggcttcagcaagcagtacaactgtgccttcatctggcagaaggacggcgtgaagaagctgaacctgtacctgatcatcaactacttcaagggcggcaagctgcggttcaagaagatcaaacctgaagccttcgaagccaacagattctacaccgtgatcaacaaaaagagcggcgagatcgtgcccatggaggtgaacttcaacttcgacgaccccaacctgatcatcctgcctctggcctttggcaagagacagggcagagaattcatctggaacgacctgctgtccctggaaaccggcagcctgaagctggccaacggaagagtgatcgagaagacactgtacaacagaagaacccggcaggatgagcctgccctgttcgtggccctgaccttcgagcggcgggaggtcctggactcctccaatatcaaaccaatgaacctgatcggcgtggcaagaggcgaaaacatccccgccgtgatcgccctgaccgaccccgagggctgcccactgagccggtttaaggatagcctgggaaacccaacccacatcctgagaatcggcgagagctataaggagaagcagcggaccatccaggccaagaaggaggtggagcagcggagagccggcggctacagccggaagtacgccagcaaagccaagaatctggcagacgatatggtgagaaacaccgctagagatctgctgtactacgccgtgacccaggatgccatgctgatcttcgccaacctgagccggggcttcggccggcagggcaagcggaccttcatggccgagagacagtacacacggatggaggactggctgaccgccaagctggcctacgagggcctgagcaagacctacctgtccaagacactggcccagtacacctccaagacatgcagcaactgtgggtttaccatcaccagcgccgactacgacagggtgctggagaagctgaagaagacagcaacaggctggatgaccacaattaacggcaaggagctgaaggtggagggccagattacctactacaacagatacaagagacagaacgtagtcaaggacctgtccgtcgagctggatagactgagcgaagaatctgtgaacaacgacatctcctcctggacaaagggcagaagcggagaagctctgagcctcctgaagaaaagattctcccatagacccgtgcaggagaagttcgtgtgcctgaactgcggcttcgagacacacgcagccgagcaagccgccctgaacatcgccagatcctggctgttcctgcggagccaggagtacaagaaataccagacaaacaagacaaccggcaacaccgataagagagccttcgtcgagacctggcagtccttttaccggaagaagcttaaggaggtgtggaaacctgccgtgcggtctggcggatctggcggaggctcctctgcaggtgagcgtgagcttcgaggacgtgaccgtgaacttcagcagggaggagtggcagcacctggaccccgcccagaggaggctgtacagggacgtgaccctggagaactacagccacctgaggagcgtgggctaccaggtgcccaagcccgaggtgatcttcaagctggagcagggcgagggcccctggaccctggagggcgagaccccccaccagagctgcagcggcgaggacatcggcggatctggctccggcagcggccccaagaaaaagagaaaagtctaagctgccttctgcggggcttgccttctggccatgcccttcttctctcccttgcacctgtacctcttggtctttgaataaagcctgagtaggaaggctagcaaaaaaaaaaaaaaaaaaaaaaaaaaaaaaaaaaaaaaaaaaaaaaaaaaaaaaaaaaaaaaaaaaaaaaaaaaaaaaaa

SEQ ID NO: 15874 - RNA, 9485 nt, synthetic construct
  source 1..9485: mol_type = other RNA
aggaaataagagagaaaagaagagtaagaagaaatataagagccaccatggcccctaagaagaagcgtaaagtgagccggatggaacgcctcgtctacgaggtgcggcagaagtgcagaaacatcgaggacatctgcatctcctgcggatctctgaacgtgaccctggagcacccactgttcatcggcggcatgtgccagaactgtaaaaactgttttctggagtgtgcctatcaatacgacgatgacggctaccagagctactgcaccatctgttgcggcggaagagaggtgctgatgtgtggaaataacaactgctgccggtgcttctgcgtggaatgcgtggacctgctggtgggccccggcgccgcccaggccgctattaaggaagatccttggaactgctacatgtgcggccacaagggcacatacggcctgctgagacggagagaggactggcctagcagactgcagatgttcttcgccaataaccacgaccaggagttcgacccccctaaggtgtaccctcccgtccccgccgagaagagaaagcccatccgggtcctgagcctgttcgatggcatcgccaccggtctgctggtgctgaaggacctgggcatccaggtggataggtacattgcctccgaggtgtgcgaggactccatcaccgtgggaatggtgcgtcatcagggcaagatcatgtacgtgggcgacgtgcggagcgtgacacagaagcatatccaggagtggggccctttcgacctggtgatcggcggcagcccttgcaatgacctgagcatcgtgaacccagcccggaagggcctgtacgagggaaccggcagactgttcttcgagttttacagactgctgcacgacgcccggcctaaggaaggcgacgaccggcccttcttttggctgttcgagaatgtggtggccatgggagtcagcgacaagcgggatattagccggttcctggagagcaaccccgtgatgatcgatgccaaggaagtgagcgccgcccaccgggccagatacttctggggcaatctgcctggcatgaacagacccctggccagcaccgtgaacgacaagctggagctgcaggagtgcctggagcacggccggatcgccaagttcagcaaggtgagaaccatcaccacccgaagcaacagcatcaaacaaggcaaggaccagcactttcctgtgttcatgaacgagaaggaggacatcctgtggtgtaccgagatggagagagtgttcgggttcccagtccactacacagatgtcagcaacatgtctagactggccagacagagactgctgggaagaagctggtccgtccctgtgatcagacacctgttcgcccctctgaaggagtacttcgcctgcgtgagcagcggcaacagcaacgccaacagccggggccccagcttctctagcggcctggtgccactgtccctgagagggagccacatgggccccatggagatctacaaaaccgtgagcgcctggaagcggcagcctgtgcgcgtgctgagcctgtttcggaatatcgataaagtcctgaaaagcctgggattcctggagagcggctctggctccggcggtggcaccctgaagtacgtggaggatgtgacaaacgtggtcagacgggatgtggagaagtggggccccttcgatctggtgtacggcagcacccaacccctgggcagctcttgtgaccggtgccctggctggtacatgtttcagttccaccggatcctgcagtacgccctgccgagacaggagtcccagcggccattcttttggattttcatggacaacttgctgctgaccgaggatgaccaggaaactaccactcggttcctgcagaccgaagccgtgaccctgcaggacgtgagaggccgggactaccagaacgccatgcgggtgtggtccaacatccctggactgaaaagcaagcacgcacctctgacccctaaagaagaggagtacctgcaggcccaggtgcggagcagaagcaagctggacgcccctaaggtggatctgctggtgaagaattgcctcctgcccctgagagagtacttcaagtatttcagccagaatagtctgcccctgggaggcagcggcggcggcgccctggtgacatttgaggacgtcgccgtgcggttcacccaggaggaatgggctctgctggatccttctcagaaaatcctgtaccgggacgtgatgagagagacataccggaatctgacctccgtgggcatcaactgggaatgttgggaccttgaagcctgcttcagaagcctgggaagaaacctgagagtgcaggtggtgaagagaaagtgcgagctgaccaacagcggcccctgcgccgagggcggcccaagcagcggcgcccctcctcccagcggcggcagcccagccggctccccaacctctaccgaggagggcacctctgagtccgccacccccgagagcggccctggcacctccaccgagcccagcgagggcagcgcacccggcagccctgccggcagccccacctccacagaggagggaaccagcaccgagcccagcgaaggcagcgccccaggcaccagcaccgagcctagtgagcaggagattaaacggatcaacaagatcagaagaagacttgtgaaagacagcaacaccaagaaggccggcaagacaggccccatgaaaaccctgctggttagagtgatgacacccgatctgagagagcggctggaaaacctgagaaagaagcctgaaaatatcccccagcccatcagcaatacatctagagccaacctgaataagctgctgaccgattacaccgaaatgaagaaggcgatcctgcatgtgtactgggaagagttccagaaggaccctgtgggcctgatgagccgggtggcccagcctgccagcaagaagatcgatcagaacaagctgaaacctgagatggacgagaagggcaacctgaccaccgccggctttgcctgctctcagtgtggccagcccctgttcgtgtacaagctggagcaggtgtctgagaagggcaaggcttacaccaactacttcggacggtgcaatgtggccgagcacgaaaagctgatcctgctggcccagctgaagcccgagaaggatagcgacgaagccgtgacatatagcctgggaaagtttgggcagagggccctggatttctacagcattcatgtgaccaaggagtccacccaccccgtgaagcccctggcccagatcgccggaaacagatacgcctccggacctgtgggaaaggccctgagcgacgcatgtatgggcacaatcgcctccttcctgtctaagtaccaggacatcatcatcgaacaccagaaggtggtgaagggcaaccagaagagactggagagcctgcgggagctggccggcaaggaaaacctggaataccctagcgtgaccctgccacctcagcctcacaccaaggagggcgttgatgcctacaacgaagtgatcgcccgggtgcgaatgtgggtgaacctgaacctgtggcagaagctgaagctaagcagagatgatgccaagcctctgctgagactgaagggattcccttcctttcctctggtcgagagacaggccaacgaagtggactggtgggacatggtgtgtaacgtgaagaagctgatcaacgagaaaaaggaggatggcaaggtgttttggcagaatctggctggctacaagagacaggaagccctgagaccatacctgagcagcgaggaagatcggaagaagggaaagaaattcgctcggtaccagctgggcgacctgctgctgcacctggaaaagaagcacggcgaggactggggaaaggtgtacgacgaggcctgggagcggattgacaagaaagtggaaggcctgagcaagcacatcaagctggaagaggaacggagaagcgaggacgcccagagcaaggccgccctgaccgactggctgcgggctaaggccagcttcgtgatcgagggcctgaaggaggccgacaaggacgagttctgcagatgcgagctgaagctgcagaagtggtacggggacctgcggggaaagcccttcgccatcgaagccgagaacagcatcctggacatcagcggcttcagcaagcagtacaactgtgccttcatctggcagaaggacggcgtgaagaagctgaacctgtacctgatcatcaactacttcaagggcggcaagctgcggttcaagaagatcaaacctgaagccttcgaagccaacagattctacaccgtgatcaacaaaaagagcggcgagatcgtgcccatggaggtgaacttcaacttcgacgaccccaacctgatcatcctgcctctggcctttggcaagagacagggcagagaattcatctggaacgacctgctgtccctggaaaccggcagcctgaagctggccaacggaagagtgatcgagaagacactgtacaacagaagaacccggcaggatgagcctgccctgttcgtggccctgaccttcgagcggcgggaggtcctggactcctccaatatcaaaccaatgaacctgatcggcgtggcaagaggcgaaaacatccccgccgtgatcgccctgaccgaccccgagggctgcccactgagccggtttaaggatagcctgggaaacccaacccacatcctgagaatcggcgagagctataaggagaagcagcggaccatccaggccaagaaggaggtggagcagcggagagccggcggctacagccggaagtacgccagcaaagccaagaatctggcagacgatatggtgagaaacaccgctagagatctgctgtactacgccgtgacccaggatgccatgctgatcttcgccaacctgagccggggcttcggccggcagggcaagcggaccttcatggccgagagacagtacacacggatggaggactggctgaccgccaagctggcctacgagggcctgagcaagacctacctgtccaagacactggcccagtacacctccaagacatgcagcaactgtgggtttaccatcaccagcgccgactacgacagggtgctggagaagctgaagaagacagcaacaggctggatgaccacaattaacggcaaggagctgaaggtggagggccagattacctactacaacagatacaagagacagaacgtagtcaaggacctgtccgtcgagctggatagactgagcgaagaatctgtgaacaacgacatctcctcctggacaaagggcagaagcggagaagctctgagcctcctgaagaaaagattctcccatagacccgtgcaggagaagttcgtgtgcctgaactgcggcttcgagacacacgcagccgagcaagccgccctgaacatcgccagatcctggctgttcctgcggagccaggagtacaagaaataccagacaaacaagacaaccggcaacaccgataagagagccttcgtcgagacctggcagtccttttaccggaagaagcttaaggaggtgtggaaacctgccgtgcggtctggcggatctggcggaggctccatggccctgaggagcgtgatgttcagcgacgtgagcatcgacttcagccccgaggagtgggagtacctggacctggagcagaaggacctgtacagggacgtgatgctggagaactacagcaacctggtgagcctgggctgcttcatcagcaagcccgacgtgatcagcctgctggagcagggcaaggagccctggaaggtggtgaggaagggcaggaggcagtaccccgacctggagaccaggggcggcccaagcagcggcgcccctcctcccagcggcggcagcccagccggctccccaacctctaccgaggagggcacctctgagtccgccacccccgagagcggccctggcacctccaccgagcccagcgagggcagcgcacccggcagccctgccggcagccccacctccacagaggagggaaccagcaccgagcccagcgaaggcagcgccccaggcaccagcaccgagcctagtgagcaggagattaaacggatcaacaagatcagaagaagacttgtgaaagacagcaacaccaagaaggccggcaagacaggccccatgaaaaccctgctggttagagtgatgacacccgatctgagagagcggctggaaaacctgagaaagaagcctgaaaatatcccccagcccatcagcaatacatctagagccaacctgaataagctgctgaccgattacaccgaaatgaagaaggcgatcctgcatgtgtactgggaagagttccagaaggaccctgtgggcctgatgagccgggtggcccagcctgccagcaagaagatcgatcagaacaagctgaaacctgagatggacgagaagggcaacctgaccaccgccggctttgcctgctctcagtgtggccagcccctgttcgtgtacaagctggagcaggtgtctgagaagggcaaggcttacaccaactacttcggacggtgcaatgtggccgagcacgaaaagctgatcctgctggcccagctgaagcccgagaaggatagcgacgaagccgtgacatatagcctgggaaagtttgggcagagggccctggatttctacagcattcatgtgaccaaggagtccacccaccccgtgaagcccctggcccagatcgccggaaacagatacgcctccggacctgtgggaaaggccctgagcgacgcatgtatgggcacaatcgcctccttcctgtctaagtaccaggacatcatcatcgaacaccagaaggtggtgaagggcaaccagaagagactggagagcctgcgggagctggccggcaaggaaaacctggaataccctagcgtgaccctgccacctcagcctcacaccaaggagggcgttgatgcctacaacgaagtgatcgcccgggtgcgaatgtgggtgaacctgaacctgtggcagaagctgaagctaagcagagatgatgccaagcctctgctgagactgaagggattcccttcctttcctctggtcgagagacaggccaacgaagtggactggtgggacatggtgtgtaacgtgaagaagctgatcaacgagaaaaaggaggatggcaaggtgttttggcagaatctggctggctacaagagacaggaagccctgagaccatacctgagcagcgaggaagatcggaagaagggaaagaaattcgctcggtaccagctgggcgacctgctgctgcacctggaaaagaagcacggcgaggactggggaaaggtgtacgacgaggcctgggagcggattgacaagaaagtggaaggcctgagcaagcacatcaagctggaagaggaacggagaagcgaggacgcccagagcaaggccgccctgaccgactggctgcgggctaaggccagcttcgtgatcgagggcctgaaggaggccgacaaggacgagttctgcagatgcgagctgaagctgcagaagtggtacggggacctgcggggaaagcccttcgccatcgaagccgagaacagcatcctggacatcagcggcttcagcaagcagtacaactgtgccttcatctggcagaaggacggcgtgaagaagctgaacctgtacctgatcatcaactacttcaagggcggcaagctgcggttcaagaagatcaaacctgaagccttcgaagccaacagattctacaccgtgatcaacaaaaagagcggcgagatcgtgcccatggaggtgaacttcaacttcgacgaccccaacctgatcatcctgcctctggcctttggcaagagacagggcagagaattcatctggaacgacctgctgtccctggaaaccggcagcctgaagctggccaacggaagagtgatcgagaagacactgtacaacagaagaacccggcaggatgagcctgccctgttcgtggccctgaccttcgagcggcgggaggtcctggactcctccaatatcaaaccaatgaacctgatcggcgtggcaagaggcgaaaacatccccgccgtgatcgccctgaccgaccccgagggctgcccactgagccggtttaaggatagcctgggaaacccaacccacatcctgagaatcggcgagagctataaggagaagcagcggaccatccaggccaagaaggaggtggagcagcggagagccggcggctacagccggaagtacgccagcaaagccaagaatctggcagacgatatggtgagaaacaccgctagagatctgctgtactacgccgtgacccaggatgccatgctgatcttcgccaacctgagccggggcttcggccggcagggcaagcggaccttcatggccgagagacagtacacacggatggaggactggctgaccgccaagctggcctacgagggcctgagcaagacctacctgtccaagacactggcccagtacacctccaagacatgcagcaactgtgggtttaccatcaccagcgccgactacgacagggtgctggagaagctgaagaagacagcaacaggctggatgaccacaattaacggcaaggagctgaaggtggagggccagattacctactacaacagatacaagagacagaacgtagtcaaggacctgtccgtcgagctggatagactgagcgaagaatctgtgaacaacgacatctcctcctggacaaagggcagaagcggagaagctctgagcctcctgaagaaaagattctcccatagacccgtgcaggagaagttcgtgtgcctgaactgcggcttcgagacacacgcagccgagcaagccgccctgaacatcgccagatcctggctgttcctgcggagccaggagtacaagaaataccagacaaacaagacaaccggcaacaccgataagagagccttcgtcgagacctggcagtccttttaccggaagaagcttaaggaggtgtggaaacctgccgtgcggtctggcggatctggcggaggctcctatggccctgaggagcgtgatgttcagcgacgtgagcatcgacttcagccccgaggagtgggagtacctggacctggagcagaaggacctgtacagggacgtgatgctggagaactacagcaacctggtgagcctgggctgcttcatcagcaagcccgacgtgatcagcctgctggagcagggcaaggagccctggaaggtggtgaggaagggcaggaggcagtaccccgacctggagaccaggggatctggctccggcagcggccccaagaaaaagagaaaagtctaagctgccttctgcggggcttgccttctggccatgcccttcttctctcccttgcacctgtacctcttggtctttgaataaagcctgagtaggaaggctagcaaaaaaaaaaaaaaaaaaaaaaaaaaaaaaaaaaaaaaaaaaaaaaaaaaaaaaaaaaaaaaaaaaaaaaaaaaaaaaaa

SEQ ID NO: 15875 - RNA, 9485 nt, synthetic construct
  source 1..9485: mol_type = other RNA
aggaaataagagagaaaagaagagtaagaagaaatataagagccaccatggcccctaagaagaagcgtaaagtgagccggatggaacgcctcgtctacgaggtgcggcagaagtgcagaaacatcgaggacatctgcatctcctgcggatctctgaacgtgaccctggagcacccactgttcatcggcggcatgtgccagaactgtaaaaactgttttctggagtgtgcctatcaatacgacgatgacggctaccagagctactgcaccatctgttgcggcggaagagaggtgctgatgtgtggaaataacaactgctgccggtgcttctgcgtggaatgcgtggacctgctggtgggccccggcgccgcccaggccgctattaaggaagatccttggaactgctacatgtgcggccacaagggcacatacggcctgctgagacggagagaggactggcctagcagactgcagatgttcttcgccaataaccacgaccaggagttcgacccccctaaggtgtaccctcccgtccccgccgagaagagaaagcccatccgggtcctgagcctgttcgatggcatcgccaccggtctgctggtgctgaaggacctgggcatccaggtggataggtacattgcctccgaggtgtgcgaggactccatcaccgtgggaatggtgcgtcatcagggcaagatcatgtacgtgggcgacgtgcggagcgtgacacagaagcatatccaggagtggggccctttcgacctggtgatcggcggcagcccttgcaatgacctgagcatcgtgaacccagcccggaagggcctgtacgagggaaccggcagactgttcttcgagttttacagactgctgcacgacgcccggcctaaggaaggcgacgaccggcccttcttttggctgttcgagaatgtggtggccatgggagtcagcgacaagcgggatattagccggttcctggagagcaaccccgtgatgatcgatgccaaggaagtgagcgccgcccaccgggccagatacttctggggcaatctgcctggcatgaacagacccctggccagcaccgtgaacgacaagctggagctgcaggagtgcctggagcacggccggatcgccaagttcagcaaggtgagaaccatcaccacccgaagcaacagcatcaaacaaggcaaggaccagcactttcctgtgttcatgaacgagaaggaggacatcctgtggtgtaccgagatggagagagtgttcgggttcccagtccactacacagatgtcagcaacatgtctagactggccagacagagactgctgggaagaagctggtccgtccctgtgatcagacacctgttcgcccctctgaaggagtacttcgcctgcgtgagcagcggcaacagcaacgccaacagccggggccccagcttctctagcggcctggtgccactgtccctgagagggagccacatgggccccatggagatctacaaaaccgtgagcgcctggaagcggcagcctgtgcgcgtgctgagcctgtttcggaatatcgataaagtcctgaaaagcctgggattcctggagagcggctctggctccggcggtggcaccctgaagtacgtggaggatgtgacaaacgtggtcagacgggatgtggagaagtggggccccttcgatctggtgtacggcagcacccaacccctgggcagctcttgtgaccggtgccctggctggtacatgtttcagttccaccggatcctgcagtacgccctgccgagacaggagtcccagcggccattcttttggattttcatggacaacttgctgctgaccgaggatgaccaggaaactaccactcggttcctgcagaccgaagccgtgaccctgcaggacgtgagaggccgggactaccagaacgccatgcgggtgtggtccaacatccctggactgaaaagcaagcacgcacctctgacccctaaagaagaggagtacctgcaggcccaggtgcggagcagaagcaagctggacgcccctaaggtggatctgctggtgaagaattgcctcctgcccctgagagagtacttcaagtatttcagccagaatagtctgcccctgggaggcagcggcggcggcgccctggtgacatttgaggacgtcgccgtgcggttcacccaggaggaatgggctctgctggatccttctcagaaaatcctgtaccgggacgtgatgagagagacataccggaatctgacctccgtgggcatcaactgggaatgttgggaccttgaagcctgcttcagaagcctgggaagaaacctgagagtgcaggtggtgaagagaaagtgcgagctgaccaacagcggcccctgcgccgagggcggcccaagcagcggcgcccctcctcccagcggcggcagcccagccggctccccaacctctaccgaggagggcacctctgagtccgccacccccgagagcggccctggcacctccaccgagcccagcgagggcagcgcacccggcagccctgccggcagccccacctccacagaggagggaaccagcaccgagcccagcgaaggcagcgccccaggcaccagcaccgagcctagtgagcaggagattaaacggatcaacaagatcagaagaagacttgtgaaagacagcaacaccaagaaggccggcaagacaggccccatgaaaaccctgctggttagagtgatgacacccgatctgagagagcggctggaaaacctgagaaagaagcctgaaaatatcccccagcccatcagcaatacatctagagccaacctgaataagctgctgaccgattacaccgaaatgaagaaggcgatcctgcatgtgtactgggaagagttccagaaggaccctgtgggcctgatgagccgggtggcccagcctgccagcaagaagatcgatcagaacaagctgaaacctgagatggacgagaagggcaacctgaccaccgccggctttgcctgctctcagtgtggccagcccctgttcgtgtacaagctggagcaggtgtctgagaagggcaaggcttacaccaactacttcggacggtgcaatgtggccgagcacgaaaagctgatcctgctggcccagctgaagcccgagaaggatagcgacgaagccgtgacatatagcctgggaaagtttgggcagagggccctggatttctacagcattcatgtgaccaaggagtccacccaccccgtgaagcccctggcccagatcgccggaaacagatacgcctccggacctgtgggaaaggccctgagcgacgcatgtatgggcacaatcgcctccttcctgtctaagtaccaggacatcatcatcgaacaccagaaggtggtgaagggcaaccagaagagactggagagcctgcgggagctggccggcaaggaaaacctggaataccctagcgtgaccctgccacctcagcctcacaccaaggagggcgttgatgcctacaacgaagtgatcgcccgggtgcgaatgtgggtgaacctgaacctgtggcagaagctgaagctaagcagagatgatgccaagcctctgctgagactgaagggattcccttcctttcctctggtcgagagacaggccaacgaagtggactggtgggacatggtgtgtaacgtgaagaagctgatcaacgagaaaaaggaggatggcaaggtgttttggcagaatctggctggctacaagagacaggaagccctgagaccatacctgagcagcgaggaagatcggaagaagggaaagaaattcgctcggtaccagctgggcgacctgctgctgcacctggaaaagaagcacggcgaggactggggaaaggtgtacgacgaggcctgggagcggattgacaagaaagtggaaggcctgagcaagcacatcaagctggaagaggaacggagaagcgaggacgcccagagcaaggccgccctgaccgactggctgcgggctaaggccagcttcgtgatcgagggcctgaaggaggccgacaaggacgagttctgcagatgcgagctgaagctgcagaagtggtacggggacctgcggggaaagcccttcgccatcgaagccgagaacagcatcctggacatcagcggcttcagcaagcagtacaactgtgccttcatctggcagaaggacggcgtgaagaagctgaacctgtacctgatcatcaactacttcaagggcggcaagctgcggttcaagaagatcaaacctgaagccttcgaagccaacagattctacaccgtgatcaacaaaaagagcggcgagatcgtgcccatggaggtgaacttcaacttcgacgaccccaacctgatcatcctgcctctggcctttggcaagagacagggcagagaattcatctggaacgacctgctgtccctggaaaccggcagcctgaagctggccaacggaagagtgatcgagaagacactgtacaacagaagaacccggcaggatgagcctgccctgttcgtggccctgaccttcgagcggcgggaggtcctggactcctccaatatcaaaccaatgaacctgatcggcgtggcaagaggcgaaaacatccccgccgtgatcgccctgaccgaccccgagggctgcccactgagccggtttaaggatagcctgggaaacccaacccacatcctgagaatcggcgagagctataaggagaagcagcggaccatccaggccaagaaggaggtggagcagcggagagccggcggctacagccggaagtacgccagcaaagccaagaatctggcagacgatatggtgagaaacaccgctagagatctgctgtactacgccgtgacccaggatgccatgctgatcttcgccaacctgagccggggcttcggccggcagggcaagcggaccttcatggccgagagacagtacacacggatggaggactggctgaccgccaagctggcctacgagggcctgagcaagacctacctgtccaagacactggcccagtacacctccaagacatgcagcaactgtgggtttaccatcaccagcgccgactacgacagggtgctggagaagctgaagaagacagcaacaggctggatgaccacaattaacggcaaggagctgaaggtggagggccagattacctactacaacagatacaagagacagaacgtagtcaaggacctgtccgtcgagctggatagactgagcgaagaatctgtgaacaacgacatctcctcctggacaaagggcagaagcggagaagctctgagcctcctgaagaaaagattctcccatagacccgtgcaggagaagttcgtgtgcctgaactgcggcttcgagacacacgcagccgagcaagccgccctgaacatcgccagatcctggctgttcctgcggagccaggagtacaagaaataccagacaaacaagacaaccggcaacaccgataagagagccttcgtcgagacctggcagtccttttaccggaagaagcttaaggaggtgtggaaacctgccgtgcggtctggcggatctggcggaggctccttccagggcagcgtgagcttcaaggacgtgaccgtgggcttcagccaggaggagtggcagcacctggaccccagccagagggccctgtacagggacgtgatgctggagaactacagcaacctggtgagcgtgggctactgcgtgcacaagcccgaggtgatcttcaggctggagcagggcgaggagccctggaggctggaggaggagttccccagccagagcttccccgaggtgtggaccgccggcggcccaagcagcggcgcccctcctcccagcggcggcagcccagccggctccccaacctctaccgaggagggcacctctgagtccgccacccccgagagcggccctggcacctccaccgagcccagcgagggcagcgcacccggcagccctgccggcagccccacctccacagaggagggaaccagcaccgagcccagcgaaggcagcgccccaggcaccagcaccgagcctagtgagcaggagattaaacggatcaacaagatcagaagaagacttgtgaaagacagcaacaccaagaaggccggcaagacaggccccatgaaaaccctgctggttagagtgatgacacccgatctgagagagcggctggaaaacctgagaaagaagcctgaaaatatcccccagcccatcagcaatacatctagagccaacctgaataagctgctgaccgattacaccgaaatgaagaaggcgatcctgcatgtgtactgggaagagttccagaaggaccctgtgggcctgatgagccgggtggcccagcctgccagcaagaagatcgatcagaacaagctgaaacctgagatggacgagaagggcaacctgaccaccgccggctttgcctgctctcagtgtggccagcccctgttcgtgtacaagctggagcaggtgtctgagaagggcaaggcttacaccaactacttcggacggtgcaatgtggccgagcacgaaaagctgatcctgctggcccagctgaagcccgagaaggatagcgacgaagccgtgacatatagcctgggaaagtttgggcagagggccctggatttctacagcattcatgtgaccaaggagtccacccaccccgtgaagcccctggcccagatcgccggaaacagatacgcctccggacctgtgggaaaggccctgagcgacgcatgtatgggcacaatcgcctccttcctgtctaagtaccaggacatcatcatcgaacaccagaaggtggtgaagggcaaccagaagagactggagagcctgcgggagctggccggcaaggaaaacctggaataccctagcgtgaccctgccacctcagcctcacaccaaggagggcgttgatgcctacaacgaagtgatcgcccgggtgcgaatgtgggtgaacctgaacctgtggcagaagctgaagctaagcagagatgatgccaagcctctgctgagactgaagggattcccttcctttcctctggtcgagagacaggccaacgaagtggactggtgggacatggtgtgtaacgtgaagaagctgatcaacgagaaaaaggaggatggcaaggtgttttggcagaatctggctggctacaagagacaggaagccctgagaccatacctgagcagcgaggaagatcggaagaagggaaagaaattcgctcggtaccagctgggcgacctgctgctgcacctggaaaagaagcacggcgaggactggggaaaggtgtacgacgaggcctgggagcggattgacaagaaagtggaaggcctgagcaagcacatcaagctggaagaggaacggagaagcgaggacgcccagagcaaggccgccctgaccgactggctgcgggctaaggccagcttcgtgatcgagggcctgaaggaggccgacaaggacgagttctgcagatgcgagctgaagctgcagaagtggtacggggacctgcggggaaagcccttcgccatcgaagccgagaacagcatcctggacatcagcggcttcagcaagcagtacaactgtgccttcatctggcagaaggacggcgtgaagaagctgaacctgtacctgatcatcaactacttcaagggcggcaagctgcggttcaagaagatcaaacctgaagccttcgaagccaacagattctacaccgtgatcaacaaaaagagcggcgagatcgtgcccatggaggtgaacttcaacttcgacgaccccaacctgatcatcctgcctctggcctttggcaagagacagggcagagaattcatctggaacgacctgctgtccctggaaaccggcagcctgaagctggccaacggaagagtgatcgagaagacactgtacaacagaagaacccggcaggatgagcctgccctgttcgtggccctgaccttcgagcggcgggaggtcctggactcctccaatatcaaaccaatgaacctgatcggcgtggcaagaggcgaaaacatccccgccgtgatcgccctgaccgaccccgagggctgcccactgagccggtttaaggatagcctgggaaacccaacccacatcctgagaatcggcgagagctataaggagaagcagcggaccatccaggccaagaaggaggtggagcagcggagagccggcggctacagccggaagtacgccagcaaagccaagaatctggcagacgatatggtgagaaacaccgctagagatctgctgtactacgccgtgacccaggatgccatgctgatcttcgccaacctgagccggggcttcggccggcagggcaagcggaccttcatggccgagagacagtacacacggatggaggactggctgaccgccaagctggcctacgagggcctgagcaagacctacctgtccaagacactggcccagtacacctccaagacatgcagcaactgtgggtttaccatcaccagcgccgactacgacagggtgctggagaagctgaagaagacagcaacaggctggatgaccacaattaacggcaaggagctgaaggtggagggccagattacctactacaacagatacaagagacagaacgtagtcaaggacctgtccgtcgagctggatagactgagcgaagaatctgtgaacaacgacatctcctcctggacaaagggcagaagcggagaagctctgagcctcctgaagaaaagattctcccatagacccgtgcaggagaagttcgtgtgcctgaactgcggcttcgagacacacgcagccgagcaagccgccctgaacatcgccagatcctggctgttcctgcggagccaggagtacaagaaataccagacaaacaagacaaccggcaacaccgataagagagccttcgtcgagacctggcagtccttttaccggaagaagcttaaggaggtgtggaaacctgccgtgcggtctggcggatctggcggaggctcctttccagggcagcgtgagcttcaaggacgtgaccgtgggcttcagccaggaggagtggcagcacctggaccccagccagagggccctgtacagggacgtgatgctggagaactacagcaacctggtgagcgtgggctactgcgtgcacaagcccgaggtgatcttcaggctggagcagggcgaggagccctggaggctggaggaggagttccccagccagagcttccccgaggtgtggaccgccggatctggctccggcagcggccccaagaaaaagagaaaagtctaagctgccttctgcggggcttgccttctggccatgcccttcttctctcccttgcacctgtacctcttggtctttgaataaagcctgagtaggaaggctagcaaaaaaaaaaaaaaaaaaaaaaaaaaaaaaaaaaaaaaaaaaaaaaaaaaaaaaaaaaaaaaaaaaaaaaaaaaaaaaaa

SEQ ID NO: 15876 - RNA, 9485 nt, synthetic construct
  source 1..9485: mol_type = other RNA
aggaaataagagagaaaagaagagtaagaagaaatataagagccaccatggcccctaagaagaagcgtaaagtgagccggatggaacgcctcgtctacgaggtgcggcagaagtgcagaaacatcgaggacatctgcatctcctgcggatctctgaacgtgaccctggagcacccactgttcatcggcggcatgtgccagaactgtaaaaactgttttctggagtgtgcctatcaatacgacgatgacggctaccagagctactgcaccatctgttgcggcggaagagaggtgctgatgtgtggaaataacaactgctgccggtgcttctgcgtggaatgcgtggacctgctggtgggccccggcgccgcccaggccgctattaaggaagatccttggaactgctacatgtgcggccacaagggcacatacggcctgctgagacggagagaggactggcctagcagactgcagatgttcttcgccaataaccacgaccaggagttcgacccccctaaggtgtaccctcccgtccccgccgagaagagaaagcccatccgggtcctgagcctgttcgatggcatcgccaccggtctgctggtgctgaaggacctgggcatccaggtggataggtacattgcctccgaggtgtgcgaggactccatcaccgtgggaatggtgcgtcatcagggcaagatcatgtacgtgggcgacgtgcggagcgtgacacagaagcatatccaggagtggggccctttcgacctggtgatcggcggcagcccttgcaatgacctgagcatcgtgaacccagcccggaagggcctgtacgagggaaccggcagactgttcttcgagttttacagactgctgcacgacgcccggcctaaggaaggcgacgaccggcccttcttttggctgttcgagaatgtggtggccatgggagtcagcgacaagcgggatattagccggttcctggagagcaaccccgtgatgatcgatgccaaggaagtgagcgccgcccaccgggccagatacttctggggcaatctgcctggcatgaacagacccctggccagcaccgtgaacgacaagctggagctgcaggagtgcctggagcacggccggatcgccaagttcagcaaggtgagaaccatcaccacccgaagcaacagcatcaaacaaggcaaggaccagcactttcctgtgttcatgaacgagaaggaggacatcctgtggtgtaccgagatggagagagtgttcgggttcccagtccactacacagatgtcagcaacatgtctagactggccagacagagactgctgggaagaagctggtccgtccctgtgatcagacacctgttcgcccctctgaaggagtacttcgcctgcgtgagcagcggcaacagcaacgccaacagccggggccccagcttctctagcggcctggtgccactgtccctgagagggagccacatgggccccatggagatctacaaaaccgtgagcgcctggaagcggcagcctgtgcgcgtgctgagcctgtttcggaatatcgataaagtcctgaaaagcctgggattcctggagagcggctctggctccggcggtggcaccctgaagtacgtggaggatgtgacaaacgtggtcagacgggatgtggagaagtggggccccttcgatctggtgtacggcagcacccaacccctgggcagctcttgtgaccggtgccctggctggtacatgtttcagttccaccggatcctgcagtacgccctgccgagacaggagtcccagcggccattcttttggattttcatggacaacttgctgctgaccgaggatgaccaggaaactaccactcggttcctgcagaccgaagccgtgaccctgcaggacgtgagaggccgggactaccagaacgccatgcgggtgtggtccaacatccctggactgaaaagcaagcacgcacctctgacccctaaagaagaggagtacctgcaggcccaggtgcggagcagaagcaagctggacgcccctaaggtggatctgctggtgaagaattgcctcctgcccctgagagagtacttcaagtatttcagccagaatagtctgcccctgggaggcagcggcggcggcgccctggtgacatttgaggacgtcgccgtgcggttcacccaggaggaatgggctctgctggatccttctcagaaaatcctgtaccgggacgtgatgagagagacataccggaatctgacctccgtgggcatcaactgggaatgttgggaccttgaagcctgcttcagaagcctgggaagaaacctgagagtgcaggtggtgaagagaaagtgcgagctgaccaacagcggcccctgcgccgagggcggcccaagcagcggcgcccctcctcccagcggcggcagcccagccggctccccaacctctaccgaggagggcacctctgagtccgccacccccgagagcggccctggcacctccaccgagcccagcgagggcagcgcacccggcagccctgccggcagccccacctccacagaggagggaaccagcaccgagcccagcgaaggcagcgccccaggcaccagcaccgagcctagtgagcaggagattaaacggatcaacaagatcagaagaagacttgtgaaagacagcaacaccaagaaggccggcaagacaggccccatgaaaaccctgctggttagagtgatgacacccgatctgagagagcggctggaaaacctgagaaagaagcctgaaaatatcccccagcccatcagcaatacatctagagccaacctgaataagctgctgaccgattacaccgaaatgaagaaggcgatcctgcatgtgtactgggaagagttccagaaggaccctgtgggcctgatgagccgggtggcccagcctgccagcaagaagatcgatcagaacaagctgaaacctgagatggacgagaagggcaacctgaccaccgccggctttgcctgctctcagtgtggccagcccctgttcgtgtacaagctggagcaggtgtctgagaagggcaaggcttacaccaactacttcggacggtgcaatgtggccgagcacgaaaagctgatcctgctggcccagctgaagcccgagaaggatagcgacgaagccgtgacatatagcctgggaaagtttgggcagagggccctggatttctacagcattcatgtgaccaaggagtccacccaccccgtgaagcccctggcccagatcgccggaaacagatacgcctccggacctgtgggaaaggccctgagcgacgcatgtatgggcacaatcgcctccttcctgtctaagtaccaggacatcatcatcgaacaccagaaggtggtgaagggcaaccagaagagactggagagcctgcgggagctggccggcaaggaaaacctggaataccctagcgtgaccctgccacctcagcctcacaccaaggagggcgttgatgcctacaacgaagtgatcgcccgggtgcgaatgtgggtgaacctgaacctgtggcagaagctgaagctaagcagagatgatgccaagcctctgctgagactgaagggattcccttcctttcctctggtcgagagacaggccaacgaagtggactggtgggacatggtgtgtaacgtgaagaagctgatcaacgagaaaaaggaggatggcaaggtgttttggcagaatctggctggctacaagagacaggaagccctgagaccatacctgagcagcgaggaagatcggaagaagggaaagaaattcgctcggtaccagctgggcgacctgctgctgcacctggaaaagaagcacggcgaggactggggaaaggtgtacgacgaggcctgggagcggattgacaagaaagtggaaggcctgagcaagcacatcaagctggaagaggaacggagaagcgaggacgcccagagcaaggccgccctgaccgactggctgcgggctaaggccagcttcgtgatcgagggcctgaaggaggccgacaaggacgagttctgcagatgcgagctgaagctgcagaagtggtacggggacctgcggggaaagcccttcgccatcgaagccgagaacagcatcctggacatcagcggcttcagcaagcagtacaactgtgccttcatctggcagaaggacggcgtgaagaagctgaacctgtacctgatcatcaactacttcaagggcggcaagctgcggttcaagaagatcaaacctgaagccttcgaagccaacagattctacaccgtgatcaacaaaaagagcggcgagatcgtgcccatggaggtgaacttcaacttcgacgaccccaacctgatcatcctgcctctggcctttggcaagagacagggcagagaattcatctggaacgacctgctgtccctggaaaccggcagcctgaagctggccaacggaagagtgatcgagaagacactgtacaacagaagaacccggcaggatgagcctgccctgttcgtggccctgaccttcgagcggcgggaggtcctggactcctccaatatcaaaccaatgaacctgatcggcgtggcaagaggcgaaaacatccccgccgtgatcgccctgaccgaccccgagggctgcccactgagccggtttaaggatagcctgggaaacccaacccacatcctgagaatcggcgagagctataaggagaagcagcggaccatccaggccaagaaggaggtggagcagcggagagccggcggctacagccggaagtacgccagcaaagccaagaatctggcagacgatatggtgagaaacaccgctagagatctgctgtactacgccgtgacccaggatgccatgctgatcttcgccaacctgagccggggcttcggccggcagggcaagcggaccttcatggccgagagacagtacacacggatggaggactggctgaccgccaagctggcctacgagggcctgagcaagacctacctgtccaagacactggcccagtacacctccaagacatgcagcaactgtgggtttaccatcaccagcgccgactacgacagggtgctggagaagctgaagaagacagcaacaggctggatgaccacaattaacggcaaggagctgaaggtggagggccagattacctactacaacagatacaagagacagaacgtagtcaaggacctgtccgtcgagctggatagactgagcgaagaatctgtgaacaacgacatctcctcctggacaaagggcagaagcggagaagctctgagcctcctgaagaaaagattctcccatagacccgtgcaggagaagttcgtgtgcctgaactgcggcttcgagacacacgcagccgagcaagccgccctgaacatcgccagatcctggctgttcctgcggagccaggagtacaagaaataccagacaaacaagacaaccggcaacaccgataagagagccttcgtcgagacctggcagtccttttaccggaagaagcttaaggaggtgtggaaacctgccgtgcggtctggcggatctggcggaggctccctgcaggaggccgtgaccttcaaggacgtggccgtggtgttcagcgaggaggagctgggcctgctggacagcgcccagaggaccctgtacagggacgtgatgctggagaccttccagaacctggtgagcctgggccaccagcccttcaagcccgacgtgatcagccagctggagagggaggagatgctgtggatgaagggcctgcagaccggcaggggcaggtgcagcggcggcaggaaccagggcggcccaagcagcggcgcccctcctcccagcggcggcagcccagccggctccccaacctctaccgaggagggcacctctgagtccgccacccccgagagcggccctggcacctccaccgagcccagcgagggcagcgcacccggcagccctgccggcagccccacctccacagaggagggaaccagcaccgagcccagcgaaggcagcgccccaggcaccagcaccgagcctagtgagcaggagattaaacggatcaacaagatcagaagaagacttgtgaaagacagcaacaccaagaaggccggcaagacaggccccatgaaaaccctgctggttagagtgatgacacccgatctgagagagcggctggaaaacctgagaaagaagcctgaaaatatcccccagcccatcagcaatacatctagagccaacctgaataagctgctgaccgattacaccgaaatgaagaaggcgatcctgcatgtgtactgggaagagttccagaaggaccctgtgggcctgatgagccgggtggcccagcctgccagcaagaagatcgatcagaacaagctgaaacctgagatggacgagaagggcaacctgaccaccgccggctttgcctgctctcagtgtggccagcccctgttcgtgtacaagctggagcaggtgtctgagaagggcaaggcttacaccaactacttcggacggtgcaatgtggccgagcacgaaaagctgatcctgctggcccagctgaagcccgagaaggatagcgacgaagccgtgacatatagcctgggaaagtttgggcagagggccctggatttctacagcattcatgtgaccaaggagtccacccaccccgtgaagcccctggcccagatcgccggaaacagatacgcctccggacctgtgggaaaggccctgagcgacgcatgtatgggcacaatcgcctccttcctgtctaagtaccaggacatcatcatcgaacaccagaaggtggtgaagggcaaccagaagagactggagagcctgcgggagctggccggcaaggaaaacctggaataccctagcgtgaccctgccacctcagcctcacaccaaggagggcgttgatgcctacaacgaagtgatcgcccgggtgcgaatgtgggtgaacctgaacctgtggcagaagctgaagctaagcagagatgatgccaagcctctgctgagactgaagggattcccttcctttcctctggtcgagagacaggccaacgaagtggactggtgggacatggtgtgtaacgtgaagaagctgatcaacgagaaaaaggaggatggcaaggtgttttggcagaatctggctggctacaagagacaggaagccctgagaccatacctgagcagcgaggaagatcggaagaagggaaagaaattcgctcggtaccagctgggcgacctgctgctgcacctggaaaagaagcacggcgaggactggggaaaggtgtacgacgaggcctgggagcggattgacaagaaagtggaaggcctgagcaagcacatcaagctggaagaggaacggagaagcgaggacgcccagagcaaggccgccctgaccgactggctgcgggctaaggccagcttcgtgatcgagggcctgaaggaggccgacaaggacgagttctgcagatgcgagctgaagctgcagaagtggtacggggacctgcggggaaagcccttcgccatcgaagccgagaacagcatcctggacatcagcggcttcagcaagcagtacaactgtgccttcatctggcagaaggacggcgtgaagaagctgaacctgtacctgatcatcaactacttcaagggcggcaagctgcggttcaagaagatcaaacctgaagccttcgaagccaacagattctacaccgtgatcaacaaaaagagcggcgagatcgtgcccatggaggtgaacttcaacttcgacgaccccaacctgatcatcctgcctctggcctttggcaagagacagggcagagaattcatctggaacgacctgctgtccctggaaaccggcagcctgaagctggccaacggaagagtgatcgagaagacactgtacaacagaagaacccggcaggatgagcctgccctgttcgtggccctgaccttcgagcggcgggaggtcctggactcctccaatatcaaaccaatgaacctgatcggcgtggcaagaggcgaaaacatccccgccgtgatcgccctgaccgaccccgagggctgcccactgagccggtttaaggatagcctgggaaacccaacccacatcctgagaatcggcgagagctataaggagaagcagcggaccatccaggccaagaaggaggtggagcagcggagagccggcggctacagccggaagtacgccagcaaagccaagaatctggcagacgatatggtgagaaacaccgctagagatctgctgtactacgccgtgacccaggatgccatgctgatcttcgccaacctgagccggggcttcggccggcagggcaagcggaccttcatggccgagagacagtacacacggatggaggactggctgaccgccaagctggcctacgagggcctgagcaagacctacctgtccaagacactggcccagtacacctccaagacatgcagcaactgtgggtttaccatcaccagcgccgactacgacagggtgctggagaagctgaagaagacagcaacaggctggatgaccacaattaacggcaaggagctgaaggtggagggccagattacctactacaacagatacaagagacagaacgtagtcaaggacctgtccgtcgagctggatagactgagcgaagaatctgtgaacaacgacatctcctcctggacaaagggcagaagcggagaagctctgagcctcctgaagaaaagattctcccatagacccgtgcaggagaagttcgtgtgcctgaactgcggcttcgagacacacgcagccgagcaagccgccctgaacatcgccagatcctggctgttcctgcggagccaggagtacaagaaataccagacaaacaagacaaccggcaacaccgataagagagccttcgtcgagacctggcagtccttttaccggaagaagcttaaggaggtgtggaaacctgccgtgcggtctggcggatctggcggaggctcctctgcaggaggccgtgaccttcaaggacgtggccgtggtgttcagcgaggaggagctgggcctgctggacagcgcccagaggaccctgtacagggacgtgatgctggagaccttccagaacctggtgagcctgggccaccagcccttcaagcccgacgtgatcagccagctggagagggaggagatgctgtggatgaagggcctgcagaccggcaggggcaggtgcagcggcggcaggaaccagggatctggctccggcagcggccccaagaaaaagagaaaagtctaagctgccttctgcggggcttgccttctggccatgcccttcttctctcccttgcacctgtacctcttggtctttgaataaagcctgagtaggaaggctagcaaaaaaaaaaaaaaaaaaaaaaaaaaaaaaaaaaaaaaaaaaaaaaaaaaaaaaaaaaaaaaaaaaaaaaaaaaaaaaaa

SEQ ID NO: 15877 - RNA, 9485 nt, synthetic construct
  source 1..9485: mol_type = other RNA
aggaaataagagagaaaagaagagtaagaagaaatataagagccaccatggcccctaagaagaagcgtaaagtgagccggatggaacgcctcgtctacgaggtgcggcagaagtgcagaaacatcgaggacatctgcatctcctgcggatctctgaacgtgaccctggagcacccactgttcatcggcggcatgtgccagaactgtaaaaactgttttctggagtgtgcctatcaatacgacgatgacggctaccagagctactgcaccatctgttgcggcggaagagaggtgctgatgtgtggaaataacaactgctgccggtgcttctgcgtggaatgcgtggacctgctggtgggccccggcgccgcccaggccgctattaaggaagatccttggaactgctacatgtgcggccacaagggcacatacggcctgctgagacggagagaggactggcctagcagactgcagatgttcttcgccaataaccacgaccaggagttcgacccccctaaggtgtaccctcccgtccccgccgagaagagaaagcccatccgggtcctgagcctgttcgatggcatcgccaccggtctgctggtgctgaaggacctgggcatccaggtggataggtacattgcctccgaggtgtgcgaggactccatcaccgtgggaatggtgcgtcatcagggcaagatcatgtacgtgggcgacgtgcggagcgtgacacagaagcatatccaggagtggggccctttcgacctggtgatcggcggcagcccttgcaatgacctgagcatcgtgaacccagcccggaagggcctgtacgagggaaccggcagactgttcttcgagttttacagactgctgcacgacgcccggcctaaggaaggcgacgaccggcccttcttttggctgttcgagaatgtggtggccatgggagtcagcgacaagcgggatattagccggttcctggagagcaaccccgtgatgatcgatgccaaggaagtgagcgccgcccaccgggccagatacttctggggcaatctgcctggcatgaacagacccctggccagcaccgtgaacgacaagctggagctgcaggagtgcctggagcacggccggatcgccaagttcagcaaggtgagaaccatcaccacccgaagcaacagcatcaaacaaggcaaggaccagcactttcctgtgttcatgaacgagaaggaggacatcctgtggtgtaccgagatggagagagtgttcgggttcccagtccactacacagatgtcagcaacatgtctagactggccagacagagactgctgggaagaagctggtccgtccctgtgatcagacacctgttcgcccctctgaaggagtacttcgcctgcgtgagcagcggcaacagcaacgccaacagccggggccccagcttctctagcggcctggtgccactgtccctgagagggagccacatgggccccatggagatctacaaaaccgtgagcgcctggaagcggcagcctgtgcgcgtgctgagcctgtttcggaatatcgataaagtcctgaaaagcctgggattcctggagagcggctctggctccggcggtggcaccctgaagtacgtggaggatgtgacaaacgtggtcagacgggatgtggagaagtggggccccttcgatctggtgtacggcagcacccaacccctgggcagctcttgtgaccggtgccctggctggtacatgtttcagttccaccggatcctgcagtacgccctgccgagacaggagtcccagcggccattcttttggattttcatggacaacttgctgctgaccgaggatgaccaggaaactaccactcggttcctgcagaccgaagccgtgaccctgcaggacgtgagaggccgggactaccagaacgccatgcgggtgtggtccaacatccctggactgaaaagcaagcacgcacctctgacccctaaagaagaggagtacctgcaggcccaggtgcggagcagaagcaagctggacgcccctaaggtggatctgctggtgaagaattgcctcctgcccctgagagagtacttcaagtatttcagccagaatagtctgcccctgggaggcagcggcggcggcgccctggtgacatttgaggacgtcgccgtgcggttcacccaggaggaatgggctctgctggatccttctcagaaaatcctgtaccgggacgtgatgagagagacataccggaatctgacctccgtgggcatcaactgggaatgttgggaccttgaagcctgcttcagaagcctgggaagaaacctgagagtgcaggtggtgaagagaaagtgcgagctgaccaacagcggcccctgcgccgagggcggcccaagcagcggcgcccctcctcccagcggcggcagcccagccggctccccaacctctaccgaggagggcacctctgagtccgccacccccgagagcggccctggcacctccaccgagcccagcgagggcagcgcacccggcagccctgccggcagccccacctccacagaggagggaaccagcaccgagcccagcgaaggcagcgccccaggcaccagcaccgagcctagtgagcaggagattaaacggatcaacaagatcagaagaagacttgtgaaagacagcaacaccaagaaggccggcaagacaggccccatgaaaaccctgctggttagagtgatgacacccgatctgagagagcggctggaaaacctgagaaagaagcctgaaaatatcccccagcccatcagcaatacatctagagccaacctgaataagctgctgaccgattacaccgaaatgaagaaggcgatcctgcatgtgtactgggaagagttccagaaggaccctgtgggcctgatgagccgggtggcccagcctgccagcaagaagatcgatcagaacaagctgaaacctgagatggacgagaagggcaacctgaccaccgccggctttgcctgctctcagtgtggccagcccctgttcgtgtacaagctggagcaggtgtctgagaagggcaaggcttacaccaactacttcggacggtgcaatgtggccgagcacgaaaagctgatcctgctggcccagctgaagcccgagaaggatagcgacgaagccgtgacatatagcctgggaaagtttgggcagagggccctggatttctacagcattcatgtgaccaaggagtccacccaccccgtgaagcccctggcccagatcgccggaaacagatacgcctccggacctgtgggaaaggccctgagcgacgcatgtatgggcacaatcgcctccttcctgtctaagtaccaggacatcatcatcgaacaccagaaggtggtgaagggcaaccagaagagactggagagcctgcgggagctggccggcaaggaaaacctggaataccctagcgtgaccctgccacctcagcctcacaccaaggagggcgttgatgcctacaacgaagtgatcgcccgggtgcgaatgtgggtgaacctgaacctgtggcagaagctgaagctaagcagagatgatgccaagcctctgctgagactgaagggattcccttcctttcctctggtcgagagacaggccaacgaagtggactggtgggacatggtgtgtaacgtgaagaagctgatcaacgagaaaaaggaggatggcaaggtgttttggcagaatctggctggctacaagagacaggaagccctgagaccatacctgagcagcgaggaagatcggaagaagggaaagaaattcgctcggtaccagctgggcgacctgctgctgcacctggaaaagaagcacggcgaggactggggaaaggtgtacgacgaggcctgggagcggattgacaagaaagtggaaggcctgagcaagcacatcaagctggaagaggaacggagaagcgaggacgcccagagcaaggccgccctgaccgactggctgcgggctaaggccagcttcgtgatcgagggcctgaaggaggccgacaaggacgagttctgcagatgcgagctgaagctgcagaagtggtacggggacctgcggggaaagcccttcgccatcgaagccgagaacagcatcctggacatcagcggcttcagcaagcagtacaactgtgccttcatctggcagaaggacggcgtgaagaagctgaacctgtacctgatcatcaactacttcaagggcggcaagctgcggttcaagaagatcaaacctgaagccttcgaagccaacagattctacaccgtgatcaacaaaaagagcggcgagatcgtgcccatggaggtgaacttcaacttcgacgaccccaacctgatcatcctgcctctggcctttggcaagagacagggcagagaattcatctggaacgacctgctgtccctggaaaccggcagcctgaagctggccaacggaagagtgatcgagaagacactgtacaacagaagaacccggcaggatgagcctgccctgttcgtggccctgaccttcgagcggcgggaggtcctggactcctccaatatcaaaccaatgaacctgatcggcgtggcaagaggcgaaaacatccccgccgtgatcgccctgaccgaccccgagggctgcccactgagccggtttaaggatagcctgggaaacccaacccacatcctgagaatcggcgagagctataaggagaagcagcggaccatccaggccaagaaggaggtggagcagcggagagccggcggctacagccggaagtacgccagcaaagccaagaatctggcagacgatatggtgagaaacaccgctagagatctgctgtactacgccgtgacccaggatgccatgctgatcttcgccaacctgagccggggcttcggccggcagggcaagcggaccttcatggccgagagacagtacacacggatggaggactggctgaccgccaagctggcctacgagggcctgagcaagacctacctgtccaagacactggcccagtacacctccaagacatgcagcaactgtgggtttaccatcaccagcgccgactacgacagggtgctggagaagctgaagaagacagcaacaggctggatgaccacaattaacggcaaggagctgaaggtggagggccagattacctactacaacagatacaagagacagaacgtagtcaaggacctgtccgtcgagctggatagactgagcgaagaatctgtgaacaacgacatctcctcctggacaaagggcagaagcggagaagctctgagcctcctgaagaaaagattctcccatagacccgtgcaggagaagttcgtgtgcctgaactgcggcttcgagacacacgcagccgagcaagccgccctgaacatcgccagatcctggctgttcctgcggagccaggagtacaagaaataccagacaaacaagacaaccggcaacaccgataagagagccttcgtcgagacctggcagtccttttaccggaagaagcttaaggaggtgtggaaacctgccgtgcggtctggcggatctggcggaggctccgcccaggtgctggtgaccttccaggacgtggccgtggacttcacccaggaggagtggaggctgctggaccccggccagaaggagctgtacaaggaggtgatgctggacaacgcccagaacatgctgttcctgggcctgcccgtgcccagggaggactggttcagccacttccacgagggcggcgccagctggatgctggagggcgaggaccccagcaacagcggcctggacggcgagaggaggggcggcccaagcagcggcgcccctcctcccagcggcggcagcccagccggctccccaacctctaccgaggagggcacctctgagtccgccacccccgagagcggccctggcacctccaccgagcccagcgagggcagcgcacccggcagccctgccggcagccccacctccacagaggagggaaccagcaccgagcccagcgaaggcagcgccccaggcaccagcaccgagcctagtgagcaggagattaaacggatcaacaagatcagaagaagacttgtgaaagacagcaacaccaagaaggccggcaagacaggccccatgaaaaccctgctggttagagtgatgacacccgatctgagagagcggctggaaaacctgagaaagaagcctgaaaatatcccccagcccatcagcaatacatctagagccaacctgaataagctgctgaccgattacaccgaaatgaagaaggcgatcctgcatgtgtactgggaagagttccagaaggaccctgtgggcctgatgagccgggtggcccagcctgccagcaagaagatcgatcagaacaagctgaaacctgagatggacgagaagggcaacctgaccaccgccggctttgcctgctctcagtgtggccagcccctgttcgtgtacaagctggagcaggtgtctgagaagggcaaggcttacaccaactacttcggacggtgcaatgtggccgagcacgaaaagctgatcctgctggcccagctgaagcccgagaaggatagcgacgaagccgtgacatatagcctgggaaagtttgggcagagggccctggatttctacagcattcatgtgaccaaggagtccacccaccccgtgaagcccctggcccagatcgccggaaacagatacgcctccggacctgtgggaaaggccctgagcgacgcatgtatgggcacaatcgcctccttcctgtctaagtaccaggacatcatcatcgaacaccagaaggtggtgaagggcaaccagaagagactggagagcctgcgggagctggccggcaaggaaaacctggaataccctagcgtgaccctgccacctcagcctcacaccaaggagggcgttgatgcctacaacgaagtgatcgcccgggtgcgaatgtgggtgaacctgaacctgtggcagaagctgaagctaagcagagatgatgccaagcctctgctgagactgaagggattcccttcctttcctctggtcgagagacaggccaacgaagtggactggtgggacatggtgtgtaacgtgaagaagctgatcaacgagaaaaaggaggatggcaaggtgttttggcagaatctggctggctacaagagacaggaagccctgagaccatacctgagcagcgaggaagatcggaagaagggaaagaaattcgctcggtaccagctgggcgacctgctgctgcacctggaaaagaagcacggcgaggactggggaaaggtgtacgacgaggcctgggagcggattgacaagaaagtggaaggcctgagcaagcacatcaagctggaagaggaacggagaagcgaggacgcccagagcaaggccgccctgaccgactggctgcgggctaaggccagcttcgtgatcgagggcctgaaggaggccgacaaggacgagttctgcagatgcgagctgaagctgcagaagtggtacggggacctgcggggaaagcccttcgccatcgaagccgagaacagcatcctggacatcagcggcttcagcaagcagtacaactgtgccttcatctggcagaaggacggcgtgaagaagctgaacctgtacctgatcatcaactacttcaagggcggcaagctgcggttcaagaagatcaaacctgaagccttcgaagccaacagattctacaccgtgatcaacaaaaagagcggcgagatcgtgcccatggaggtgaacttcaacttcgacgaccccaacctgatcatcctgcctctggcctttggcaagagacagggcagagaattcatctggaacgacctgctgtccctggaaaccggcagcctgaagctggccaacggaagagtgatcgagaagacactgtacaacagaagaacccggcaggatgagcctgccctgttcgtggccctgaccttcgagcggcgggaggtcctggactcctccaatatcaaaccaatgaacctgatcggcgtggcaagaggcgaaaacatccccgccgtgatcgccctgaccgaccccgagggctgcccactgagccggtttaaggatagcctgggaaacccaacccacatcctgagaatcggcgagagctataaggagaagcagcggaccatccaggccaagaaggaggtggagcagcggagagccggcggctacagccggaagtacgccagcaaagccaagaatctggcagacgatatggtgagaaacaccgctagagatctgctgtactacgccgtgacccaggatgccatgctgatcttcgccaacctgagccggggcttcggccggcagggcaagcggaccttcatggccgagagacagtacacacggatggaggactggctgaccgccaagctggcctacgagggcctgagcaagacctacctgtccaagacactggcccagtacacctccaagacatgcagcaactgtgggtttaccatcaccagcgccgactacgacagggtgctggagaagctgaagaagacagcaacaggctggatgaccacaattaacggcaaggagctgaaggtggagggccagattacctactacaacagatacaagagacagaacgtagtcaaggacctgtccgtcgagctggatagactgagcgaagaatctgtgaacaacgacatctcctcctggacaaagggcagaagcggagaagctctgagcctcctgaagaaaagattctcccatagacccgtgcaggagaagttcgtgtgcctgaactgcggcttcgagacacacgcagccgagcaagccgccctgaacatcgccagatcctggctgttcctgcggagccaggagtacaagaaataccagacaaacaagacaaccggcaacaccgataagagagccttcgtcgagacctggcagtccttttaccggaagaagcttaaggaggtgtggaaacctgccgtgcggtctggcggatctggcggaggctcctgcccaggtgctggtgaccttccaggacgtggccgtggacttcacccaggaggagtggaggctgctggaccccggccagaaggagctgtacaaggaggtgatgctggacaacgcccagaacatgctgttcctgggcctgcccgtgcccagggaggactggttcagccacttccacgagggcggcgccagctggatgctggagggcgaggaccccagcaacagcggcctggacggcgagaggaggggatctggctccggcagcggccccaagaaaaagagaaaagtctaagctgccttctgcggggcttgccttctggccatgcccttcttctctcccttgcacctgtacctcttggtctttgaataaagcctgagtaggaaggctagcaaaaaaaaaaaaaaaaaaaaaaaaaaaaaaaaaaaaaaaaaaaaaaaaaaaaaaaaaaaaaaaaaaaaaaaaaaaaaaaa

SEQ ID NO: 15878 - RNA, 9485 nt, synthetic construct
  source 1..9485: mol_type = other RNA
aggaaataagagagaaaagaagagtaagaagaaatataagagccaccatggcccctaagaagaagcgtaaagtgagccggatggaacgcctcgtctacgaggtgcggcagaagtgcagaaacatcgaggacatctgcatctcctgcggatctctgaacgtgaccctggagcacccactgttcatcggcggcatgtgccagaactgtaaaaactgttttctggagtgtgcctatcaatacgacgatgacggctaccagagctactgcaccatctgttgcggcggaagagaggtgctgatgtgtggaaataacaactgctgccggtgcttctgcgtggaatgcgtggacctgctggtgggccccggcgccgcccaggccgctattaaggaagatccttggaactgctacatgtgcggccacaagggcacatacggcctgctgagacggagagaggactggcctagcagactgcagatgttcttcgccaataaccacgaccaggagttcgacccccctaaggtgtaccctcccgtccccgccgagaagagaaagcccatccgggtcctgagcctgttcgatggcatcgccaccggtctgctggtgctgaaggacctgggcatccaggtggataggtacattgcctccgaggtgtgcgaggactccatcaccgtgggaatggtgcgtcatcagggcaagatcatgtacgtgggcgacgtgcggagcgtgacacagaagcatatccaggagtggggccctttcgacctggtgatcggcggcagcccttgcaatgacctgagcatcgtgaacccagcccggaagggcctgtacgagggaaccggcagactgttcttcgagttttacagactgctgcacgacgcccggcctaaggaaggcgacgaccggcccttcttttggctgttcgagaatgtggtggccatgggagtcagcgacaagcgggatattagccggttcctggagagcaaccccgtgatgatcgatgccaaggaagtgagcgccgcccaccgggccagatacttctggggcaatctgcctggcatgaacagacccctggccagcaccgtgaacgacaagctggagctgcaggagtgcctggagcacggccggatcgccaagttcagcaaggtgagaaccatcaccacccgaagcaacagcatcaaacaaggcaaggaccagcactttcctgtgttcatgaacgagaaggaggacatcctgtggtgtaccgagatggagagagtgttcgggttcccagtccactacacagatgtcagcaacatgtctagactggccagacagagactgctgggaagaagctggtccgtccctgtgatcagacacctgttcgcccctctgaaggagtacttcgcctgcgtgagcagcggcaacagcaacgccaacagccggggccccagcttctctagcggcctggtgccactgtccctgagagggagccacatgggccccatggagatctacaaaaccgtgagcgcctggaagcggcagcctgtgcgcgtgctgagcctgtttcggaatatcgataaagtcctgaaaagcctgggattcctggagagcggctctggctccggcggtggcaccctgaagtacgtggaggatgtgacaaacgtggtcagacgggatgtggagaagtggggccccttcgatctggtgtacggcagcacccaacccctgggcagctcttgtgaccggtgccctggctggtacatgtttcagttccaccggatcctgcagtacgccctgccgagacaggagtcccagcggccattcttttggattttcatggacaacttgctgctgaccgaggatgaccaggaaactaccactcggttcctgcagaccgaagccgtgaccctgcaggacgtgagaggccgggactaccagaacgccatgcgggtgtggtccaacatccctggactgaaaagcaagcacgcacctctgacccctaaagaagaggagtacctgcaggcccaggtgcggagcagaagcaagctggacgcccctaaggtggatctgctggtgaagaattgcctcctgcccctgagagagtacttcaagtatttcagccagaatagtctgcccctgggaggcagcggcggcggcgccctggtgacatttgaggacgtcgccgtgcggttcacccaggaggaatgggctctgctggatccttctcagaaaatcctgtaccgggacgtgatgagagagacataccggaatctgacctccgtgggcatcaactgggaatgttgggaccttgaagcctgcttcagaagcctgggaagaaacctgagagtgcaggtggtgaagagaaagtgcgagctgaccaacagcggcccctgcgccgagggcggcccaagcagcggcgcccctcctcccagcggcggcagcccagccggctccccaacctctaccgaggagggcacctctgagtccgccacccccgagagcggccctggcacctccaccgagcccagcgagggcagcgcacccggcagccctgccggcagccccacctccacagaggagggaaccagcaccgagcccagcgaaggcagcgccccaggcaccagcaccgagcctagtgagcaggagattaaacggatcaacaagatcagaagaagacttgtgaaagacagcaacaccaagaaggccggcaagacaggccccatgaaaaccctgctggttagagtgatgacacccgatctgagagagcggctggaaaacctgagaaagaagcctgaaaatatcccccagcccatcagcaatacatctagagccaacctgaataagctgctgaccgattacaccgaaatgaagaaggcgatcctgcatgtgtactgggaagagttccagaaggaccctgtgggcctgatgagccgggtggcccagcctgccagcaagaagatcgatcagaacaagctgaaacctgagatggacgagaagggcaacctgaccaccgccggctttgcctgctctcagtgtggccagcccctgttcgtgtacaagctggagcaggtgtctgagaagggcaaggcttacaccaactacttcggacggtgcaatgtggccgagcacgaaaagctgatcctgctggcccagctgaagcccgagaaggatagcgacgaagccgtgacatatagcctgggaaagtttgggcagagggccctggatttctacagcattcatgtgaccaaggagtccacccaccccgtgaagcccctggcccagatcgccggaaacagatacgcctccggacctgtgggaaaggccctgagcgacgcatgtatgggcacaatcgcctccttcctgtctaagtaccaggacatcatcatcgaacaccagaaggtggtgaagggcaaccagaagagactggagagcctgcgggagctggccggcaaggaaaacctggaataccctagcgtgaccctgccacctcagcctcacaccaaggagggcgttgatgcctacaacgaagtgatcgcccgggtgcgaatgtgggtgaacctgaacctgtggcagaagctgaagctaagcagagatgatgccaagcctctgctgagactgaagggattcccttcctttcctctggtcgagagacaggccaacgaagtggactggtgggacatggtgtgtaacgtgaagaagctgatcaacgagaaaaaggaggatggcaaggtgttttggcagaatctggctggctacaagagacaggaagccctgagaccatacctgagcagcgaggaagatcggaagaagggaaagaaattcgctcggtaccagctgggcgacctgctgctgcacctggaaaagaagcacggcgaggactggggaaaggtgtacgacgaggcctgggagcggattgacaagaaagtggaaggcctgagcaagcacatcaagctggaagaggaacggagaagcgaggacgcccagagcaaggccgccctgaccgactggctgcgggctaaggccagcttcgtgatcgagggcctgaaggaggccgacaaggacgagttctgcagatgcgagctgaagctgcagaagtggtacggggacctgcggggaaagcccttcgccatcgaagccgagaacagcatcctggacatcagcggcttcagcaagcagtacaactgtgccttcatctggcagaaggacggcgtgaagaagctgaacctgtacctgatcatcaactacttcaagggcggcaagctgcggttcaagaagatcaaacctgaagccttcgaagccaacagattctacaccgtgatcaacaaaaagagcggcgagatcgtgcccatggaggtgaacttcaacttcgacgaccccaacctgatcatcctgcctctggcctttggcaagagacagggcagagaattcatctggaacgacctgctgtccctggaaaccggcagcctgaagctggccaacggaagagtgatcgagaagacactgtacaacagaagaacccggcaggatgagcctgccctgttcgtggccctgaccttcgagcggcgggaggtcctggactcctccaatatcaaaccaatgaacctgatcggcgtggcaagaggcgaaaacatccccgccgtgatcgccctgaccgaccccgagggctgcccactgagccggtttaaggatagcctgggaaacccaacccacatcctgagaatcggcgagagctataaggagaagcagcggaccatccaggccaagaaggaggtggagcagcggagagccggcggctacagccggaagtacgccagcaaagccaagaatctggcagacgatatggtgagaaacaccgctagagatctgctgtactacgccgtgacccaggatgccatgctgatcttcgccaacctgagccggggcttcggccggcagggcaagcggaccttcatggccgagagacagtacacacggatggaggactggctgaccgccaagctggcctacgagggcctgagcaagacctacctgtccaagacactggcccagtacacctccaagacatgcagcaactgtgggtttaccatcaccagcgccgactacgacagggtgctggagaagctgaagaagacagcaacaggctggatgaccacaattaacggcaaggagctgaaggtggagggccagattacctactacaacagatacaagagacagaacgtagtcaaggacctgtccgtcgagctggatagactgagcgaagaatctgtgaacaacgacatctcctcctggacaaagggcagaagcggagaagctctgagcctcctgaagaaaagattctcccatagacccgtgcaggagaagttcgtgtgcctgaactgcggcttcgagacacacgcagccgagcaagccgccctgaacatcgccagatcctggctgttcctgcggagccaggagtacaagaaataccagacaaacaagacaaccggcaacaccgataagagagccttcgtcgagacctggcagtccttttaccggaagaagcttaaggaggtgtggaaacctgccgtgcggtctggcggatctggcggaggctccccccaggtgctggtgagcttcgaggacgtggccgtgttcctgagcagggaggagtggggctgcctgggccccgcccagaggggcctgtacagggacgtgatgctggagacctacaggaacctgatcagcctgggcttccaggacagcaagcccgacgtgatcagcaagctggagaagggcgaggagccctgggccccctacagccccaggatcgaggagggctggatctggagccacggcagcggcggcccaagcagcggcgcccctcctcccagcggcggcagcccagccggctccccaacctctaccgaggagggcacctctgagtccgccacccccgagagcggccctggcacctccaccgagcccagcgagggcagcgcacccggcagccctgccggcagccccacctccacagaggagggaaccagcaccgagcccagcgaaggcagcgccccaggcaccagcaccgagcctagtgagcaggagattaaacggatcaacaagatcagaagaagacttgtgaaagacagcaacaccaagaaggccggcaagacaggccccatgaaaaccctgctggttagagtgatgacacccgatctgagagagcggctggaaaacctgagaaagaagcctgaaaatatcccccagcccatcagcaatacatctagagccaacctgaataagctgctgaccgattacaccgaaatgaagaaggcgatcctgcatgtgtactgggaagagttccagaaggaccctgtgggcctgatgagccgggtggcccagcctgccagcaagaagatcgatcagaacaagctgaaacctgagatggacgagaagggcaacctgaccaccgccggctttgcctgctctcagtgtggccagcccctgttcgtgtacaagctggagcaggtgtctgagaagggcaaggcttacaccaactacttcggacggtgcaatgtggccgagcacgaaaagctgatcctgctggcccagctgaagcccgagaaggatagcgacgaagccgtgacatatagcctgggaaagtttgggcagagggccctggatttctacagcattcatgtgaccaaggagtccacccaccccgtgaagcccctggcccagatcgccggaaacagatacgcctccggacctgtgggaaaggccctgagcgacgcatgtatgggcacaatcgcctccttcctgtctaagtaccaggacatcatcatcgaacaccagaaggtggtgaagggcaaccagaagagactggagagcctgcgggagctggccggcaaggaaaacctggaataccctagcgtgaccctgccacctcagcctcacaccaaggagggcgttgatgcctacaacgaagtgatcgcccgggtgcgaatgtgggtgaacctgaacctgtggcagaagctgaagctaagcagagatgatgccaagcctctgctgagactgaagggattcccttcctttcctctggtcgagagacaggccaacgaagtggactggtgggacatggtgtgtaacgtgaagaagctgatcaacgagaaaaaggaggatggcaaggtgttttggcagaatctggctggctacaagagacaggaagccctgagaccatacctgagcagcgaggaagatcggaagaagggaaagaaattcgctcggtaccagctgggcgacctgctgctgcacctggaaaagaagcacggcgaggactggggaaaggtgtacgacgaggcctgggagcggattgacaagaaagtggaaggcctgagcaagcacatcaagctggaagaggaacggagaagcgaggacgcccagagcaaggccgccctgaccgactggctgcgggctaaggccagcttcgtgatcgagggcctgaaggaggccgacaaggacgagttctgcagatgcgagctgaagctgcagaagtggtacggggacctgcggggaaagcccttcgccatcgaagccgagaacagcatcctggacatcagcggcttcagcaagcagtacaactgtgccttcatctggcagaaggacggcgtgaagaagctgaacctgtacctgatcatcaactacttcaagggcggcaagctgcggttcaagaagatcaaacctgaagccttcgaagccaacagattctacaccgtgatcaacaaaaagagcggcgagatcgtgcccatggaggtgaacttcaacttcgacgaccccaacctgatcatcctgcctctggcctttggcaagagacagggcagagaattcatctggaacgacctgctgtccctggaaaccggcagcctgaagctggccaacggaagagtgatcgagaagacactgtacaacagaagaacccggcaggatgagcctgccctgttcgtggccctgaccttcgagcggcgggaggtcctggactcctccaatatcaaaccaatgaacctgatcggcgtggcaagaggcgaaaacatccccgccgtgatcgccctgaccgaccccgagggctgcccactgagccggtttaaggatagcctgggaaacccaacccacatcctgagaatcggcgagagctataaggagaagcagcggaccatccaggccaagaaggaggtggagcagcggagagccggcggctacagccggaagtacgccagcaaagccaagaatctggcagacgatatggtgagaaacaccgctagagatctgctgtactacgccgtgacccaggatgccatgctgatcttcgccaacctgagccggggcttcggccggcagggcaagcggaccttcatggccgagagacagtacacacggatggaggactggctgaccgccaagctggcctacgagggcctgagcaagacctacctgtccaagacactggcccagtacacctccaagacatgcagcaactgtgggtttaccatcaccagcgccgactacgacagggtgctggagaagctgaagaagacagcaacaggctggatgaccacaattaacggcaaggagctgaaggtggagggccagattacctactacaacagatacaagagacagaacgtagtcaaggacctgtccgtcgagctggatagactgagcgaagaatctgtgaacaacgacatctcctcctggacaaagggcagaagcggagaagctctgagcctcctgaagaaaagattctcccatagacccgtgcaggagaagttcgtgtgcctgaactgcggcttcgagacacacgcagccgagcaagccgccctgaacatcgccagatcctggctgttcctgcggagccaggagtacaagaaataccagacaaacaagacaaccggcaacaccgataagagagccttcgtcgagacctggcagtccttttaccggaagaagcttaaggaggtgtggaaacctgccgtgcggtctggcggatctggcggaggctcctccccaggtgctggtgagcttcgaggacgtggccgtgttcctgagcagggaggagtggggctgcctgggccccgcccagaggggcctgtacagggacgtgatgctggagacctacaggaacctgatcagcctgggcttccaggacagcaagcccgacgtgatcagcaagctggagaagggcgaggagccctgggccccctacagccccaggatcgaggagggctggatctggagccacggcagcggatctggctccggcagcggccccaagaaaaagagaaaagtctaagctgccttctgcggggcttgccttctggccatgcccttcttctctcccttgcacctgtacctcttggtctttgaataaagcctgagtaggaaggctagcaaaaaaaaaaaaaaaaaaaaaaaaaaaaaaaaaaaaaaaaaaaaaaaaaaaaaaaaaaaaaaaaaaaaaaaaaaaaaaaa

SEQ ID NO: 15879 - RNA, 9485 nt, synthetic construct
  source 1..9485: mol_type = other RNA
aggaaataagagagaaaagaagagtaagaagaaatataagagccaccatggcccctaagaagaagcgtaaagtgagccggatggaacgcctcgtctacgaggtgcggcagaagtgcagaaacatcgaggacatctgcatctcctgcggatctctgaacgtgaccctggagcacccactgttcatcggcggcatgtgccagaactgtaaaaactgttttctggagtgtgcctatcaatacgacgatgacggctaccagagctactgcaccatctgttgcggcggaagagaggtgctgatgtgtggaaataacaactgctgccggtgcttctgcgtggaatgcgtggacctgctggtgggccccggcgccgcccaggccgctattaaggaagatccttggaactgctacatgtgcggccacaagggcacatacggcctgctgagacggagagaggactggcctagcagactgcagatgttcttcgccaataaccacgaccaggagttcgacccccctaaggtgtaccctcccgtccccgccgagaagagaaagcccatccgggtcctgagcctgttcgatggcatcgccaccggtctgctggtgctgaaggacctgggcatccaggtggataggtacattgcctccgaggtgtgcgaggactccatcaccgtgggaatggtgcgtcatcagggcaagatcatgtacgtgggcgacgtgcggagcgtgacacagaagcatatccaggagtggggccctttcgacctggtgatcggcggcagcccttgcaatgacctgagcatcgtgaacccagcccggaagggcctgtacgagggaaccggcagactgttcttcgagttttacagactgctgcacgacgcccggcctaaggaaggcgacgaccggcccttcttttggctgttcgagaatgtggtggccatgggagtcagcgacaagcgggatattagccggttcctggagagcaaccccgtgatgatcgatgccaaggaagtgagcgccgcccaccgggccagatacttctggggcaatctgcctggcatgaacagacccctggccagcaccgtgaacgacaagctggagctgcaggagtgcctggagcacggccggatcgccaagttcagcaaggtgagaaccatcaccacccgaagcaacagcatcaaacaaggcaaggaccagcactttcctgtgttcatgaacgagaaggaggacatcctgtggtgtaccgagatggagagagtgttcgggttcccagtccactacacagatgtcagcaacatgtctagactggccagacagagactgctgggaagaagctggtccgtccctgtgatcagacacctgttcgcccctctgaaggagtacttcgcctgcgtgagcagcggcaacagcaacgccaacagccggggccccagcttctctagcggcctggtgccactgtccctgagagggagccacatgggccccatggagatctacaaaaccgtgagcgcctggaagcggcagcctgtgcgcgtgctgagcctgtttcggaatatcgataaagtcctgaaaagcctgggattcctggagagcggctctggctccggcggtggcaccctgaagtacgtggaggatgtgacaaacgtggtcagacgggatgtggagaagtggggccccttcgatctggtgtacggcagcacccaacccctgggcagctcttgtgaccggtgccctggctggtacatgtttcagttccaccggatcctgcagtacgccctgccgagacaggagtcccagcggccattcttttggattttcatggacaacttgctgctgaccgaggatgaccaggaaactaccactcggttcctgcagaccgaagccgtgaccctgcaggacgtgagaggccgggactaccagaacgccatgcgggtgtggtccaacatccctggactgaaaagcaagcacgcacctctgacccctaaagaagaggagtacctgcaggcccaggtgcggagcagaagcaagctggacgcccctaaggtggatctgctggtgaagaattgcctcctgcccctgagagagtacttcaagtatttcagccagaatagtctgcccctgggaggcagcggcggcggcgccctggtgacatttgaggacgtcgccgtgcggttcacccaggaggaatgggctctgctggatccttctcagaaaatcctgtaccgggacgtgatgagagagacataccggaatctgacctccgtgggcatcaactgggaatgttgggaccttgaagcctgcttcagaagcctgggaagaaacctgagagtgcaggtggtgaagagaaagtgcgagctgaccaacagcggcccctgcgccgagggcggcccaagcagcggcgcccctcctcccagcggcggcagcccagccggctccccaacctctaccgaggagggcacctctgagtccgccacccccgagagcggccctggcacctccaccgagcccagcgagggcagcgcacccggcagccctgccggcagccccacctccacagaggagggaaccagcaccgagcccagcgaaggcagcgccccaggcaccagcaccgagcctagtgagcaggagattaaacggatcaacaagatcagaagaagacttgtgaaagacagcaacaccaagaaggccggcaagacaggccccatgaaaaccctgctggttagagtgatgacacccgatctgagagagcggctggaaaacctgagaaagaagcctgaaaatatcccccagcccatcagcaatacatctagagccaacctgaataagctgctgaccgattacaccgaaatgaagaaggcgatcctgcatgtgtactgggaagagttccagaaggaccctgtgggcctgatgagccgggtggcccagcctgccagcaagaagatcgatcagaacaagctgaaacctgagatggacgagaagggcaacctgaccaccgccggctttgcctgctctcagtgtggccagcccctgttcgtgtacaagctggagcaggtgtctgagaagggcaaggcttacaccaactacttcggacggtgcaatgtggccgagcacgaaaagctgatcctgctggcccagctgaagcccgagaaggatagcgacgaagccgtgacatatagcctgggaaagtttgggcagagggccctggatttctacagcattcatgtgaccaaggagtccacccaccccgtgaagcccctggcccagatcgccggaaacagatacgcctccggacctgtgggaaaggccctgagcgacgcatgtatgggcacaatcgcctccttcctgtctaagtaccaggacatcatcatcgaacaccagaaggtggtgaagggcaaccagaagagactggagagcctgcgggagctggccggcaaggaaaacctggaataccctagcgtgaccctgccacctcagcctcacaccaaggagggcgttgatgcctacaacgaagtgatcgcccgggtgcgaatgtgggtgaacctgaacctgtggcagaagctgaagctaagcagagatgatgccaagcctctgctgagactgaagggattcccttcctttcctctggtcgagagacaggccaacgaagtggactggtgggacatggtgtgtaacgtgaagaagctgatcaacgagaaaaaggaggatggcaaggtgttttggcagaatctggctggctacaagagacaggaagccctgagaccatacctgagcagcgaggaagatcggaagaagggaaagaaattcgctcggtaccagctgggcgacctgctgctgcacctggaaaagaagcacggcgaggactggggaaaggtgtacgacgaggcctgggagcggattgacaagaaagtggaaggcctgagcaagcacatcaagctggaagaggaacggagaagcgaggacgcccagagcaaggccgccctgaccgactggctgcgggctaaggccagcttcgtgatcgagggcctgaaggaggccgacaaggacgagttctgcagatgcgagctgaagctgcagaagtggtacggggacctgcggggaaagcccttcgccatcgaagccgagaacagcatcctggacatcagcggcttcagcaagcagtacaactgtgccttcatctggcagaaggacggcgtgaagaagctgaacctgtacctgatcatcaactacttcaagggcggcaagctgcggttcaagaagatcaaacctgaagccttcgaagccaacagattctacaccgtgatcaacaaaaagagcggcgagatcgtgcccatggaggtgaacttcaacttcgacgaccccaacctgatcatcctgcctctggcctttggcaagagacagggcagagaattcatctggaacgacctgctgtccctggaaaccggcagcctgaagctggccaacggaagagtgatcgagaagacactgtacaacagaagaacccggcaggatgagcctgccctgttcgtggccctgaccttcgagcggcgggaggtcctggactcctccaatatcaaaccaatgaacctgatcggcgtggcaagaggcgaaaacatccccgccgtgatcgccctgaccgaccccgagggctgcccactgagccggtttaaggatagcctgggaaacccaacccacatcctgagaatcggcgagagctataaggagaagcagcggaccatccaggccaagaaggaggtggagcagcggagagccggcggctacagccggaagtacgccagcaaagccaagaatctggcagacgatatggtgagaaacaccgctagagatctgctgtactacgccgtgacccaggatgccatgctgatcttcgccaacctgagccggggcttcggccggcagggcaagcggaccttcatggccgagagacagtacacacggatggaggactggctgaccgccaagctggcctacgagggcctgagcaagacctacctgtccaagacactggcccagtacacctccaagacatgcagcaactgtgggtttaccatcaccagcgccgactacgacagggtgctggagaagctgaagaagacagcaacaggctggatgaccacaattaacggcaaggagctgaaggtggagggccagattacctactacaacagatacaagagacagaacgtagtcaaggacctgtccgtcgagctggatagactgagcgaagaatctgtgaacaacgacatctcctcctggacaaagggcagaagcggagaagctctgagcctcctgaagaaaagattctcccatagacccgtgcaggagaagttcgtgtgcctgaactgcggcttcgagacacacgcagccgagcaagccgccctgaacatcgccagatcctggctgttcctgcggagccaggagtacaagaaataccagacaaacaagacaaccggcaacaccgataagagagccttcgtcgagacctggcagtccttttaccggaagaagcttaaggaggtgtggaaacctgccgtgcggtctggcggatctggcggaggctccgcccaggagagcatcaccctggaggacgtggccgtggacttcacctgggaggagtggcagctgctgggcgccgcccagaaggacctgtacagggacgtgatgctggagaactacagcaacctggtggccgtgggctaccaggccagcaagcccgacgccctgttcaagctggagcagggcgagcagccctggaccatcgaggacggcatccacagcggcgcctgcagcgacatctggaaggtgggcggcccaagcagcggcgcccctcctcccagcggcggcagcccagccggctccccaacctctaccgaggagggcacctctgagtccgccacccccgagagcggccctggcacctccaccgagcccagcgagggcagcgcacccggcagccctgccggcagccccacctccacagaggagggaaccagcaccgagcccagcgaaggcagcgccccaggcaccagcaccgagcctagtgagcaggagattaaacggatcaacaagatcagaagaagacttgtgaaagacagcaacaccaagaaggccggcaagacaggccccatgaaaaccctgctggttagagtgatgacacccgatctgagagagcggctggaaaacctgagaaagaagcctgaaaatatcccccagcccatcagcaatacatctagagccaacctgaataagctgctgaccgattacaccgaaatgaagaaggcgatcctgcatgtgtactgggaagagttccagaaggaccctgtgggcctgatgagccgggtggcccagcctgccagcaagaagatcgatcagaacaagctgaaacctgagatggacgagaagggcaacctgaccaccgccggctttgcctgctctcagtgtggccagcccctgttcgtgtacaagctggagcaggtgtctgagaagggcaaggcttacaccaactacttcggacggtgcaatgtggccgagcacgaaaagctgatcctgctggcccagctgaagcccgagaaggatagcgacgaagccgtgacatatagcctgggaaagtttgggcagagggccctggatttctacagcattcatgtgaccaaggagtccacccaccccgtgaagcccctggcccagatcgccggaaacagatacgcctccggacctgtgggaaaggccctgagcgacgcatgtatgggcacaatcgcctccttcctgtctaagtaccaggacatcatcatcgaacaccagaaggtggtgaagggcaaccagaagagactggagagcctgcgggagctggccggcaaggaaaacctggaataccctagcgtgaccctgccacctcagcctcacaccaaggagggcgttgatgcctacaacgaagtgatcgcccgggtgcgaatgtgggtgaacctgaacctgtggcagaagctgaagctaagcagagatgatgccaagcctctgctgagactgaagggattcccttcctttcctctggtcgagagacaggccaacgaagtggactggtgggacatggtgtgtaacgtgaagaagctgatcaacgagaaaaaggaggatggcaaggtgttttggcagaatctggctggctacaagagacaggaagccctgagaccatacctgagcagcgaggaagatcggaagaagggaaagaaattcgctcggtaccagctgggcgacctgctgctgcacctggaaaagaagcacggcgaggactggggaaaggtgtacgacgaggcctgggagcggattgacaagaaagtggaaggcctgagcaagcacatcaagctggaagaggaacggagaagcgaggacgcccagagcaaggccgccctgaccgactggctgcgggctaaggccagcttcgtgatcgagggcctgaaggaggccgacaaggacgagttctgcagatgcgagctgaagctgcagaagtggtacggggacctgcggggaaagcccttcgccatcgaagccgagaacagcatcctggacatcagcggcttcagcaagcagtacaactgtgccttcatctggcagaaggacggcgtgaagaagctgaacctgtacctgatcatcaactacttcaagggcggcaagctgcggttcaagaagatcaaacctgaagccttcgaagccaacagattctacaccgtgatcaacaaaaagagcggcgagatcgtgcccatggaggtgaacttcaacttcgacgaccccaacctgatcatcctgcctctggcctttggcaagagacagggcagagaattcatctggaacgacctgctgtccctggaaaccggcagcctgaagctggccaacggaagagtgatcgagaagacactgtacaacagaagaacccggcaggatgagcctgccctgttcgtggccctgaccttcgagcggcgggaggtcctggactcctccaatatcaaaccaatgaacctgatcggcgtggcaagaggcgaaaacatccccgccgtgatcgccctgaccgaccccgagggctgcccactgagccggtttaaggatagcctgggaaacccaacccacatcctgagaatcggcgagagctataaggagaagcagcggaccatccaggccaagaaggaggtggagcagcggagagccggcggctacagccggaagtacgccagcaaagccaagaatctggcagacgatatggtgagaaacaccgctagagatctgctgtactacgccgtgacccaggatgccatgctgatcttcgccaacctgagccggggcttcggccggcagggcaagcggaccttcatggccgagagacagtacacacggatggaggactggctgaccgccaagctggcctacgagggcctgagcaagacctacctgtccaagacactggcccagtacacctccaagacatgcagcaactgtgggtttaccatcaccagcgccgactacgacagggtgctggagaagctgaagaagacagcaacaggctggatgaccacaattaacggcaaggagctgaaggtggagggccagattacctactacaacagatacaagagacagaacgtagtcaaggacctgtccgtcgagctggatagactgagcgaagaatctgtgaacaacgacatctcctcctggacaaagggcagaagcggagaagctctgagcctcctgaagaaaagattctcccatagacccgtgcaggagaagttcgtgtgcctgaactgcggcttcgagacacacgcagccgagcaagccgccctgaacatcgccagatcctggctgttcctgcggagccaggagtacaagaaataccagacaaacaagacaaccggcaacaccgataagagagccttcgtcgagacctggcagtccttttaccggaagaagcttaaggaggtgtggaaacctgccgtgcggtctggcggatctggcggaggctcctgcccaggagagcatcaccctggaggacgtggccgtggacttcacctgggaggagtggcagctgctgggcgccgcccagaaggacctgtacagggacgtgatgctggagaactacagcaacctggtggccgtgggctaccaggccagcaagcccgacgccctgttcaagctggagcagggcgagcagccctggaccatcgaggacggcatccacagcggcgcctgcagcgacatctggaaggtgggatctggctccggcagcggccccaagaaaaagagaaaagtctaagctgccttctgcggggcttgccttctggccatgcccttcttctctcccttgcacctgtacctcttggtctttgaataaagcctgagtaggaaggctagcaaaaaaaaaaaaaaaaaaaaaaaaaaaaaaaaaaaaaaaaaaaaaaaaaaaaaaaaaaaaaaaaaaaaaaaaaaaaaaaa

SEQ ID NO: 15880 - RNA, 9485 nt, synthetic construct
  source 1..9485: mol_type = other RNA
aggaaataagagagaaaagaagagtaagaagaaatataagagccaccatggcccctaagaagaagcgtaaagtgagccggatggaacgcctcgtctacgaggtgcggcagaagtgcagaaacatcgaggacatctgcatctcctgcggatctctgaacgtgaccctggagcacccactgttcatcggcggcatgtgccagaactgtaaaaactgttttctggagtgtgcctatcaatacgacgatgacggctaccagagctactgcaccatctgttgcggcggaagagaggtgctgatgtgtggaaataacaactgctgccggtgcttctgcgtggaatgcgtggacctgctggtgggccccggcgccgcccaggccgctattaaggaagatccttggaactgctacatgtgcggccacaagggcacatacggcctgctgagacggagagaggactggcctagcagactgcagatgttcttcgccaataaccacgaccaggagttcgacccccctaaggtgtaccctcccgtccccgccgagaagagaaagcccatccgggtcctgagcctgttcgatggcatcgccaccggtctgctggtgctgaaggacctgggcatccaggtggataggtacattgcctccgaggtgtgcgaggactccatcaccgtgggaatggtgcgtcatcagggcaagatcatgtacgtgggcgacgtgcggagcgtgacacagaagcatatccaggagtggggccctttcgacctggtgatcggcggcagcccttgcaatgacctgagcatcgtgaacccagcccggaagggcctgtacgagggaaccggcagactgttcttcgagttttacagactgctgcacgacgcccggcctaaggaaggcgacgaccggcccttcttttggctgttcgagaatgtggtggccatgggagtcagcgacaagcgggatattagccggttcctggagagcaaccccgtgatgatcgatgccaaggaagtgagcgccgcccaccgggccagatacttctggggcaatctgcctggcatgaacagacccctggccagcaccgtgaacgacaagctggagctgcaggagtgcctggagcacggccggatcgccaagttcagcaaggtgagaaccatcaccacccgaagcaacagcatcaaacaaggcaaggaccagcactttcctgtgttcatgaacgagaaggaggacatcctgtggtgtaccgagatggagagagtgttcgggttcccagtccactacacagatgtcagcaacatgtctagactggccagacagagactgctgggaagaagctggtccgtccctgtgatcagacacctgttcgcccctctgaaggagtacttcgcctgcgtgagcagcggcaacagcaacgccaacagccggggccccagcttctctagcggcctggtgccactgtccctgagagggagccacatgggccccatggagatctacaaaaccgtgagcgcctggaagcggcagcctgtgcgcgtgctgagcctgtttcggaatatcgataaagtcctgaaaagcctgggattcctggagagcggctctggctccggcggtggcaccctgaagtacgtggaggatgtgacaaacgtggtcagacgggatgtggagaagtggggccccttcgatctggtgtacggcagcacccaacccctgggcagctcttgtgaccggtgccctggctggtacatgtttcagttccaccggatcctgcagtacgccctgccgagacaggagtcccagcggccattcttttggattttcatggacaacttgctgctgaccgaggatgaccaggaaactaccactcggttcctgcagaccgaagccgtgaccctgcaggacgtgagaggccgggactaccagaacgccatgcgggtgtggtccaacatccctggactgaaaagcaagcacgcacctctgacccctaaagaagaggagtacctgcaggcccaggtgcggagcagaagcaagctggacgcccctaaggtggatctgctggtgaagaattgcctcctgcccctgagagagtacttcaagtatttcagccagaatagtctgcccctgggaggcagcggcggcggcgccctggtgacatttgaggacgtcgccgtgcggttcacccaggaggaatgggctctgctggatccttctcagaaaatcctgtaccgggacgtgatgagagagacataccggaatctgacctccgtgggcatcaactgggaatgttgggaccttgaagcctgcttcagaagcctgggaagaaacctgagagtgcaggtggtgaagagaaagtgcgagctgaccaacagcggcccctgcgccgagggcggcccaagcagcggcgcccctcctcccagcggcggcagcccagccggctccccaacctctaccgaggagggcacctctgagtccgccacccccgagagcggccctggcacctccaccgagcccagcgagggcagcgcacccggcagccctgccggcagccccacctccacagaggagggaaccagcaccgagcccagcgaaggcagcgccccaggcaccagcaccgagcctagtgagcaggagattaaacggatcaacaagatcagaagaagacttgtgaaagacagcaacaccaagaaggccggcaagacaggccccatgaaaaccctgctggttagagtgatgacacccgatctgagagagcggctggaaaacctgagaaagaagcctgaaaatatcccccagcccatcagcaatacatctagagccaacctgaataagctgctgaccgattacaccgaaatgaagaaggcgatcctgcatgtgtactgggaagagttccagaaggaccctgtgggcctgatgagccgggtggcccagcctgccagcaagaagatcgatcagaacaagctgaaacctgagatggacgagaagggcaacctgaccaccgccggctttgcctgctctcagtgtggccagcccctgttcgtgtacaagctggagcaggtgtctgagaagggcaaggcttacaccaactacttcggacggtgcaatgtggccgagcacgaaaagctgatcctgctggcccagctgaagcccgagaaggatagcgacgaagccgtgacatatagcctgggaaagtttgggcagagggccctggatttctacagcattcatgtgaccaaggagtccacccaccccgtgaagcccctggcccagatcgccggaaacagatacgcctccggacctgtgggaaaggccctgagcgacgcatgtatgggcacaatcgcctccttcctgtctaagtaccaggacatcatcatcgaacaccagaaggtggtgaagggcaaccagaagagactggagagcctgcgggagctggccggcaaggaaaacctggaataccctagcgtgaccctgccacctcagcctcacaccaaggagggcgttgatgcctacaacgaagtgatcgcccgggtgcgaatgtgggtgaacctgaacctgtggcagaagctgaagctaagcagagatgatgccaagcctctgctgagactgaagggattcccttcctttcctctggtcgagagacaggccaacgaagtggactggtgggacatggtgtgtaacgtgaagaagctgatcaacgagaaaaaggaggatggcaaggtgttttggcagaatctggctggctacaagagacaggaagccctgagaccatacctgagcagcgaggaagatcggaagaagggaaagaaattcgctcggtaccagctgggcgacctgctgctgcacctggaaaagaagcacggcgaggactggggaaaggtgtacgacgaggcctgggagcggattgacaagaaagtggaaggcctgagcaagcacatcaagctggaagaggaacggagaagcgaggacgcccagagcaaggccgccctgaccgactggctgcgggctaaggccagcttcgtgatcgagggcctgaaggaggccgacaaggacgagttctgcagatgcgagctgaagctgcagaagtggtacggggacctgcggggaaagcccttcgccatcgaagccgagaacagcatcctggacatcagcggcttcagcaagcagtacaactgtgccttcatctggcagaaggacggcgtgaagaagctgaacctgtacctgatcatcaactacttcaagggcggcaagctgcggttcaagaagatcaaacctgaagccttcgaagccaacagattctacaccgtgatcaacaaaaagagcggcgagatcgtgcccatggaggtgaacttcaacttcgacgaccccaacctgatcatcctgcctctggcctttggcaagagacagggcagagaattcatctggaacgacctgctgtccctggaaaccggcagcctgaagctggccaacggaagagtgatcgagaagacactgtacaacagaagaacccggcaggatgagcctgccctgttcgtggccctgaccttcgagcggcgggaggtcctggactcctccaatatcaaaccaatgaacctgatcggcgtggcaagaggcgaaaacatccccgccgtgatcgccctgaccgaccccgagggctgcccactgagccggtttaaggatagcctgggaaacccaacccacatcctgagaatcggcgagagctataaggagaagcagcggaccatccaggccaagaaggaggtggagcagcggagagccggcggctacagccggaagtacgccagcaaagccaagaatctggcagacgatatggtgagaaacaccgctagagatctgctgtactacgccgtgacccaggatgccatgctgatcttcgccaacctgagccggggcttcggccggcagggcaagcggaccttcatggccgagagacagtacacacggatggaggactggctgaccgccaagctggcctacgagggcctgagcaagacctacctgtccaagacactggcccagtacacctccaagacatgcagcaactgtgggtttaccatcaccagcgccgactacgacagggtgctggagaagctgaagaagacagcaacaggctggatgaccacaattaacggcaaggagctgaaggtggagggccagattacctactacaacagatacaagagacagaacgtagtcaaggacctgtccgtcgagctggatagactgagcgaagaatctgtgaacaacgacatctcctcctggacaaagggcagaagcggagaagctctgagcctcctgaagaaaagattctcccatagacccgtgcaggagaagttcgtgtgcctgaactgcggcttcgagacacacgcagccgagcaagccgccctgaacatcgccagatcctggctgttcctgcggagccaggagtacaagaaataccagacaaacaagacaaccggcaacaccgataagagagccttcgtcgagacctggcagtccttttaccggaagaagcttaaggaggtgtggaaacctgccgtgcggtctggcggatctggcggaggctccgccaggggcaagagcaagagcaaggcccccgtgaccttcggcgacctggccatctacttcagccaggaggagtgggagtggctgagccccatccagaaggacctgtacgaggacgtgatgctggagaactacaggaacctggtgagcctgggcctgagcttcaggaggcccaacgtgatcaccctgctggagaagggcaaggccccctggatggtggagcccgtgaggaggaggagggcccccggcggcccaagcagcggcgcccctcctcccagcggcggcagcccagccggctccccaacctctaccgaggagggcacctctgagtccgccacccccgagagcggccctggcacctccaccgagcccagcgagggcagcgcacccggcagccctgccggcagccccacctccacagaggagggaaccagcaccgagcccagcgaaggcagcgccccaggcaccagcaccgagcctagtgagcaggagattaaacggatcaacaagatcagaagaagacttgtgaaagacagcaacaccaagaaggccggcaagacaggccccatgaaaaccctgctggttagagtgatgacacccgatctgagagagcggctggaaaacctgagaaagaagcctgaaaatatcccccagcccatcagcaatacatctagagccaacctgaataagctgctgaccgattacaccgaaatgaagaaggcgatcctgcatgtgtactgggaagagttccagaaggaccctgtgggcctgatgagccgggtggcccagcctgccagcaagaagatcgatcagaacaagctgaaacctgagatggacgagaagggcaacctgaccaccgccggctttgcctgctctcagtgtggccagcccctgttcgtgtacaagctggagcaggtgtctgagaagggcaaggcttacaccaactacttcggacggtgcaatgtggccgagcacgaaaagctgatcctgctggcccagctgaagcccgagaaggatagcgacgaagccgtgacatatagcctgggaaagtttgggcagagggccctggatttctacagcattcatgtgaccaaggagtccacccaccccgtgaagcccctggcccagatcgccggaaacagatacgcctccggacctgtgggaaaggccctgagcgacgcatgtatgggcacaatcgcctccttcctgtctaagtaccaggacatcatcatcgaacaccagaaggtggtgaagggcaaccagaagagactggagagcctgcgggagctggccggcaaggaaaacctggaataccctagcgtgaccctgccacctcagcctcacaccaaggagggcgttgatgcctacaacgaagtgatcgcccgggtgcgaatgtgggtgaacctgaacctgtggcagaagctgaagctaagcagagatgatgccaagcctctgctgagactgaagggattcccttcctttcctctggtcgagagacaggccaacgaagtggactggtgggacatggtgtgtaacgtgaagaagctgatcaacgagaaaaaggaggatggcaaggtgttttggcagaatctggctggctacaagagacaggaagccctgagaccatacctgagcagcgaggaagatcggaagaagggaaagaaattcgctcggtaccagctgggcgacctgctgctgcacctggaaaagaagcacggcgaggactggggaaaggtgtacgacgaggcctgggagcggattgacaagaaagtggaaggcctgagcaagcacatcaagctggaagaggaacggagaagcgaggacgcccagagcaaggccgccctgaccgactggctgcgggctaaggccagcttcgtgatcgagggcctgaaggaggccgacaaggacgagttctgcagatgcgagctgaagctgcagaagtggtacggggacctgcggggaaagcccttcgccatcgaagccgagaacagcatcctggacatcagcggcttcagcaagcagtacaactgtgccttcatctggcagaaggacggcgtgaagaagctgaacctgtacctgatcatcaactacttcaagggcggcaagctgcggttcaagaagatcaaacctgaagccttcgaagccaacagattctacaccgtgatcaacaaaaagagcggcgagatcgtgcccatggaggtgaacttcaacttcgacgaccccaacctgatcatcctgcctctggcctttggcaagagacagggcagagaattcatctggaacgacctgctgtccctggaaaccggcagcctgaagctggccaacggaagagtgatcgagaagacactgtacaacagaagaacccggcaggatgagcctgccctgttcgtggccctgaccttcgagcggcgggaggtcctggactcctccaatatcaaaccaatgaacctgatcggcgtggcaagaggcgaaaacatccccgccgtgatcgccctgaccgaccccgagggctgcccactgagccggtttaaggatagcctgggaaacccaacccacatcctgagaatcggcgagagctataaggagaagcagcggaccatccaggccaagaaggaggtggagcagcggagagccggcggctacagccggaagtacgccagcaaagccaagaatctggcagacgatatggtgagaaacaccgctagagatctgctgtactacgccgtgacccaggatgccatgctgatcttcgccaacctgagccggggcttcggccggcagggcaagcggaccttcatggccgagagacagtacacacggatggaggactggctgaccgccaagctggcctacgagggcctgagcaagacctacctgtccaagacactggcccagtacacctccaagacatgcagcaactgtgggtttaccatcaccagcgccgactacgacagggtgctggagaagctgaagaagacagcaacaggctggatgaccacaattaacggcaaggagctgaaggtggagggccagattacctactacaacagatacaagagacagaacgtagtcaaggacctgtccgtcgagctggatagactgagcgaagaatctgtgaacaacgacatctcctcctggacaaagggcagaagcggagaagctctgagcctcctgaagaaaagattctcccatagacccgtgcaggagaagttcgtgtgcctgaactgcggcttcgagacacacgcagccgagcaagccgccctgaacatcgccagatcctggctgttcctgcggagccaggagtacaagaaataccagacaaacaagacaaccggcaacaccgataagagagccttcgtcgagacctggcagtccttttaccggaagaagcttaaggaggtgtggaaacctgccgtgcggtctggcggatctggcggaggctcctgccaggggcaagagcaagagcaaggcccccgtgaccttcggcgacctggccatctacttcagccaggaggagtgggagtggctgagccccatccagaaggacctgtacgaggacgtgatgctggagaactacaggaacctggtgagcctgggcctgagcttcaggaggcccaacgtgatcaccctgctggagaagggcaaggccccctggatggtggagcccgtgaggaggaggagggcccccggatctggctccggcagcggccccaagaaaaagagaaaagtctaagctgccttctgcggggcttgccttctggccatgcccttcttctctcccttgcacctgtacctcttggtctttgaataaagcctgagtaggaaggctagcaaaaaaaaaaaaaaaaaaaaaaaaaaaaaaaaaaaaaaaaaaaaaaaaaaaaaaaaaaaaaaaaaaaaaaaaaaaaaaaa

SEQ ID NO: 15881 - RNA, 9485 nt, synthetic construct
  source 1..9485: mol_type = other RNA
aggaaataagagagaaaagaagagtaagaagaaatataagagccaccatggcccctaagaagaagcgtaaagtgagccggatggaacgcctcgtctacgaggtgcggcagaagtgcagaaacatcgaggacatctgcatctcctgcggatctctgaacgtgaccctggagcacccactgttcatcggcggcatgtgccagaactgtaaaaactgttttctggagtgtgcctatcaatacgacgatgacggctaccagagctactgcaccatctgttgcggcggaagagaggtgctgatgtgtggaaataacaactgctgccggtgcttctgcgtggaatgcgtggacctgctggtgggccccggcgccgcccaggccgctattaaggaagatccttggaactgctacatgtgcggccacaagggcacatacggcctgctgagacggagagaggactggcctagcagactgcagatgttcttcgccaataaccacgaccaggagttcgacccccctaaggtgtaccctcccgtccccgccgagaagagaaagcccatccgggtcctgagcctgttcgatggcatcgccaccggtctgctggtgctgaaggacctgggcatccaggtggataggtacattgcctccgaggtgtgcgaggactccatcaccgtgggaatggtgcgtcatcagggcaagatcatgtacgtgggcgacgtgcggagcgtgacacagaagcatatccaggagtggggccctttcgacctggtgatcggcggcagcccttgcaatgacctgagcatcgtgaacccagcccggaagggcctgtacgagggaaccggcagactgttcttcgagttttacagactgctgcacgacgcccggcctaaggaaggcgacgaccggcccttcttttggctgttcgagaatgtggtggccatgggagtcagcgacaagcgggatattagccggttcctggagagcaaccccgtgatgatcgatgccaaggaagtgagcgccgcccaccgggccagatacttctggggcaatctgcctggcatgaacagacccctggccagcaccgtgaacgacaagctggagctgcaggagtgcctggagcacggccggatcgccaagttcagcaaggtgagaaccatcaccacccgaagcaacagcatcaaacaaggcaaggaccagcactttcctgtgttcatgaacgagaaggaggacatcctgtggtgtaccgagatggagagagtgttcgggttcccagtccactacacagatgtcagcaacatgtctagactggccagacagagactgctgggaagaagctggtccgtccctgtgatcagacacctgttcgcccctctgaaggagtacttcgcctgcgtgagcagcggcaacagcaacgccaacagccggggccccagcttctctagcggcctggtgccactgtccctgagagggagccacatgggccccatggagatctacaaaaccgtgagcgcctggaagcggcagcctgtgcgcgtgctgagcctgtttcggaatatcgataaagtcctgaaaagcctgggattcctggagagcggctctggctccggcggtggcaccctgaagtacgtggaggatgtgacaaacgtggtcagacgggatgtggagaagtggggccccttcgatctggtgtacggcagcacccaacccctgggcagctcttgtgaccggtgccctggctggtacatgtttcagttccaccggatcctgcagtacgccctgccgagacaggagtcccagcggccattcttttggattttcatggacaacttgctgctgaccgaggatgaccaggaaactaccactcggttcctgcagaccgaagccgtgaccctgcaggacgtgagaggccgggactaccagaacgccatgcgggtgtggtccaacatccctggactgaaaagcaagcacgcacctctgacccctaaagaagaggagtacctgcaggcccaggtgcggagcagaagcaagctggacgcccctaaggtggatctgctggtgaagaattgcctcctgcccctgagagagtacttcaagtatttcagccagaatagtctgcccctgggaggcagcggcggcggcgccctggtgacatttgaggacgtcgccgtgcggttcacccaggaggaatgggctctgctggatccttctcagaaaatcctgtaccgggacgtgatgagagagacataccggaatctgacctccgtgggcatcaactgggaatgttgggaccttgaagcctgcttcagaagcctgggaagaaacctgagagtgcaggtggtgaagagaaagtgcgagctgaccaacagcggcccctgcgccgagggcggcccaagcagcggcgcccctcctcccagcggcggcagcccagccggctccccaacctctaccgaggagggcacctctgagtccgccacccccgagagcggccctggcacctccaccgagcccagcgagggcagcgcacccggcagccctgccggcagccccacctccacagaggagggaaccagcaccgagcccagcgaaggcagcgccccaggcaccagcaccgagcctagtgagcaggagattaaacggatcaacaagatcagaagaagacttgtgaaagacagcaacaccaagaaggccggcaagacaggccccatgaaaaccctgctggttagagtgatgacacccgatctgagagagcggctggaaaacctgagaaagaagcctgaaaatatcccccagcccatcagcaatacatctagagccaacctgaataagctgctgaccgattacaccgaaatgaagaaggcgatcctgcatgtgtactgggaagagttccagaaggaccctgtgggcctgatgagccgggtggcccagcctgccagcaagaagatcgatcagaacaagctgaaacctgagatggacgagaagggcaacctgaccaccgccggctttgcctgctctcagtgtggccagcccctgttcgtgtacaagctggagcaggtgtctgagaagggcaaggcttacaccaactacttcggacggtgcaatgtggccgagcacgaaaagctgatcctgctggcccagctgaagcccgagaaggatagcgacgaagccgtgacatatagcctgggaaagtttgggcagagggccctggatttctacagcattcatgtgaccaaggagtccacccaccccgtgaagcccctggcccagatcgccggaaacagatacgcctccggacctgtgggaaaggccctgagcgacgcatgtatgggcacaatcgcctccttcctgtctaagtaccaggacatcatcatcgaacaccagaaggtggtgaagggcaaccagaagagactggagagcctgcgggagctggccggcaaggaaaacctggaataccctagcgtgaccctgccacctcagcctcacaccaaggagggcgttgatgcctacaacgaagtgatcgcccgggtgcgaatgtgggtgaacctgaacctgtggcagaagctgaagctaagcagagatgatgccaagcctctgctgagactgaagggattcccttcctttcctctggtcgagagacaggccaacgaagtggactggtgggacatggtgtgtaacgtgaagaagctgatcaacgagaaaaaggaggatggcaaggtgttttggcagaatctggctggctacaagagacaggaagccctgagaccatacctgagcagcgaggaagatcggaagaagggaaagaaattcgctcggtaccagctgggcgacctgctgctgcacctggaaaagaagcacggcgaggactggggaaaggtgtacgacgaggcctgggagcggattgacaagaaagtggaaggcctgagcaagcacatcaagctggaagaggaacggagaagcgaggacgcccagagcaaggccgccctgaccgactggctgcgggctaaggccagcttcgtgatcgagggcctgaaggaggccgacaaggacgagttctgcagatgcgagctgaagctgcagaagtggtacggggacctgcggggaaagcccttcgccatcgaagccgagaacagcatcctggacatcagcggcttcagcaagcagtacaactgtgccttcatctggcagaaggacggcgtgaagaagctgaacctgtacctgatcatcaactacttcaagggcggcaagctgcggttcaagaagatcaaacctgaagccttcgaagccaacagattctacaccgtgatcaacaaaaagagcggcgagatcgtgcccatggaggtgaacttcaacttcgacgaccccaacctgatcatcctgcctctggcctttggcaagagacagggcagagaattcatctggaacgacctgctgtccctggaaaccggcagcctgaagctggccaacggaagagtgatcgagaagacactgtacaacagaagaacccggcaggatgagcctgccctgttcgtggccctgaccttcgagcggcgggaggtcctggactcctccaatatcaaaccaatgaacctgatcggcgtggcaagaggcgaaaacatccccgccgtgatcgccctgaccgaccccgagggctgcccactgagccggtttaaggatagcctgggaaacccaacccacatcctgagaatcggcgagagctataaggagaagcagcggaccatccaggccaagaaggaggtggagcagcggagagccggcggctacagccggaagtacgccagcaaagccaagaatctggcagacgatatggtgagaaacaccgctagagatctgctgtactacgccgtgacccaggatgccatgctgatcttcgccaacctgagccggggcttcggccggcagggcaagcggaccttcatggccgagagacagtacacacggatggaggactggctgaccgccaagctggcctacgagggcctgagcaagacctacctgtccaagacactggcccagtacacctccaagacatgcagcaactgtgggtttaccatcaccagcgccgactacgacagggtgctggagaagctgaagaagacagcaacaggctggatgaccacaattaacggcaaggagctgaaggtggagggccagattacctactacaacagatacaagagacagaacgtagtcaaggacctgtccgtcgagctggatagactgagcgaagaatctgtgaacaacgacatctcctcctggacaaagggcagaagcggagaagctctgagcctcctgaagaaaagattctcccatagacccgtgcaggagaagttcgtgtgcctgaactgcggcttcgagacacacgcagccgagcaagccgccctgaacatcgccagatcctggctgttcctgcggagccaggagtacaagaaataccagacaaacaagacaaccggcaacaccgataagagagccttcgtcgagacctggcagtccttttaccggaagaagcttaaggaggtgtggaaacctgccgtgcggtctggcggatctggcggaggctccatggtgcaggagagcgtgaccttcaaggacgtggccgtgctgttcacccaggaggagtggggccagctgagccccgcccagagggccctgtacagggacgtgatgctggagaactacagcaacctggtgagcctgggcctgctgggccccaagcccgacatgttcagccagctggagaagagggaggtgtggatgcccgaggacacccccggcggcttctgcctggactggatgaccatgcccggcggcccaagcagcggcgcccctcctcccagcggcggcagcccagccggctccccaacctctaccgaggagggcacctctgagtccgccacccccgagagcggccctggcacctccaccgagcccagcgagggcagcgcacccggcagccctgccggcagccccacctccacagaggagggaaccagcaccgagcccagcgaaggcagcgccccaggcaccagcaccgagcctagtgagcaggagattaaacggatcaacaagatcagaagaagacttgtgaaagacagcaacaccaagaaggccggcaagacaggccccatgaaaaccctgctggttagagtgatgacacccgatctgagagagcggctggaaaacctgagaaagaagcctgaaaatatcccccagcccatcagcaatacatctagagccaacctgaataagctgctgaccgattacaccgaaatgaagaaggcgatcctgcatgtgtactgggaagagttccagaaggaccctgtgggcctgatgagccgggtggcccagcctgccagcaagaagatcgatcagaacaagctgaaacctgagatggacgagaagggcaacctgaccaccgccggctttgcctgctctcagtgtggccagcccctgttcgtgtacaagctggagcaggtgtctgagaagggcaaggcttacaccaactacttcggacggtgcaatgtggccgagcacgaaaagctgatcctgctggcccagctgaagcccgagaaggatagcgacgaagccgtgacatatagcctgggaaagtttgggcagagggccctggatttctacagcattcatgtgaccaaggagtccacccaccccgtgaagcccctggcccagatcgccggaaacagatacgcctccggacctgtgggaaaggccctgagcgacgcatgtatgggcacaatcgcctccttcctgtctaagtaccaggacatcatcatcgaacaccagaaggtggtgaagggcaaccagaagagactggagagcctgcgggagctggccggcaaggaaaacctggaataccctagcgtgaccctgccacctcagcctcacaccaaggagggcgttgatgcctacaacgaagtgatcgcccgggtgcgaatgtgggtgaacctgaacctgtggcagaagctgaagctaagcagagatgatgccaagcctctgctgagactgaagggattcccttcctttcctctggtcgagagacaggccaacgaagtggactggtgggacatggtgtgtaacgtgaagaagctgatcaacgagaaaaaggaggatggcaaggtgttttggcagaatctggctggctacaagagacaggaagccctgagaccatacctgagcagcgaggaagatcggaagaagggaaagaaattcgctcggtaccagctgggcgacctgctgctgcacctggaaaagaagcacggcgaggactggggaaaggtgtacgacgaggcctgggagcggattgacaagaaagtggaaggcctgagcaagcacatcaagctggaagaggaacggagaagcgaggacgcccagagcaaggccgccctgaccgactggctgcgggctaaggccagcttcgtgatcgagggcctgaaggaggccgacaaggacgagttctgcagatgcgagctgaagctgcagaagtggtacggggacctgcggggaaagcccttcgccatcgaagccgagaacagcatcctggacatcagcggcttcagcaagcagtacaactgtgccttcatctggcagaaggacggcgtgaagaagctgaacctgtacctgatcatcaactacttcaagggcggcaagctgcggttcaagaagatcaaacctgaagccttcgaagccaacagattctacaccgtgatcaacaaaaagagcggcgagatcgtgcccatggaggtgaacttcaacttcgacgaccccaacctgatcatcctgcctctggcctttggcaagagacagggcagagaattcatctggaacgacctgctgtccctggaaaccggcagcctgaagctggccaacggaagagtgatcgagaagacactgtacaacagaagaacccggcaggatgagcctgccctgttcgtggccctgaccttcgagcggcgggaggtcctggactcctccaatatcaaaccaatgaacctgatcggcgtggcaagaggcgaaaacatccccgccgtgatcgccctgaccgaccccgagggctgcccactgagccggtttaaggatagcctgggaaacccaacccacatcctgagaatcggcgagagctataaggagaagcagcggaccatccaggccaagaaggaggtggagcagcggagagccggcggctacagccggaagtacgccagcaaagccaagaatctggcagacgatatggtgagaaacaccgctagagatctgctgtactacgccgtgacccaggatgccatgctgatcttcgccaacctgagccggggcttcggccggcagggcaagcggaccttcatggccgagagacagtacacacggatggaggactggctgaccgccaagctggcctacgagggcctgagcaagacctacctgtccaagacactggcccagtacacctccaagacatgcagcaactgtgggtttaccatcaccagcgccgactacgacagggtgctggagaagctgaagaagacagcaacaggctggatgaccacaattaacggcaaggagctgaaggtggagggccagattacctactacaacagatacaagagacagaacgtagtcaaggacctgtccgtcgagctggatagactgagcgaagaatctgtgaacaacgacatctcctcctggacaaagggcagaagcggagaagctctgagcctcctgaagaaaagattctcccatagacccgtgcaggagaagttcgtgtgcctgaactgcggcttcgagacacacgcagccgagcaagccgccctgaacatcgccagatcctggctgttcctgcggagccaggagtacaagaaataccagacaaacaagacaaccggcaacaccgataagagagccttcgtcgagacctggcagtccttttaccggaagaagcttaaggaggtgtggaaacctgccgtgcggtctggcggatctggcggaggctcctatggtgcaggagagcgtgaccttcaaggacgtggccgtgctgttcacccaggaggagtggggccagctgagccccgcccagagggccctgtacagggacgtgatgctggagaactacagcaacctggtgagcctgggcctgctgggccccaagcccgacatgttcagccagctggagaagagggaggtgtggatgcccgaggacacccccggcggcttctgcctggactggatgaccatgcccggatctggctccggcagcggccccaagaaaaagagaaaagtctaagctgccttctgcggggcttgccttctggccatgcccttcttctctcccttgcacctgtacctcttggtctttgaataaagcctgagtaggaaggctagcaaaaaaaaaaaaaaaaaaaaaaaaaaaaaaaaaaaaaaaaaaaaaaaaaaaaaaaaaaaaaaaaaaaaaaaaaaaaaaaa

SEQ ID NO: 15882 - RNA, 9485 nt, synthetic construct
  source 1..9485: mol_type = other RNA
aggaaataagagagaaaagaagagtaagaagaaatataagagccaccatggcccctaagaagaagcgtaaagtgagccggatggaacgcctcgtctacgaggtgcggcagaagtgcagaaacatcgaggacatctgcatctcctgcggatctctgaacgtgaccctggagcacccactgttcatcggcggcatgtgccagaactgtaaaaactgttttctggagtgtgcctatcaatacgacgatgacggctaccagagctactgcaccatctgttgcggcggaagagaggtgctgatgtgtggaaataacaactgctgccggtgcttctgcgtggaatgcgtggacctgctggtgggccccggcgccgcccaggccgctattaaggaagatccttggaactgctacatgtgcggccacaagggcacatacggcctgctgagacggagagaggactggcctagcagactgcagatgttcttcgccaataaccacgaccaggagttcgacccccctaaggtgtaccctcccgtccccgccgagaagagaaagcccatccgggtcctgagcctgttcgatggcatcgccaccggtctgctggtgctgaaggacctgggcatccaggtggataggtacattgcctccgaggtgtgcgaggactccatcaccgtgggaatggtgcgtcatcagggcaagatcatgtacgtgggcgacgtgcggagcgtgacacagaagcatatccaggagtggggccctttcgacctggtgatcggcggcagcccttgcaatgacctgagcatcgtgaacccagcccggaagggcctgtacgagggaaccggcagactgttcttcgagttttacagactgctgcacgacgcccggcctaaggaaggcgacgaccggcccttcttttggctgttcgagaatgtggtggccatgggagtcagcgacaagcgggatattagccggttcctggagagcaaccccgtgatgatcgatgccaaggaagtgagcgccgcccaccgggccagatacttctggggcaatctgcctggcatgaacagacccctggccagcaccgtgaacgacaagctggagctgcaggagtgcctggagcacggccggatcgccaagttcagcaaggtgagaaccatcaccacccgaagcaacagcatcaaacaaggcaaggaccagcactttcctgtgttcatgaacgagaaggaggacatcctgtggtgtaccgagatggagagagtgttcgggttcccagtccactacacagatgtcagcaacatgtctagactggccagacagagactgctgggaagaagctggtccgtccctgtgatcagacacctgttcgcccctctgaaggagtacttcgcctgcgtgagcagcggcaacagcaacgccaacagccggggccccagcttctctagcggcctggtgccactgtccctgagagggagccacatgggccccatggagatctacaaaaccgtgagcgcctggaagcggcagcctgtgcgcgtgctgagcctgtttcggaatatcgataaagtcctgaaaagcctgggattcctggagagcggctctggctccggcggtggcaccctgaagtacgtggaggatgtgacaaacgtggtcagacgggatgtggagaagtggggccccttcgatctggtgtacggcagcacccaacccctgggcagctcttgtgaccggtgccctggctggtacatgtttcagttccaccggatcctgcagtacgccctgccgagacaggagtcccagcggccattcttttggattttcatggacaacttgctgctgaccgaggatgaccaggaaactaccactcggttcctgcagaccgaagccgtgaccctgcaggacgtgagaggccgggactaccagaacgccatgcgggtgtggtccaacatccctggactgaaaagcaagcacgcacctctgacccctaaagaagaggagtacctgcaggcccaggtgcggagcagaagcaagctggacgcccctaaggtggatctgctggtgaagaattgcctcctgcccctgagagagtacttcaagtatttcagccagaatagtctgcccctgggaggcagcggcggcggcgccctggtgacatttgaggacgtcgccgtgcggttcacccaggaggaatgggctctgctggatccttctcagaaaatcctgtaccgggacgtgatgagagagacataccggaatctgacctccgtgggcatcaactgggaatgttgggaccttgaagcctgcttcagaagcctgggaagaaacctgagagtgcaggtggtgaagagaaagtgcgagctgaccaacagcggcccctgcgccgagggcggcccaagcagcggcgcccctcctcccagcggcggcagcccagccggctccccaacctctaccgaggagggcacctctgagtccgccacccccgagagcggccctggcacctccaccgagcccagcgagggcagcgcacccggcagccctgccggcagccccacctccacagaggagggaaccagcaccgagcccagcgaaggcagcgccccaggcaccagcaccgagcctagtgagcaggagattaaacggatcaacaagatcagaagaagacttgtgaaagacagcaacaccaagaaggccggcaagacaggccccatgaaaaccctgctggttagagtgatgacacccgatctgagagagcggctggaaaacctgagaaagaagcctgaaaatatcccccagcccatcagcaatacatctagagccaacctgaataagctgctgaccgattacaccgaaatgaagaaggcgatcctgcatgtgtactgggaagagttccagaaggaccctgtgggcctgatgagccgggtggcccagcctgccagcaagaagatcgatcagaacaagctgaaacctgagatggacgagaagggcaacctgaccaccgccggctttgcctgctctcagtgtggccagcccctgttcgtgtacaagctggagcaggtgtctgagaagggcaaggcttacaccaactacttcggacggtgcaatgtggccgagcacgaaaagctgatcctgctggcccagctgaagcccgagaaggatagcgacgaagccgtgacatatagcctgggaaagtttgggcagagggccctggatttctacagcattcatgtgaccaaggagtccacccaccccgtgaagcccctggcccagatcgccggaaacagatacgcctccggacctgtgggaaaggccctgagcgacgcatgtatgggcacaatcgcctccttcctgtctaagtaccaggacatcatcatcgaacaccagaaggtggtgaagggcaaccagaagagactggagagcctgcgggagctggccggcaaggaaaacctggaataccctagcgtgaccctgccacctcagcctcacaccaaggagggcgttgatgcctacaacgaagtgatcgcccgggtgcgaatgtgggtgaacctgaacctgtggcagaagctgaagctaagcagagatgatgccaagcctctgctgagactgaagggattcccttcctttcctctggtcgagagacaggccaacgaagtggactggtgggacatggtgtgtaacgtgaagaagctgatcaacgagaaaaaggaggatggcaaggtgttttggcagaatctggctggctacaagagacaggaagccctgagaccatacctgagcagcgaggaagatcggaagaagggaaagaaattcgctcggtaccagctgggcgacctgctgctgcacctggaaaagaagcacggcgaggactggggaaaggtgtacgacgaggcctgggagcggattgacaagaaagtggaaggcctgagcaagcacatcaagctggaagaggaacggagaagcgaggacgcccagagcaaggccgccctgaccgactggctgcgggctaaggccagcttcgtgatcgagggcctgaaggaggccgacaaggacgagttctgcagatgcgagctgaagctgcagaagtggtacggggacctgcggggaaagcccttcgccatcgaagccgagaacagcatcctggacatcagcggcttcagcaagcagtacaactgtgccttcatctggcagaaggacggcgtgaagaagctgaacctgtacctgatcatcaactacttcaagggcggcaagctgcggttcaagaagatcaaacctgaagccttcgaagccaacagattctacaccgtgatcaacaaaaagagcggcgagatcgtgcccatggaggtgaacttcaacttcgacgaccccaacctgatcatcctgcctctggcctttggcaagagacagggcagagaattcatctggaacgacctgctgtccctggaaaccggcagcctgaagctggccaacggaagagtgatcgagaagacactgtacaacagaagaacccggcaggatgagcctgccctgttcgtggccctgaccttcgagcggcgggaggtcctggactcctccaatatcaaaccaatgaacctgatcggcgtggcaagaggcgaaaacatccccgccgtgatcgccctgaccgaccccgagggctgcccactgagccggtttaaggatagcctgggaaacccaacccacatcctgagaatcggcgagagctataaggagaagcagcggaccatccaggccaagaaggaggtggagcagcggagagccggcggctacagccggaagtacgccagcaaagccaagaatctggcagacgatatggtgagaaacaccgctagagatctgctgtactacgccgtgacccaggatgccatgctgatcttcgccaacctgagccggggcttcggccggcagggcaagcggaccttcatggccgagagacagtacacacggatggaggactggctgaccgccaagctggcctacgagggcctgagcaagacctacctgtccaagacactggcccagtacacctccaagacatgcagcaactgtgggtttaccatcaccagcgccgactacgacagggtgctggagaagctgaagaagacagcaacaggctggatgaccacaattaacggcaaggagctgaaggtggagggccagattacctactacaacagatacaagagacagaacgtagtcaaggacctgtccgtcgagctggatagactgagcgaagaatctgtgaacaacgacatctcctcctggacaaagggcagaagcggagaagctctgagcctcctgaagaaaagattctcccatagacccgtgcaggagaagttcgtgtgcctgaactgcggcttcgagacacacgcagccgagcaagccgccctgaacatcgccagatcctggctgttcctgcggagccaggagtacaagaaataccagacaaacaagacaaccggcaacaccgataagagagccttcgtcgagacctggcagtccttttaccggaagaagcttaaggaggtgtggaaacctgccgtgcggtctggcggatctggcggaggctccaccagcgagcccgtgagcttcgccgacgtggccgtgtacttcagccaggaggagtggggctgcctgcagcccgcccagagggccctgtacagggacgtgatgagggagacctacggccacctgggcgccctgggcttcaggggcaccaagcccgccctgatcagctgggtggaggaggaggccgagctgtggggccccgacgccggcccccccgagatgggcgagtgcctgaccgaggccgacggcggcccaagcagcggcgcccctcctcccagcggcggcagcccagccggctccccaacctctaccgaggagggcacctctgagtccgccacccccgagagcggccctggcacctccaccgagcccagcgagggcagcgcacccggcagccctgccggcagccccacctccacagaggagggaaccagcaccgagcccagcgaaggcagcgccccaggcaccagcaccgagcctagtgagcaggagattaaacggatcaacaagatcagaagaagacttgtgaaagacagcaacaccaagaaggccggcaagacaggccccatgaaaaccctgctggttagagtgatgacacccgatctgagagagcggctggaaaacctgagaaagaagcctgaaaatatcccccagcccatcagcaatacatctagagccaacctgaataagctgctgaccgattacaccgaaatgaagaaggcgatcctgcatgtgtactgggaagagttccagaaggaccctgtgggcctgatgagccgggtggcccagcctgccagcaagaagatcgatcagaacaagctgaaacctgagatggacgagaagggcaacctgaccaccgccggctttgcctgctctcagtgtggccagcccctgttcgtgtacaagctggagcaggtgtctgagaagggcaaggcttacaccaactacttcggacggtgcaatgtggccgagcacgaaaagctgatcctgctggcccagctgaagcccgagaaggatagcgacgaagccgtgacatatagcctgggaaagtttgggcagagggccctggatttctacagcattcatgtgaccaaggagtccacccaccccgtgaagcccctggcccagatcgccggaaacagatacgcctccggacctgtgggaaaggccctgagcgacgcatgtatgggcacaatcgcctccttcctgtctaagtaccaggacatcatcatcgaacaccagaaggtggtgaagggcaaccagaagagactggagagcctgcgggagctggccggcaaggaaaacctggaataccctagcgtgaccctgccacctcagcctcacaccaaggagggcgttgatgcctacaacgaagtgatcgcccgggtgcgaatgtgggtgaacctgaacctgtggcagaagctgaagctaagcagagatgatgccaagcctctgctgagactgaagggattcccttcctttcctctggtcgagagacaggccaacgaagtggactggtgggacatggtgtgtaacgtgaagaagctgatcaacgagaaaaaggaggatggcaaggtgttttggcagaatctggctggctacaagagacaggaagccctgagaccatacctgagcagcgaggaagatcggaagaagggaaagaaattcgctcggtaccagctgggcgacctgctgctgcacctggaaaagaagcacggcgaggactggggaaaggtgtacgacgaggcctgggagcggattgacaagaaagtggaaggcctgagcaagcacatcaagctggaagaggaacggagaagcgaggacgcccagagcaaggccgccctgaccgactggctgcgggctaaggccagcttcgtgatcgagggcctgaaggaggccgacaaggacgagttctgcagatgcgagctgaagctgcagaagtggtacggggacctgcggggaaagcccttcgccatcgaagccgagaacagcatcctggacatcagcggcttcagcaagcagtacaactgtgccttcatctggcagaaggacggcgtgaagaagctgaacctgtacctgatcatcaactacttcaagggcggcaagctgcggttcaagaagatcaaacctgaagccttcgaagccaacagattctacaccgtgatcaacaaaaagagcggcgagatcgtgcccatggaggtgaacttcaacttcgacgaccccaacctgatcatcctgcctctggcctttggcaagagacagggcagagaattcatctggaacgacctgctgtccctggaaaccggcagcctgaagctggccaacggaagagtgatcgagaagacactgtacaacagaagaacccggcaggatgagcctgccctgttcgtggccctgaccttcgagcggcgggaggtcctggactcctccaatatcaaaccaatgaacctgatcggcgtggcaagaggcgaaaacatccccgccgtgatcgccctgaccgaccccgagggctgcccactgagccggtttaaggatagcctgggaaacccaacccacatcctgagaatcggcgagagctataaggagaagcagcggaccatccaggccaagaaggaggtggagcagcggagagccggcggctacagccggaagtacgccagcaaagccaagaatctggcagacgatatggtgagaaacaccgctagagatctgctgtactacgccgtgacccaggatgccatgctgatcttcgccaacctgagccggggcttcggccggcagggcaagcggaccttcatggccgagagacagtacacacggatggaggactggctgaccgccaagctggcctacgagggcctgagcaagacctacctgtccaagacactggcccagtacacctccaagacatgcagcaactgtgggtttaccatcaccagcgccgactacgacagggtgctggagaagctgaagaagacagcaacaggctggatgaccacaattaacggcaaggagctgaaggtggagggccagattacctactacaacagatacaagagacagaacgtagtcaaggacctgtccgtcgagctggatagactgagcgaagaatctgtgaacaacgacatctcctcctggacaaagggcagaagcggagaagctctgagcctcctgaagaaaagattctcccatagacccgtgcaggagaagttcgtgtgcctgaactgcggcttcgagacacacgcagccgagcaagccgccctgaacatcgccagatcctggctgttcctgcggagccaggagtacaagaaataccagacaaacaagacaaccggcaacaccgataagagagccttcgtcgagacctggcagtccttttaccggaagaagcttaaggaggtgtggaaacctgccgtgcggtctggcggatctggcggaggctcctaccagcgagcccgtgagcttcgccgacgtggccgtgtacttcagccaggaggagtggggctgcctgcagcccgcccagagggccctgtacagggacgtgatgagggagacctacggccacctgggcgccctgggcttcaggggcaccaagcccgccctgatcagctgggtggaggaggaggccgagctgtggggccccgacgccggcccccccgagatgggcgagtgcctgaccgaggccgacggatctggctccggcagcggccccaagaaaaagagaaaagtctaagctgccttctgcggggcttgccttctggccatgcccttcttctctcccttgcacctgtacctcttggtctttgaataaagcctgagtaggaaggctagcaaaaaaaaaaaaaaaaaaaaaaaaaaaaaaaaaaaaaaaaaaaaaaaaaaaaaaaaaaaaaaaaaaaaaaaaaaaaaaaa

SEQ ID NO: 15883 - RNA, 9485 nt, synthetic construct
  source 1..9485: mol_type = other RNA
aggaaataagagagaaaagaagagtaagaagaaatataagagccaccatggcccctaagaagaagcgtaaagtgagccggatggaacgcctcgtctacgaggtgcggcagaagtgcagaaacatcgaggacatctgcatctcctgcggatctctgaacgtgaccctggagcacccactgttcatcggcggcatgtgccagaactgtaaaaactgttttctggagtgtgcctatcaatacgacgatgacggctaccagagctactgcaccatctgttgcggcggaagagaggtgctgatgtgtggaaataacaactgctgccggtgcttctgcgtggaatgcgtggacctgctggtgggccccggcgccgcccaggccgctattaaggaagatccttggaactgctacatgtgcggccacaagggcacatacggcctgctgagacggagagaggactggcctagcagactgcagatgttcttcgccaataaccacgaccaggagttcgacccccctaaggtgtaccctcccgtccccgccgagaagagaaagcccatccgggtcctgagcctgttcgatggcatcgccaccggtctgctggtgctgaaggacctgggcatccaggtggataggtacattgcctccgaggtgtgcgaggactccatcaccgtgggaatggtgcgtcatcagggcaagatcatgtacgtgggcgacgtgcggagcgtgacacagaagcatatccaggagtggggccctttcgacctggtgatcggcggcagcccttgcaatgacctgagcatcgtgaacccagcccggaagggcctgtacgagggaaccggcagactgttcttcgagttttacagactgctgcacgacgcccggcctaaggaaggcgacgaccggcccttcttttggctgttcgagaatgtggtggccatgggagtcagcgacaagcgggatattagccggttcctggagagcaaccccgtgatgatcgatgccaaggaagtgagcgccgcccaccgggccagatacttctggggcaatctgcctggcatgaacagacccctggccagcaccgtgaacgacaagctggagctgcaggagtgcctggagcacggccggatcgccaagttcagcaaggtgagaaccatcaccacccgaagcaacagcatcaaacaaggcaaggaccagcactttcctgtgttcatgaacgagaaggaggacatcctgtggtgtaccgagatggagagagtgttcgggttcccagtccactacacagatgtcagcaacatgtctagactggccagacagagactgctgggaagaagctggtccgtccctgtgatcagacacctgttcgcccctctgaaggagtacttcgcctgcgtgagcagcggcaacagcaacgccaacagccggggccccagcttctctagcggcctggtgccactgtccctgagagggagccacatgggccccatggagatctacaaaaccgtgagcgcctggaagcggcagcctgtgcgcgtgctgagcctgtttcggaatatcgataaagtcctgaaaagcctgggattcctggagagcggctctggctccggcggtggcaccctgaagtacgtggaggatgtgacaaacgtggtcagacgggatgtggagaagtggggccccttcgatctggtgtacggcagcacccaacccctgggcagctcttgtgaccggtgccctggctggtacatgtttcagttccaccggatcctgcagtacgccctgccgagacaggagtcccagcggccattcttttggattttcatggacaacttgctgctgaccgaggatgaccaggaaactaccactcggttcctgcagaccgaagccgtgaccctgcaggacgtgagaggccgggactaccagaacgccatgcgggtgtggtccaacatccctggactgaaaagcaagcacgcacctctgacccctaaagaagaggagtacctgcaggcccaggtgcggagcagaagcaagctggacgcccctaaggtggatctgctggtgaagaattgcctcctgcccctgagagagtacttcaagtatttcagccagaatagtctgcccctgggaggcagcggcggcggcgccctggtgacatttgaggacgtcgccgtgcggttcacccaggaggaatgggctctgctggatccttctcagaaaatcctgtaccgggacgtgatgagagagacataccggaatctgacctccgtgggcatcaactgggaatgttgggaccttgaagcctgcttcagaagcctgggaagaaacctgagagtgcaggtggtgaagagaaagtgcgagctgaccaacagcggcccctgcgccgagggcggcccaagcagcggcgcccctcctcccagcggcggcagcccagccggctccccaacctctaccgaggagggcacctctgagtccgccacccccgagagcggccctggcacctccaccgagcccagcgagggcagcgcacccggcagccctgccggcagccccacctccacagaggagggaaccagcaccgagcccagcgaaggcagcgccccaggcaccagcaccgagcctagtgagcaggagattaaacggatcaacaagatcagaagaagacttgtgaaagacagcaacaccaagaaggccggcaagacaggccccatgaaaaccctgctggttagagtgatgacacccgatctgagagagcggctggaaaacctgagaaagaagcctgaaaatatcccccagcccatcagcaatacatctagagccaacctgaataagctgctgaccgattacaccgaaatgaagaaggcgatcctgcatgtgtactgggaagagttccagaaggaccctgtgggcctgatgagccgggtggcccagcctgccagcaagaagatcgatcagaacaagctgaaacctgagatggacgagaagggcaacctgaccaccgccggctttgcctgctctcagtgtggccagcccctgttcgtgtacaagctggagcaggtgtctgagaagggcaaggcttacaccaactacttcggacggtgcaatgtggccgagcacgaaaagctgatcctgctggcccagctgaagcccgagaaggatagcgacgaagccgtgacatatagcctgggaaagtttgggcagagggccctggatttctacagcattcatgtgaccaaggagtccacccaccccgtgaagcccctggcccagatcgccggaaacagatacgcctccggacctgtgggaaaggccctgagcgacgcatgtatgggcacaatcgcctccttcctgtctaagtaccaggacatcatcatcgaacaccagaaggtggtgaagggcaaccagaagagactggagagcctgcgggagctggccggcaaggaaaacctggaataccctagcgtgaccctgccacctcagcctcacaccaaggagggcgttgatgcctacaacgaagtgatcgcccgggtgcgaatgtgggtgaacctgaacctgtggcagaagctgaagctaagcagagatgatgccaagcctctgctgagactgaagggattcccttcctttcctctggtcgagagacaggccaacgaagtggactggtgggacatggtgtgtaacgtgaagaagctgatcaacgagaaaaaggaggatggcaaggtgttttggcagaatctggctggctacaagagacaggaagccctgagaccatacctgagcagcgaggaagatcggaagaagggaaagaaattcgctcggtaccagctgggcgacctgctgctgcacctggaaaagaagcacggcgaggactggggaaaggtgtacgacgaggcctgggagcggattgacaagaaagtggaaggcctgagcaagcacatcaagctggaagaggaacggagaagcgaggacgcccagagcaaggccgccctgaccgactggctgcgggctaaggccagcttcgtgatcgagggcctgaaggaggccgacaaggacgagttctgcagatgcgagctgaagctgcagaagtggtacggggacctgcggggaaagcccttcgccatcgaagccgagaacagcatcctggacatcagcggcttcagcaagcagtacaactgtgccttcatctggcagaaggacggcgtgaagaagctgaacctgtacctgatcatcaactacttcaagggcggcaagctgcggttcaagaagatcaaacctgaagccttcgaagccaacagattctacaccgtgatcaacaaaaagagcggcgagatcgtgcccatggaggtgaacttcaacttcgacgaccccaacctgatcatcctgcctctggcctttggcaagagacagggcagagaattcatctggaacgacctgctgtccctggaaaccggcagcctgaagctggccaacggaagagtgatcgagaagacactgtacaacagaagaacccggcaggatgagcctgccctgttcgtggccctgaccttcgagcggcgggaggtcctggactcctccaatatcaaaccaatgaacctgatcggcgtggcaagaggcgaaaacatccccgccgtgatcgccctgaccgaccccgagggctgcccactgagccggtttaaggatagcctgggaaacccaacccacatcctgagaatcggcgagagctataaggagaagcagcggaccatccaggccaagaaggaggtggagcagcggagagccggcggctacagccggaagtacgccagcaaagccaagaatctggcagacgatatggtgagaaacaccgctagagatctgctgtactacgccgtgacccaggatgccatgctgatcttcgccaacctgagccggggcttcggccggcagggcaagcggaccttcatggccgagagacagtacacacggatggaggactggctgaccgccaagctggcctacgagggcctgagcaagacctacctgtccaagacactggcccagtacacctccaagacatgcagcaactgtgggtttaccatcaccagcgccgactacgacagggtgctggagaagctgaagaagacagcaacaggctggatgaccacaattaacggcaaggagctgaaggtggagggccagattacctactacaacagatacaagagacagaacgtagtcaaggacctgtccgtcgagctggatagactgagcgaagaatctgtgaacaacgacatctcctcctggacaaagggcagaagcggagaagctctgagcctcctgaagaaaagattctcccatagacccgtgcaggagaagttcgtgtgcctgaactgcggcttcgagacacacgcagccgagcaagccgccctgaacatcgccagatcctggctgttcctgcggagccaggagtacaagaaataccagacaaacaagacaaccggcaacaccgataagagagccttcgtcgagacctggcagtccttttaccggaagaagcttaaggaggtgtggaaacctgccgtgcggtctggcggatctggcggaggctccgcccagaccctgctgaccttcagggacgtggccatcgagttcagcctggaggagtggaagtgcctggacctggcccagcagaacctgtacagggacgtgatgctggagaactacaggaacctgttcagcgtgggcctgaccgtgagcaagcccggcctgatcacctgcctggagcagaggaaggagccctggaacgtgaagaggcaggaggccgccgacggccaccccgccatgagcagctgcggcggcccaagcagcggcgcccctcctcccagcggcggcagcccagccggctccccaacctctaccgaggagggcacctctgagtccgccacccccgagagcggccctggcacctccaccgagcccagcgagggcagcgcacccggcagccctgccggcagccccacctccacagaggagggaaccagcaccgagcccagcgaaggcagcgccccaggcaccagcaccgagcctagtgagcaggagattaaacggatcaacaagatcagaagaagacttgtgaaagacagcaacaccaagaaggccggcaagacaggccccatgaaaaccctgctggttagagtgatgacacccgatctgagagagcggctggaaaacctgagaaagaagcctgaaaatatcccccagcccatcagcaatacatctagagccaacctgaataagctgctgaccgattacaccgaaatgaagaaggcgatcctgcatgtgtactgggaagagttccagaaggaccctgtgggcctgatgagccgggtggcccagcctgccagcaagaagatcgatcagaacaagctgaaacctgagatggacgagaagggcaacctgaccaccgccggctttgcctgctctcagtgtggccagcccctgttcgtgtacaagctggagcaggtgtctgagaagggcaaggcttacaccaactacttcggacggtgcaatgtggccgagcacgaaaagctgatcctgctggcccagctgaagcccgagaaggatagcgacgaagccgtgacatatagcctgggaaagtttgggcagagggccctggatttctacagcattcatgtgaccaaggagtccacccaccccgtgaagcccctggcccagatcgccggaaacagatacgcctccggacctgtgggaaaggccctgagcgacgcatgtatgggcacaatcgcctccttcctgtctaagtaccaggacatcatcatcgaacaccagaaggtggtgaagggcaaccagaagagactggagagcctgcgggagctggccggcaaggaaaacctggaataccctagcgtgaccctgccacctcagcctcacaccaaggagggcgttgatgcctacaacgaagtgatcgcccgggtgcgaatgtgggtgaacctgaacctgtggcagaagctgaagctaagcagagatgatgccaagcctctgctgagactgaagggattcccttcctttcctctggtcgagagacaggccaacgaagtggactggtgggacatggtgtgtaacgtgaagaagctgatcaacgagaaaaaggaggatggcaaggtgttttggcagaatctggctggctacaagagacaggaagccctgagaccatacctgagcagcgaggaagatcggaagaagggaaagaaattcgctcggtaccagctgggcgacctgctgctgcacctggaaaagaagcacggcgaggactggggaaaggtgtacgacgaggcctgggagcggattgacaagaaagtggaaggcctgagcaagcacatcaagctggaagaggaacggagaagcgaggacgcccagagcaaggccgccctgaccgactggctgcgggctaaggccagcttcgtgatcgagggcctgaaggaggccgacaaggacgagttctgcagatgcgagctgaagctgcagaagtggtacggggacctgcggggaaagcccttcgccatcgaagccgagaacagcatcctggacatcagcggcttcagcaagcagtacaactgtgccttcatctggcagaaggacggcgtgaagaagctgaacctgtacctgatcatcaactacttcaagggcggcaagctgcggttcaagaagatcaaacctgaagccttcgaagccaacagattctacaccgtgatcaacaaaaagagcggcgagatcgtgcccatggaggtgaacttcaacttcgacgaccccaacctgatcatcctgcctctggcctttggcaagagacagggcagagaattcatctggaacgacctgctgtccctggaaaccggcagcctgaagctggccaacggaagagtgatcgagaagacactgtacaacagaagaacccggcaggatgagcctgccctgttcgtggccctgaccttcgagcggcgggaggtcctggactcctccaatatcaaaccaatgaacctgatcggcgtggcaagaggcgaaaacatccccgccgtgatcgccctgaccgaccccgagggctgcccactgagccggtttaaggatagcctgggaaacccaacccacatcctgagaatcggcgagagctataaggagaagcagcggaccatccaggccaagaaggaggtggagcagcggagagccggcggctacagccggaagtacgccagcaaagccaagaatctggcagacgatatggtgagaaacaccgctagagatctgctgtactacgccgtgacccaggatgccatgctgatcttcgccaacctgagccggggcttcggccggcagggcaagcggaccttcatggccgagagacagtacacacggatggaggactggctgaccgccaagctggcctacgagggcctgagcaagacctacctgtccaagacactggcccagtacacctccaagacatgcagcaactgtgggtttaccatcaccagcgccgactacgacagggtgctggagaagctgaagaagacagcaacaggctggatgaccacaattaacggcaaggagctgaaggtggagggccagattacctactacaacagatacaagagacagaacgtagtcaaggacctgtccgtcgagctggatagactgagcgaagaatctgtgaacaacgacatctcctcctggacaaagggcagaagcggagaagctctgagcctcctgaagaaaagattctcccatagacccgtgcaggagaagttcgtgtgcctgaactgcggcttcgagacacacgcagccgagcaagccgccctgaacatcgccagatcctggctgttcctgcggagccaggagtacaagaaataccagacaaacaagacaaccggcaacaccgataagagagccttcgtcgagacctggcagtccttttaccggaagaagcttaaggaggtgtggaaacctgccgtgcggtctggcggatctggcggaggctcctgcccagaccctgctgaccttcagggacgtggccatcgagttcagcctggaggagtggaagtgcctggacctggcccagcagaacctgtacagggacgtgatgctggagaactacaggaacctgttcagcgtgggcctgaccgtgagcaagcccggcctgatcacctgcctggagcagaggaaggagccctggaacgtgaagaggcaggaggccgccgacggccaccccgccatgagcagctgcggatctggctccggcagcggccccaagaaaaagagaaaagtctaagctgccttctgcggggcttgccttctggccatgcccttcttctctcccttgcacctgtacctcttggtctttgaataaagcctgagtaggaaggctagcaaaaaaaaaaaaaaaaaaaaaaaaaaaaaaaaaaaaaaaaaaaaaaaaaaaaaaaaaaaaaaaaaaaaaaaaaaaaaaaa

SEQ ID NO: 15884 - RNA, 9485 nt, synthetic construct
  source 1..9485: mol_type = other RNA
aggaaataagagagaaaagaagagtaagaagaaatataagagccaccatggcccctaagaagaagcgtaaagtgagccggatggaacgcctcgtctacgaggtgcggcagaagtgcagaaacatcgaggacatctgcatctcctgcggatctctgaacgtgaccctggagcacccactgttcatcggcggcatgtgccagaactgtaaaaactgttttctggagtgtgcctatcaatacgacgatgacggctaccagagctactgcaccatctgttgcggcggaagagaggtgctgatgtgtggaaataacaactgctgccggtgcttctgcgtggaatgcgtggacctgctggtgggccccggcgccgcccaggccgctattaaggaagatccttggaactgctacatgtgcggccacaagggcacatacggcctgctgagacggagagaggactggcctagcagactgcagatgttcttcgccaataaccacgaccaggagttcgacccccctaaggtgtaccctcccgtccccgccgagaagagaaagcccatccgggtcctgagcctgttcgatggcatcgccaccggtctgctggtgctgaaggacctgggcatccaggtggataggtacattgcctccgaggtgtgcgaggactccatcaccgtgggaatggtgcgtcatcagggcaagatcatgtacgtgggcgacgtgcggagcgtgacacagaagcatatccaggagtggggccctttcgacctggtgatcggcggcagcccttgcaatgacctgagcatcgtgaacccagcccggaagggcctgtacgagggaaccggcagactgttcttcgagttttacagactgctgcacgacgcccggcctaaggaaggcgacgaccggcccttcttttggctgttcgagaatgtggtggccatgggagtcagcgacaagcgggatattagccggttcctggagagcaaccccgtgatgatcgatgccaaggaagtgagcgccgcccaccgggccagatacttctggggcaatctgcctggcatgaacagacccctggccagcaccgtgaacgacaagctggagctgcaggagtgcctggagcacggccggatcgccaagttcagcaaggtgagaaccatcaccacccgaagcaacagcatcaaacaaggcaaggaccagcactttcctgtgttcatgaacgagaaggaggacatcctgtggtgtaccgagatggagagagtgttcgggttcccagtccactacacagatgtcagcaacatgtctagactggccagacagagactgctgggaagaagctggtccgtccctgtgatcagacacctgttcgcccctctgaaggagtacttcgcctgcgtgagcagcggcaacagcaacgccaacagccggggccccagcttctctagcggcctggtgccactgtccctgagagggagccacatgggccccatggagatctacaaaaccgtgagcgcctggaagcggcagcctgtgcgcgtgctgagcctgtttcggaatatcgataaagtcctgaaaagcctgggattcctggagagcggctctggctccggcggtggcaccctgaagtacgtggaggatgtgacaaacgtggtcagacgggatgtggagaagtggggccccttcgatctggtgtacggcagcacccaacccctgggcagctcttgtgaccggtgccctggctggtacatgtttcagttccaccggatcctgcagtacgccctgccgagacaggagtcccagcggccattcttttggattttcatggacaacttgctgctgaccgaggatgaccaggaaactaccactcggttcctgcagaccgaagccgtgaccctgcaggacgtgagaggccgggactaccagaacgccatgcgggtgtggtccaacatccctggactgaaaagcaagcacgcacctctgacccctaaagaagaggagtacctgcaggcccaggtgcggagcagaagcaagctggacgcccctaaggtggatctgctggtgaagaattgcctcctgcccctgagagagtacttcaagtatttcagccagaatagtctgcccctgggaggcagcggcggcggcgccctggtgacatttgaggacgtcgccgtgcggttcacccaggaggaatgggctctgctggatccttctcagaaaatcctgtaccgggacgtgatgagagagacataccggaatctgacctccgtgggcatcaactgggaatgttgggaccttgaagcctgcttcagaagcctgggaagaaacctgagagtgcaggtggtgaagagaaagtgcgagctgaccaacagcggcccctgcgccgagggcggcccaagcagcggcgcccctcctcccagcggcggcagcccagccggctccccaacctctaccgaggagggcacctctgagtccgccacccccgagagcggccctggcacctccaccgagcccagcgagggcagcgcacccggcagccctgccggcagccccacctccacagaggagggaaccagcaccgagcccagcgaaggcagcgccccaggcaccagcaccgagcctagtgagcaggagattaaacggatcaacaagatcagaagaagacttgtgaaagacagcaacaccaagaaggccggcaagacaggccccatgaaaaccctgctggttagagtgatgacacccgatctgagagagcggctggaaaacctgagaaagaagcctgaaaatatcccccagcccatcagcaatacatctagagccaacctgaataagctgctgaccgattacaccgaaatgaagaaggcgatcctgcatgtgtactgggaagagttccagaaggaccctgtgggcctgatgagccgggtggcccagcctgccagcaagaagatcgatcagaacaagctgaaacctgagatggacgagaagggcaacctgaccaccgccggctttgcctgctctcagtgtggccagcccctgttcgtgtacaagctggagcaggtgtctgagaagggcaaggcttacaccaactacttcggacggtgcaatgtggccgagcacgaaaagctgatcctgctggcccagctgaagcccgagaaggatagcgacgaagccgtgacatatagcctgggaaagtttgggcagagggccctggatttctacagcattcatgtgaccaaggagtccacccaccccgtgaagcccctggcccagatcgccggaaacagatacgcctccggacctgtgggaaaggccctgagcgacgcatgtatgggcacaatcgcctccttcctgtctaagtaccaggacatcatcatcgaacaccagaaggtggtgaagggcaaccagaagagactggagagcctgcgggagctggccggcaaggaaaacctggaataccctagcgtgaccctgccacctcagcctcacaccaaggagggcgttgatgcctacaacgaagtgatcgcccgggtgcgaatgtgggtgaacctgaacctgtggcagaagctgaagctaagcagagatgatgccaagcctctgctgagactgaagggattcccttcctttcctctggtcgagagacaggccaacgaagtggactggtgggacatggtgtgtaacgtgaagaagctgatcaacgagaaaaaggaggatggcaaggtgttttggcagaatctggctggctacaagagacaggaagccctgagaccatacctgagcagcgaggaagatcggaagaagggaaagaaattcgctcggtaccagctgggcgacctgctgctgcacctggaaaagaagcacggcgaggactggggaaaggtgtacgacgaggcctgggagcggattgacaagaaagtggaaggcctgagcaagcacatcaagctggaagaggaacggagaagcgaggacgcccagagcaaggccgccctgaccgactggctgcgggctaaggccagcttcgtgatcgagggcctgaaggaggccgacaaggacgagttctgcagatgcgagctgaagctgcagaagtggtacggggacctgcggggaaagcccttcgccatcgaagccgagaacagcatcctggacatcagcggcttcagcaagcagtacaactgtgccttcatctggcagaaggacggcgtgaagaagctgaacctgtacctgatcatcaactacttcaagggcggcaagctgcggttcaagaagatcaaacctgaagccttcgaagccaacagattctacaccgtgatcaacaaaaagagcggcgagatcgtgcccatggaggtgaacttcaacttcgacgaccccaacctgatcatcctgcctctggcctttggcaagagacagggcagagaattcatctggaacgacctgctgtccctggaaaccggcagcctgaagctggccaacggaagagtgatcgagaagacactgtacaacagaagaacccggcaggatgagcctgccctgttcgtggccctgaccttcgagcggcgggaggtcctggactcctccaatatcaaaccaatgaacctgatcggcgtggcaagaggcgaaaacatccccgccgtgatcgccctgaccgaccccgagggctgcccactgagccggtttaaggatagcctgggaaacccaacccacatcctgagaatcggcgagagctataaggagaagcagcggaccatccaggccaagaaggaggtggagcagcggagagccggcggctacagccggaagtacgccagcaaagccaagaatctggcagacgatatggtgagaaacaccgctagagatctgctgtactacgccgtgacccaggatgccatgctgatcttcgccaacctgagccggggcttcggccggcagggcaagcggaccttcatggccgagagacagtacacacggatggaggactggctgaccgccaagctggcctacgagggcctgagcaagacctacctgtccaagacactggcccagtacacctccaagacatgcagcaactgtgggtttaccatcaccagcgccgactacgacagggtgctggagaagctgaagaagacagcaacaggctggatgaccacaattaacggcaaggagctgaaggtggagggccagattacctactacaacagatacaagagacagaacgtagtcaaggacctgtccgtcgagctggatagactgagcgaagaatctgtgaacaacgacatctcctcctggacaaagggcagaagcggagaagctctgagcctcctgaagaaaagattctcccatagacccgtgcaggagaagttcgtgtgcctgaactgcggcttcgagacacacgcagccgagcaagccgccctgaacatcgccagatcctggctgttcctgcggagccaggagtacaagaaataccagacaaacaagacaaccggcaacaccgataagagagccttcgtcgagacctggcagtccttttaccggaagaagcttaaggaggtgtggaaacctgccgtgcggtctggcggatctggcggaggctcctgccaggagcccgtgagcttcgcccaggtggccgtgtacttcagcagggaggagtgggccctgctggaccccgcccagagggccctgtacagggacgtgatgctggagacctaccagtgcgtggccagcctggcccccctgcccgcccccaagcccgtgctgatcagccagctggagggcgaggaggacccctgcatcagcgacgtgaggagccccgaggccgtgcccggcgacctgagccccggcggcccaagcagcggcgcccctcctcccagcggcggcagcccagccggctccccaacctctaccgaggagggcacctctgagtccgccacccccgagagcggccctggcacctccaccgagcccagcgagggcagcgcacccggcagccctgccggcagccccacctccacagaggagggaaccagcaccgagcccagcgaaggcagcgccccaggcaccagcaccgagcctagtgagcaggagattaaacggatcaacaagatcagaagaagacttgtgaaagacagcaacaccaagaaggccggcaagacaggccccatgaaaaccctgctggttagagtgatgacacccgatctgagagagcggctggaaaacctgagaaagaagcctgaaaatatcccccagcccatcagcaatacatctagagccaacctgaataagctgctgaccgattacaccgaaatgaagaaggcgatcctgcatgtgtactgggaagagttccagaaggaccctgtgggcctgatgagccgggtggcccagcctgccagcaagaagatcgatcagaacaagctgaaacctgagatggacgagaagggcaacctgaccaccgccggctttgcctgctctcagtgtggccagcccctgttcgtgtacaagctggagcaggtgtctgagaagggcaaggcttacaccaactacttcggacggtgcaatgtggccgagcacgaaaagctgatcctgctggcccagctgaagcccgagaaggatagcgacgaagccgtgacatatagcctgggaaagtttgggcagagggccctggatttctacagcattcatgtgaccaaggagtccacccaccccgtgaagcccctggcccagatcgccggaaacagatacgcctccggacctgtgggaaaggccctgagcgacgcatgtatgggcacaatcgcctccttcctgtctaagtaccaggacatcatcatcgaacaccagaaggtggtgaagggcaaccagaagagactggagagcctgcgggagctggccggcaaggaaaacctggaataccctagcgtgaccctgccacctcagcctcacaccaaggagggcgttgatgcctacaacgaagtgatcgcccgggtgcgaatgtgggtgaacctgaacctgtggcagaagctgaagctaagcagagatgatgccaagcctctgctgagactgaagggattcccttcctttcctctggtcgagagacaggccaacgaagtggactggtgggacatggtgtgtaacgtgaagaagctgatcaacgagaaaaaggaggatggcaaggtgttttggcagaatctggctggctacaagagacaggaagccctgagaccatacctgagcagcgaggaagatcggaagaagggaaagaaattcgctcggtaccagctgggcgacctgctgctgcacctggaaaagaagcacggcgaggactggggaaaggtgtacgacgaggcctgggagcggattgacaagaaagtggaaggcctgagcaagcacatcaagctggaagaggaacggagaagcgaggacgcccagagcaaggccgccctgaccgactggctgcgggctaaggccagcttcgtgatcgagggcctgaaggaggccgacaaggacgagttctgcagatgcgagctgaagctgcagaagtggtacggggacctgcggggaaagcccttcgccatcgaagccgagaacagcatcctggacatcagcggcttcagcaagcagtacaactgtgccttcatctggcagaaggacggcgtgaagaagctgaacctgtacctgatcatcaactacttcaagggcggcaagctgcggttcaagaagatcaaacctgaagccttcgaagccaacagattctacaccgtgatcaacaaaaagagcggcgagatcgtgcccatggaggtgaacttcaacttcgacgaccccaacctgatcatcctgcctctggcctttggcaagagacagggcagagaattcatctggaacgacctgctgtccctggaaaccggcagcctgaagctggccaacggaagagtgatcgagaagacactgtacaacagaagaacccggcaggatgagcctgccctgttcgtggccctgaccttcgagcggcgggaggtcctggactcctccaatatcaaaccaatgaacctgatcggcgtggcaagaggcgaaaacatccccgccgtgatcgccctgaccgaccccgagggctgcccactgagccggtttaaggatagcctgggaaacccaacccacatcctgagaatcggcgagagctataaggagaagcagcggaccatccaggccaagaaggaggtggagcagcggagagccggcggctacagccggaagtacgccagcaaagccaagaatctggcagacgatatggtgagaaacaccgctagagatctgctgtactacgccgtgacccaggatgccatgctgatcttcgccaacctgagccggggcttcggccggcagggcaagcggaccttcatggccgagagacagtacacacggatggaggactggctgaccgccaagctggcctacgagggcctgagcaagacctacctgtccaagacactggcccagtacacctccaagacatgcagcaactgtgggtttaccatcaccagcgccgactacgacagggtgctggagaagctgaagaagacagcaacaggctggatgaccacaattaacggcaaggagctgaaggtggagggccagattacctactacaacagatacaagagacagaacgtagtcaaggacctgtccgtcgagctggatagactgagcgaagaatctgtgaacaacgacatctcctcctggacaaagggcagaagcggagaagctctgagcctcctgaagaaaagattctcccatagacccgtgcaggagaagttcgtgtgcctgaactgcggcttcgagacacacgcagccgagcaagccgccctgaacatcgccagatcctggctgttcctgcggagccaggagtacaagaaataccagacaaacaagacaaccggcaacaccgataagagagccttcgtcgagacctggcagtccttttaccggaagaagcttaaggaggtgtggaaacctgccgtgcggtctggcggatctggcggaggctccttgccaggagcccgtgagcttcgcccaggtggccgtgtacttcagcagggaggagtgggccctgctggaccccgcccagagggccctgtacagggacgtgatgctggagacctaccagtgcgtggccagcctggcccccctgcccgcccccaagcccgtgctgatcagccagctggagggcgaggaggacccctgcatcagcgacgtgaggagccccgaggccgtgcccggcgacctgagccccggatctggctccggcagcggccccaagaaaaagagaaaagtctaagctgccttctgcggggcttgccttctggccatgcccttcttctctcccttgcacctgtacctcttggtctttgaataaagcctgagtaggaaggctagcaaaaaaaaaaaaaaaaaaaaaaaaaaaaaaaaaaaaaaaaaaaaaaaaaaaaaaaaaaaaaaaaaaaaaaaaaaaaaaaa

SEQ ID NO: 15885 - RNA, 9551 nt, synthetic construct
  source 1..9551: mol_type = other RNA
aggaaataagagagaaaagaagagtaagaagaaatataagagccaccatggcccctaagaagaagcgtaaagtgagccggatggaacgcctcgtctacgaggtgcggcagaagtgcagaaacatcgaggacatctgcatctcctgcggatctctgaacgtgaccctggagcacccactgttcatcggcggcatgtgccagaactgtaaaaactgttttctggagtgtgcctatcaatacgacgatgacggctaccagagctactgcaccatctgttgcggcggaagagaggtgctgatgtgtggaaataacaactgctgccggtgcttctgcgtggaatgcgtggacctgctggtgggccccggcgccgcccaggccgctattaaggaagatccttggaactgctacatgtgcggccacaagggcacatacggcctgctgagacggagagaggactggcctagcagactgcagatgttcttcgccaataaccacgaccaggagttcgacccccctaaggtgtaccctcccgtccccgccgagaagagaaagcccatccgggtcctgagcctgttcgatggcatcgccaccggtctgctggtgctgaaggacctgggcatccaggtggataggtacattgcctccgaggtgtgcgaggactccatcaccgtgggaatggtgcgtcatcagggcaagatcatgtacgtgggcgacgtgcggagcgtgacacagaagcatatccaggagtggggccctttcgacctggtgatcggcggcagcccttgcaatgacctgagcatcgtgaacccagcccggaagggcctgtacgagggaaccggcagactgttcttcgagttttacagactgctgcacgacgcccggcctaaggaaggcgacgaccggcccttcttttggctgttcgagaatgtggtggccatgggagtcagcgacaagcgggatattagccggttcctggagagcaaccccgtgatgatcgatgccaaggaagtgagcgccgcccaccgggccagatacttctggggcaatctgcctggcatgaacagacccctggccagcaccgtgaacgacaagctggagctgcaggagtgcctggagcacggccggatcgccaagttcagcaaggtgagaaccatcaccacccgaagcaacagcatcaaacaaggcaaggaccagcactttcctgtgttcatgaacgagaaggaggacatcctgtggtgtaccgagatggagagagtgttcgggttcccagtccactacacagatgtcagcaacatgtctagactggccagacagagactgctgggaagaagctggtccgtccctgtgatcagacacctgttcgcccctctgaaggagtacttcgcctgcgtgagcagcggcaacagcaacgccaacagccggggccccagcttctctagcggcctggtgccactgtccctgagagggagccacatgggccccatggagatctacaaaaccgtgagcgcctggaagcggcagcctgtgcgcgtgctgagcctgtttcggaatatcgataaagtcctgaaaagcctgggattcctggagagcggctctggctccggcggtggcaccctgaagtacgtggaggatgtgacaaacgtggtcagacgggatgtggagaagtggggccccttcgatctggtgtacggcagcacccaacccctgggcagctcttgtgaccggtgccctggctggtacatgtttcagttccaccggatcctgcagtacgccctgccgagacaggagtcccagcggccattcttttggattttcatggacaacttgctgctgaccgaggatgaccaggaaactaccactcggttcctgcagaccgaagccgtgaccctgcaggacgtgagaggccgggactaccagaacgccatgcgggtgtggtccaacatccctggactgaaaagcaagcacgcacctctgacccctaaagaagaggagtacctgcaggcccaggtgcggagcagaagcaagctggacgcccctaaggtggatctgctggtgaagaattgcctcctgcccctgagagagtacttcaagtatttcagccagaatagtctgcccctgggaggcagcggcggcggcgccctggtgacatttgaggacgtcgccgtgcggttcacccaggaggaatgggctctgctggatccttctcagaaaatcctgtaccgggacgtgatgagagagacataccggaatctgacctccgtgggcatcaactgggaatgttgggaccttgaagcctgcttcagaagcctgggaagaaacctgagagtgcaggtggtgaagagaaagtgcgagctgaccaacagcggcccctgcgccgagggcggcccaagcagcggcgcccctcctcccagcggcggcagcccagccggctccccaacctctaccgaggagggcacctctgagtccgccacccccgagagcggccctggcacctccaccgagcccagcgagggcagcgcacccggcagccctgccggcagccccacctccacagaggagggaaccagcaccgagcccagcgaaggcagcgccccaggcaccagcaccgagcctagtgagcaggagattaaacggatcaacaagatcagaagaagacttgtgaaagacagcaacaccaagaaggccggcaagacaggccccatgaaaaccctgctggttagagtgatgacacccgatctgagagagcggctggaaaacctgagaaagaagcctgaaaatatcccccagcccatcagcaatacatctagagccaacctgaataagctgctgaccgattacaccgaaatgaagaaggcgatcctgcatgtgtactgggaagagttccagaaggaccctgtgggcctgatgagccgggtggcccagcctgccagcaagaagatcgatcagaacaagctgaaacctgagatggacgagaagggcaacctgaccaccgccggctttgcctgctctcagtgtggccagcccctgttcgtgtacaagctggagcaggtgtctgagaagggcaaggcttacaccaactacttcggacggtgcaatgtggccgagcacgaaaagctgatcctgctggcccagctgaagcccgagaaggatagcgacgaagccgtgacatatagcctgggaaagtttgggcagagggccctggatttctacagcattcatgtgaccaaggagtccacccaccccgtgaagcccctggcccagatcgccggaaacagatacgcctccggacctgtgggaaaggccctgagcgacgcatgtatgggcacaatcgcctccttcctgtctaagtaccaggacatcatcatcgaacaccagaaggtggtgaagggcaaccagaagagactggagagcctgcgggagctggccggcaaggaaaacctggaataccctagcgtgaccctgccacctcagcctcacaccaaggagggcgttgatgcctacaacgaagtgatcgcccgggtgcgaatgtgggtgaacctgaacctgtggcagaagctgaagctaagcagagatgatgccaagcctctgctgagactgaagggattcccttcctttcctctggtcgagagacaggccaacgaagtggactggtgggacatggtgtgtaacgtgaagaagctgatcaacgagaaaaaggaggatggcaaggtgttttggcagaatctggctggctacaagagacaggaagccctgagaccatacctgagcagcgaggaagatcggaagaagggaaagaaattcgctcggtaccagctgggcgacctgctgctgcacctggaaaagaagcacggcgaggactggggaaaggtgtacgacgaggcctgggagcggattgacaagaaagtggaaggcctgagcaagcacatcaagctggaagaggaacggagaagcgaggacgcccagagcaaggccgccctgaccgactggctgcgggctaaggccagcttcgtgatcgagggcctgaaggaggccgacaaggacgagttctgcagatgcgagctgaagctgcagaagtggtacggggacctgcggggaaagcccttcgccatcgaagccgagaacagcatcctggacatcagcggcttcagcaagcagtacaactgtgccttcatctggcagaaggacggcgtgaagaagctgaacctgtacctgatcatcaactacttcaagggcggcaagctgcggttcaagaagatcaaacctgaagccttcgaagccaacagattctacaccgtgatcaacaaaaagagcggcgagatcgtgcccatggaggtgaacttcaacttcgacgaccccaacctgatcatcctgcctctggcctttggcaagagacagggcagagaattcatctggaacgacctgctgtccctggaaaccggcagcctgaagctggccaacggaagagtgatcgagaagacactgtacaacagaagaacccggcaggatgagcctgccctgttcgtggccctgaccttcgagcggcgggaggtcctggactcctccaatatcaaaccaatgaacctgatcggcgtggcaagaggcgaaaacatccccgccgtgatcgccctgaccgaccccgagggctgcccactgagccggtttaaggatagcctgggaaacccaacccacatcctgagaatcggcgagagctataaggagaagcagcggaccatccaggccaagaaggaggtggagcagcggagagccggcggctacagccggaagtacgccagcaaagccaagaatctggcagacgatatggtgagaaacaccgctagagatctgctgtactacgccgtgacccaggatgccatgctgatcttcgccaacctgagccggggcttcggccggcagggcaagcggaccttcatggccgagagacagtacacacggatggaggactggctgaccgccaagctggcctacgagggcctgagcaagacctacctgtccaagacactggcccagtacacctccaagacatgcagcaactgtgggtttaccatcaccagcgccgactacgacagggtgctggagaagctgaagaagacagcaacaggctggatgaccacaattaacggcaaggagctgaaggtggagggccagattacctactacaacagatacaagagacagaacgtagtcaaggacctgtccgtcgagctggatagactgagcgaagaatctgtgaacaacgacatctcctcctggacaaagggcagaagcggagaagctctgagcctcctgaagaaaagattctcccatagacccgtgcaggagaagttcgtgtgcctgaactgcggcttcgagacacacgcagccgagcaagccgccctgaacatcgccagatcctggctgttcctgcggagccaggagtacaagaaataccagacaaacaagacaaccggcaacaccgataagagagccttcgtcgagacctggcagtccttttaccggaagaagcttaaggaggtgtggaaacctgccgtgcggtctggcggatctggcggaggctccgtgaagttcgacgaggtggccgtggtgttcagcgaggacgagtggaacctgctgaccgaccagcagaggggcctgtacatggaggtgatgaaggagaactacgagcacctgatctacctgggcttcgaggtgcccgtgatcctgagcctgctgcaggacggcggcggcatcggcagcgacaccgtgacccagagcaagagccagcaggtggccggcgccgaggagagcaagagcagcgtgaccctggagggccccatccccgagaccctgcccagcggcggcccaagcagcggcgcccctcctcccagcggcggcagcccagccggctccccaacctctaccgaggagggcacctctgagtccgccacccccgagagcggccctggcacctccaccgagcccagcgagggcagcgcacccggcagccctgccggcagccccacctccacagaggagggaaccagcaccgagcccagcgaaggcagcgccccaggcaccagcaccgagcctagtgagcaggagattaaacggatcaacaagatcagaagaagacttgtgaaagacagcaacaccaagaaggccggcaagacaggccccatgaaaaccctgctggttagagtgatgacacccgatctgagagagcggctggaaaacctgagaaagaagcctgaaaatatcccccagcccatcagcaatacatctagagccaacctgaataagctgctgaccgattacaccgaaatgaagaaggcgatcctgcatgtgtactgggaagagttccagaaggaccctgtgggcctgatgagccgggtggcccagcctgccagcaagaagatcgatcagaacaagctgaaacctgagatggacgagaagggcaacctgaccaccgccggctttgcctgctctcagtgtggccagcccctgttcgtgtacaagctggagcaggtgtctgagaagggcaaggcttacaccaactacttcggacggtgcaatgtggccgagcacgaaaagctgatcctgctggcccagctgaagcccgagaaggatagcgacgaagccgtgacatatagcctgggaaagtttgggcagagggccctggatttctacagcattcatgtgaccaaggagtccacccaccccgtgaagcccctggcccagatcgccggaaacagatacgcctccggacctgtgggaaaggccctgagcgacgcatgtatgggcacaatcgcctccttcctgtctaagtaccaggacatcatcatcgaacaccagaaggtggtgaagggcaaccagaagagactggagagcctgcgggagctggccggcaaggaaaacctggaataccctagcgtgaccctgccacctcagcctcacaccaaggagggcgttgatgcctacaacgaagtgatcgcccgggtgcgaatgtgggtgaacctgaacctgtggcagaagctgaagctaagcagagatgatgccaagcctctgctgagactgaagggattcccttcctttcctctggtcgagagacaggccaacgaagtggactggtgggacatggtgtgtaacgtgaagaagctgatcaacgagaaaaaggaggatggcaaggtgttttggcagaatctggctggctacaagagacaggaagccctgagaccatacctgagcagcgaggaagatcggaagaagggaaagaaattcgctcggtaccagctgggcgacctgctgctgcacctggaaaagaagcacggcgaggactggggaaaggtgtacgacgaggcctgggagcggattgacaagaaagtggaaggcctgagcaagcacatcaagctggaagaggaacggagaagcgaggacgcccagagcaaggccgccctgaccgactggctgcgggctaaggccagcttcgtgatcgagggcctgaaggaggccgacaaggacgagttctgcagatgcgagctgaagctgcagaagtggtacggggacctgcggggaaagcccttcgccatcgaagccgagaacagcatcctggacatcagcggcttcagcaagcagtacaactgtgccttcatctggcagaaggacggcgtgaagaagctgaacctgtacctgatcatcaactacttcaagggcggcaagctgcggttcaagaagatcaaacctgaagccttcgaagccaacagattctacaccgtgatcaacaaaaagagcggcgagatcgtgcccatggaggtgaacttcaacttcgacgaccccaacctgatcatcctgcctctggcctttggcaagagacagggcagagaattcatctggaacgacctgctgtccctggaaaccggcagcctgaagctggccaacggaagagtgatcgagaagacactgtacaacagaagaacccggcaggatgagcctgccctgttcgtggccctgaccttcgagcggcgggaggtcctggactcctccaatatcaaaccaatgaacctgatcggcgtggcaagaggcgaaaacatccccgccgtgatcgccctgaccgaccccgagggctgcccactgagccggtttaaggatagcctgggaaacccaacccacatcctgagaatcggcgagagctataaggagaagcagcggaccatccaggccaagaaggaggtggagcagcggagagccggcggctacagccggaagtacgccagcaaagccaagaatctggcagacgatatggtgagaaacaccgctagagatctgctgtactacgccgtgacccaggatgccatgctgatcttcgccaacctgagccggggcttcggccggcagggcaagcggaccttcatggccgagagacagtacacacggatggaggactggctgaccgccaagctggcctacgagggcctgagcaagacctacctgtccaagacactggcccagtacacctccaagacatgcagcaactgtgggtttaccatcaccagcgccgactacgacagggtgctggagaagctgaagaagacagcaacaggctggatgaccacaattaacggcaaggagctgaaggtggagggccagattacctactacaacagatacaagagacagaacgtagtcaaggacctgtccgtcgagctggatagactgagcgaagaatctgtgaacaacgacatctcctcctggacaaagggcagaagcggagaagctctgagcctcctgaagaaaagattctcccatagacccgtgcaggagaagttcgtgtgcctgaactgcggcttcgagacacacgcagccgagcaagccgccctgaacatcgccagatcctggctgttcctgcggagccaggagtacaagaaataccagacaaacaagacaaccggcaacaccgataagagagccttcgtcgagacctggcagtccttttaccggaagaagcttaaggaggtgtggaaacctgccgtgcggtctggcggatctggcggaggctcctgtgaagttcgacgaggtggccgtggtgttcagcgaggacgagtggaacctgctgaccgaccagcagaggggcctgtacatggaggtgatgaaggagaactacgagcacctgatctacctgggcttcgaggtgcccgtgatcctgagcctgctgcaggacggcggcggcatcggcagcgacaccgtgacccagagcaagagccagcaggtggccggcgccgaggagagcaagagcagcgtgaccctggagggccccatccccgagaccctgcccagcggatctggctccggcagcggccccaagaaaaagagaaaagtctaagctgccttctgcggggcttgccttctggccatgcccttcttctctcccttgcacctgtacctcttggtctttgaataaagcctgagtaggaaggctagcaaaaaaaaaaaaaaaaaaaaaaaaaaaaaaaaaaaaaaaaaaaaaaaaaaaaaaaaaaaaaaaaaaaaaaaaaaaaaaaa

SEQ ID NO: 15886 - RNA, 9485 nt, synthetic construct
  source 1..9485: mol_type = other RNA
aggaaataagagagaaaagaagagtaagaagaaatataagagccaccatggcccctaagaagaagcgtaaagtgagccggatggaacgcctcgtctacgaggtgcggcagaagtgcagaaacatcgaggacatctgcatctcctgcggatctctgaacgtgaccctggagcacccactgttcatcggcggcatgtgccagaactgtaaaaactgttttctggagtgtgcctatcaatacgacgatgacggctaccagagctactgcaccatctgttgcggcggaagagaggtgctgatgtgtggaaataacaactgctgccggtgcttctgcgtggaatgcgtggacctgctggtgggccccggcgccgcccaggccgctattaaggaagatccttggaactgctacatgtgcggccacaagggcacatacggcctgctgagacggagagaggactggcctagcagactgcagatgttcttcgccaataaccacgaccaggagttcgacccccctaaggtgtaccctcccgtccccgccgagaagagaaagcccatccgggtcctgagcctgttcgatggcatcgccaccggtctgctggtgctgaaggacctgggcatccaggtggataggtacattgcctccgaggtgtgcgaggactccatcaccgtgggaatggtgcgtcatcagggcaagatcatgtacgtgggcgacgtgcggagcgtgacacagaagcatatccaggagtggggccctttcgacctggtgatcggcggcagcccttgcaatgacctgagcatcgtgaacccagcccggaagggcctgtacgagggaaccggcagactgttcttcgagttttacagactgctgcacgacgcccggcctaaggaaggcgacgaccggcccttcttttggctgttcgagaatgtggtggccatgggagtcagcgacaagcgggatattagccggttcctggagagcaaccccgtgatgatcgatgccaaggaagtgagcgccgcccaccgggccagatacttctggggcaatctgcctggcatgaacagacccctggccagcaccgtgaacgacaagctggagctgcaggagtgcctggagcacggccggatcgccaagttcagcaaggtgagaaccatcaccacccgaagcaacagcatcaaacaaggcaaggaccagcactttcctgtgttcatgaacgagaaggaggacatcctgtggtgtaccgagatggagagagtgttcgggttcccagtccactacacagatgtcagcaacatgtctagactggccagacagagactgctgggaagaagctggtccgtccctgtgatcagacacctgttcgcccctctgaaggagtacttcgcctgcgtgagcagcggcaacagcaacgccaacagccggggccccagcttctctagcggcctggtgccactgtccctgagagggagccacatgggccccatggagatctacaaaaccgtgagcgcctggaagcggcagcctgtgcgcgtgctgagcctgtttcggaatatcgataaagtcctgaaaagcctgggattcctggagagcggctctggctccggcggtggcaccctgaagtacgtggaggatgtgacaaacgtggtcagacgggatgtggagaagtggggccccttcgatctggtgtacggcagcacccaacccctgggcagctcttgtgaccggtgccctggctggtacatgtttcagttccaccggatcctgcagtacgccctgccgagacaggagtcccagcggccattcttttggattttcatggacaacttgctgctgaccgaggatgaccaggaaactaccactcggttcctgcagaccgaagccgtgaccctgcaggacgtgagaggccgggactaccagaacgccatgcgggtgtggtccaacatccctggactgaaaagcaagcacgcacctctgacccctaaagaagaggagtacctgcaggcccaggtgcggagcagaagcaagctggacgcccctaaggtggatctgctggtgaagaattgcctcctgcccctgagagagtacttcaagtatttcagccagaatagtctgcccctgggaggcagcggcggcggcgccctggtgacatttgaggacgtcgccgtgcggttcacccaggaggaatgggctctgctggatccttctcagaaaatcctgtaccgggacgtgatgagagagacataccggaatctgacctccgtgggcatcaactgggaatgttgggaccttgaagcctgcttcagaagcctgggaagaaacctgagagtgcaggtggtgaagagaaagtgcgagctgaccaacagcggcccctgcgccgagggcggcccaagcagcggcgcccctcctcccagcggcggcagcccagccggctccccaacctctaccgaggagggcacctctgagtccgccacccccgagagcggccctggcacctccaccgagcccagcgagggcagcgcacccggcagccctgccggcagccccacctccacagaggagggaaccagcaccgagcccagcgaaggcagcgccccaggcaccagcaccgagcctagtgagcaggagattaaacggatcaacaagatcagaagaagacttgtgaaagacagcaacaccaagaaggccggcaagacaggccccatgaaaaccctgctggttagagtgatgacacccgatctgagagagcggctggaaaacctgagaaagaagcctgaaaatatcccccagcccatcagcaatacatctagagccaacctgaataagctgctgaccgattacaccgaaatgaagaaggcgatcctgcatgtgtactgggaagagttccagaaggaccctgtgggcctgatgagccgggtggcccagcctgccagcaagaagatcgatcagaacaagctgaaacctgagatggacgagaagggcaacctgaccaccgccggctttgcctgctctcagtgtggccagcccctgttcgtgtacaagctggagcaggtgtctgagaagggcaaggcttacaccaactacttcggacggtgcaatgtggccgagcacgaaaagctgatcctgctggcccagctgaagcccgagaaggatagcgacgaagccgtgacatatagcctgggaaagtttgggcagagggccctggatttctacagcattcatgtgaccaaggagtccacccaccccgtgaagcccctggcccagatcgccggaaacagatacgcctccggacctgtgggaaaggccctgagcgacgcatgtatgggcacaatcgcctccttcctgtctaagtaccaggacatcatcatcgaacaccagaaggtggtgaagggcaaccagaagagactggagagcctgcgggagctggccggcaaggaaaacctggaataccctagcgtgaccctgccacctcagcctcacaccaaggagggcgttgatgcctacaacgaagtgatcgcccgggtgcgaatgtgggtgaacctgaacctgtggcagaagctgaagctaagcagagatgatgccaagcctctgctgagactgaagggattcccttcctttcctctggtcgagagacaggccaacgaagtggactggtgggacatggtgtgtaacgtgaagaagctgatcaacgagaaaaaggaggatggcaaggtgttttggcagaatctggctggctacaagagacaggaagccctgagaccatacctgagcagcgaggaagatcggaagaagggaaagaaattcgctcggtaccagctgggcgacctgctgctgcacctggaaaagaagcacggcgaggactggggaaaggtgtacgacgaggcctgggagcggattgacaagaaagtggaaggcctgagcaagcacatcaagctggaagaggaacggagaagcgaggacgcccagagcaaggccgccctgaccgactggctgcgggctaaggccagcttcgtgatcgagggcctgaaggaggccgacaaggacgagttctgcagatgcgagctgaagctgcagaagtggtacggggacctgcggggaaagcccttcgccatcgaagccgagaacagcatcctggacatcagcggcttcagcaagcagtacaactgtgccttcatctggcagaaggacggcgtgaagaagctgaacctgtacctgatcatcaactacttcaagggcggcaagctgcggttcaagaagatcaaacctgaagccttcgaagccaacagattctacaccgtgatcaacaaaaagagcggcgagatcgtgcccatggaggtgaacttcaacttcgacgaccccaacctgatcatcctgcctctggcctttggcaagagacagggcagagaattcatctggaacgacctgctgtccctggaaaccggcagcctgaagctggccaacggaagagtgatcgagaagacactgtacaacagaagaacccggcaggatgagcctgccctgttcgtggccctgaccttcgagcggcgggaggtcctggactcctccaatatcaaaccaatgaacctgatcggcgtggcaagaggcgaaaacatccccgccgtgatcgccctgaccgaccccgagggctgcccactgagccggtttaaggatagcctgggaaacccaacccacatcctgagaatcggcgagagctataaggagaagcagcggaccatccaggccaagaaggaggtggagcagcggagagccggcggctacagccggaagtacgccagcaaagccaagaatctggcagacgatatggtgagaaacaccgctagagatctgctgtactacgccgtgacccaggatgccatgctgatcttcgccaacctgagccggggcttcggccggcagggcaagcggaccttcatggccgagagacagtacacacggatggaggactggctgaccgccaagctggcctacgagggcctgagcaagacctacctgtccaagacactggcccagtacacctccaagacatgcagcaactgtgggtttaccatcaccagcgccgactacgacagggtgctggagaagctgaagaagacagcaacaggctggatgaccacaattaacggcaaggagctgaaggtggagggccagattacctactacaacagatacaagagacagaacgtagtcaaggacctgtccgtcgagctggatagactgagcgaagaatctgtgaacaacgacatctcctcctggacaaagggcagaagcggagaagctctgagcctcctgaagaaaagattctcccatagacccgtgcaggagaagttcgtgtgcctgaactgcggcttcgagacacacgcagccgagcaagccgccctgaacatcgccagatcctggctgttcctgcggagccaggagtacaagaaataccagacaaacaagacaaccggcaacaccgataagagagccttcgtcgagacctggcagtccttttaccggaagaagcttaaggaggtgtggaaacctgccgtgcggtctggcggatctggcggaggctccgcccaggccggcgtgagcttcgaggaggtggccgtgcacttcagccccggcgagtggagcctgctgcagcccgcccagagggccctgtacaaggaggtgatgctggagaacttcggccacgtggccagcctgggcccccccggcgccacccccgacctgatcgcctggctgcaggagggcctgttcctgctgggcggcgacgaggaggccggcagcgccggcgacgcctggaggagcgccaccggcggcccaagcagcggcgcccctcctcccagcggcggcagcccagccggctccccaacctctaccgaggagggcacctctgagtccgccacccccgagagcggccctggcacctccaccgagcccagcgagggcagcgcacccggcagccctgccggcagccccacctccacagaggagggaaccagcaccgagcccagcgaaggcagcgccccaggcaccagcaccgagcctagtgagcaggagattaaacggatcaacaagatcagaagaagacttgtgaaagacagcaacaccaagaaggccggcaagacaggccccatgaaaaccctgctggttagagtgatgacacccgatctgagagagcggctggaaaacctgagaaagaagcctgaaaatatcccccagcccatcagcaatacatctagagccaacctgaataagctgctgaccgattacaccgaaatgaagaaggcgatcctgcatgtgtactgggaagagttccagaaggaccctgtgggcctgatgagccgggtggcccagcctgccagcaagaagatcgatcagaacaagctgaaacctgagatggacgagaagggcaacctgaccaccgccggctttgcctgctctcagtgtggccagcccctgttcgtgtacaagctggagcaggtgtctgagaagggcaaggcttacaccaactacttcggacggtgcaatgtggccgagcacgaaaagctgatcctgctggcccagctgaagcccgagaaggatagcgacgaagccgtgacatatagcctgggaaagtttgggcagagggccctggatttctacagcattcatgtgaccaaggagtccacccaccccgtgaagcccctggcccagatcgccggaaacagatacgcctccggacctgtgggaaaggccctgagcgacgcatgtatgggcacaatcgcctccttcctgtctaagtaccaggacatcatcatcgaacaccagaaggtggtgaagggcaaccagaagagactggagagcctgcgggagctggccggcaaggaaaacctggaataccctagcgtgaccctgccacctcagcctcacaccaaggagggcgttgatgcctacaacgaagtgatcgcccgggtgcgaatgtgggtgaacctgaacctgtggcagaagctgaagctaagcagagatgatgccaagcctctgctgagactgaagggattcccttcctttcctctggtcgagagacaggccaacgaagtggactggtgggacatggtgtgtaacgtgaagaagctgatcaacgagaaaaaggaggatggcaaggtgttttggcagaatctggctggctacaagagacaggaagccctgagaccatacctgagcagcgaggaagatcggaagaagggaaagaaattcgctcggtaccagctgggcgacctgctgctgcacctggaaaagaagcacggcgaggactggggaaaggtgtacgacgaggcctgggagcggattgacaagaaagtggaaggcctgagcaagcacatcaagctggaagaggaacggagaagcgaggacgcccagagcaaggccgccctgaccgactggctgcgggctaaggccagcttcgtgatcgagggcctgaaggaggccgacaaggacgagttctgcagatgcgagctgaagctgcagaagtggtacggggacctgcggggaaagcccttcgccatcgaagccgagaacagcatcctggacatcagcggcttcagcaagcagtacaactgtgccttcatctggcagaaggacggcgtgaagaagctgaacctgtacctgatcatcaactacttcaagggcggcaagctgcggttcaagaagatcaaacctgaagccttcgaagccaacagattctacaccgtgatcaacaaaaagagcggcgagatcgtgcccatggaggtgaacttcaacttcgacgaccccaacctgatcatcctgcctctggcctttggcaagagacagggcagagaattcatctggaacgacctgctgtccctggaaaccggcagcctgaagctggccaacggaagagtgatcgagaagacactgtacaacagaagaacccggcaggatgagcctgccctgttcgtggccctgaccttcgagcggcgggaggtcctggactcctccaatatcaaaccaatgaacctgatcggcgtggcaagaggcgaaaacatccccgccgtgatcgccctgaccgaccccgagggctgcccactgagccggtttaaggatagcctgggaaacccaacccacatcctgagaatcggcgagagctataaggagaagcagcggaccatccaggccaagaaggaggtggagcagcggagagccggcggctacagccggaagtacgccagcaaagccaagaatctggcagacgatatggtgagaaacaccgctagagatctgctgtactacgccgtgacccaggatgccatgctgatcttcgccaacctgagccggggcttcggccggcagggcaagcggaccttcatggccgagagacagtacacacggatggaggactggctgaccgccaagctggcctacgagggcctgagcaagacctacctgtccaagacactggcccagtacacctccaagacatgcagcaactgtgggtttaccatcaccagcgccgactacgacagggtgctggagaagctgaagaagacagcaacaggctggatgaccacaattaacggcaaggagctgaaggtggagggccagattacctactacaacagatacaagagacagaacgtagtcaaggacctgtccgtcgagctggatagactgagcgaagaatctgtgaacaacgacatctcctcctggacaaagggcagaagcggagaagctctgagcctcctgaagaaaagattctcccatagacccgtgcaggagaagttcgtgtgcctgaactgcggcttcgagacacacgcagccgagcaagccgccctgaacatcgccagatcctggctgttcctgcggagccaggagtacaagaaataccagacaaacaagacaaccggcaacaccgataagagagccttcgtcgagacctggcagtccttttaccggaagaagcttaaggaggtgtggaaacctgccgtgcggtctggcggatctggcggaggctcctgcccaggccggcgtgagcttcgaggaggtggccgtgcacttcagccccggcgagtggagcctgctgcagcccgcccagagggccctgtacaaggaggtgatgctggagaacttcggccacgtggccagcctgggcccccccggcgccacccccgacctgatcgcctggctgcaggagggcctgttcctgctgggcggcgacgaggaggccggcagcgccggcgacgcctggaggagcgccaccggatctggctccggcagcggccccaagaaaaagagaaaagtctaagctgccttctgcggggcttgccttctggccatgcccttcttctctcccttgcacctgtacctcttggtctttgaataaagcctgagtaggaaggctagcaaaaaaaaaaaaaaaaaaaaaaaaaaaaaaaaaaaaaaaaaaaaaaaaaaaaaaaaaaaaaaaaaaaaaaaaaaaaaaaa

SEQ ID NO: 15887 - RNA, 9485 nt, synthetic construct
  source 1..9485: mol_type = other RNA
aggaaataagagagaaaagaagagtaagaagaaatataagagccaccatggcccctaagaagaagcgtaaagtgagccggatggaacgcctcgtctacgaggtgcggcagaagtgcagaaacatcgaggacatctgcatctcctgcggatctctgaacgtgaccctggagcacccactgttcatcggcggcatgtgccagaactgtaaaaactgttttctggagtgtgcctatcaatacgacgatgacggctaccagagctactgcaccatctgttgcggcggaagagaggtgctgatgtgtggaaataacaactgctgccggtgcttctgcgtggaatgcgtggacctgctggtgggccccggcgccgcccaggccgctattaaggaagatccttggaactgctacatgtgcggccacaagggcacatacggcctgctgagacggagagaggactggcctagcagactgcagatgttcttcgccaataaccacgaccaggagttcgacccccctaaggtgtaccctcccgtccccgccgagaagagaaagcccatccgggtcctgagcctgttcgatggcatcgccaccggtctgctggtgctgaaggacctgggcatccaggtggataggtacattgcctccgaggtgtgcgaggactccatcaccgtgggaatggtgcgtcatcagggcaagatcatgtacgtgggcgacgtgcggagcgtgacacagaagcatatccaggagtggggccctttcgacctggtgatcggcggcagcccttgcaatgacctgagcatcgtgaacccagcccggaagggcctgtacgagggaaccggcagactgttcttcgagttttacagactgctgcacgacgcccggcctaaggaaggcgacgaccggcccttcttttggctgttcgagaatgtggtggccatgggagtcagcgacaagcgggatattagccggttcctggagagcaaccccgtgatgatcgatgccaaggaagtgagcgccgcccaccgggccagatacttctggggcaatctgcctggcatgaacagacccctggccagcaccgtgaacgacaagctggagctgcaggagtgcctggagcacggccggatcgccaagttcagcaaggtgagaaccatcaccacccgaagcaacagcatcaaacaaggcaaggaccagcactttcctgtgttcatgaacgagaaggaggacatcctgtggtgtaccgagatggagagagtgttcgggttcccagtccactacacagatgtcagcaacatgtctagactggccagacagagactgctgggaagaagctggtccgtccctgtgatcagacacctgttcgcccctctgaaggagtacttcgcctgcgtgagcagcggcaacagcaacgccaacagccggggccccagcttctctagcggcctggtgccactgtccctgagagggagccacatgggccccatggagatctacaaaaccgtgagcgcctggaagcggcagcctgtgcgcgtgctgagcctgtttcggaatatcgataaagtcctgaaaagcctgggattcctggagagcggctctggctccggcggtggcaccctgaagtacgtggaggatgtgacaaacgtggtcagacgggatgtggagaagtggggccccttcgatctggtgtacggcagcacccaacccctgggcagctcttgtgaccggtgccctggctggtacatgtttcagttccaccggatcctgcagtacgccctgccgagacaggagtcccagcggccattcttttggattttcatggacaacttgctgctgaccgaggatgaccaggaaactaccactcggttcctgcagaccgaagccgtgaccctgcaggacgtgagaggccgggactaccagaacgccatgcgggtgtggtccaacatccctggactgaaaagcaagcacgcacctctgacccctaaagaagaggagtacctgcaggcccaggtgcggagcagaagcaagctggacgcccctaaggtggatctgctggtgaagaattgcctcctgcccctgagagagtacttcaagtatttcagccagaatagtctgcccctgggaggcagcggcggcggcgccctggtgacatttgaggacgtcgccgtgcggttcacccaggaggaatgggctctgctggatccttctcagaaaatcctgtaccgggacgtgatgagagagacataccggaatctgacctccgtgggcatcaactgggaatgttgggaccttgaagcctgcttcagaagcctgggaagaaacctgagagtgcaggtggtgaagagaaagtgcgagctgaccaacagcggcccctgcgccgagggcggcccaagcagcggcgcccctcctcccagcggcggcagcccagccggctccccaacctctaccgaggagggcacctctgagtccgccacccccgagagcggccctggcacctccaccgagcccagcgagggcagcgcacccggcagccctgccggcagccccacctccacagaggagggaaccagcaccgagcccagcgaaggcagcgccccaggcaccagcaccgagcctagtgagcaggagattaaacggatcaacaagatcagaagaagacttgtgaaagacagcaacaccaagaaggccggcaagacaggccccatgaaaaccctgctggttagagtgatgacacccgatctgagagagcggctggaaaacctgagaaagaagcctgaaaatatcccccagcccatcagcaatacatctagagccaacctgaataagctgctgaccgattacaccgaaatgaagaaggcgatcctgcatgtgtactgggaagagttccagaaggaccctgtgggcctgatgagccgggtggcccagcctgccagcaagaagatcgatcagaacaagctgaaacctgagatggacgagaagggcaacctgaccaccgccggctttgcctgctctcagtgtggccagcccctgttcgtgtacaagctggagcaggtgtctgagaagggcaaggcttacaccaactacttcggacggtgcaatgtggccgagcacgaaaagctgatcctgctggcccagctgaagcccgagaaggatagcgacgaagccgtgacatatagcctgggaaagtttgggcagagggccctggatttctacagcattcatgtgaccaaggagtccacccaccccgtgaagcccctggcccagatcgccggaaacagatacgcctccggacctgtgggaaaggccctgagcgacgcatgtatgggcacaatcgcctccttcctgtctaagtaccaggacatcatcatcgaacaccagaaggtggtgaagggcaaccagaagagactggagagcctgcgggagctggccggcaaggaaaacctggaataccctagcgtgaccctgccacctcagcctcacaccaaggagggcgttgatgcctacaacgaagtgatcgcccgggtgcgaatgtgggtgaacctgaacctgtggcagaagctgaagctaagcagagatgatgccaagcctctgctgagactgaagggattcccttcctttcctctggtcgagagacaggccaacgaagtggactggtgggacatggtgtgtaacgtgaagaagctgatcaacgagaaaaaggaggatggcaaggtgttttggcagaatctggctggctacaagagacaggaagccctgagaccatacctgagcagcgaggaagatcggaagaagggaaagaaattcgctcggtaccagctgggcgacctgctgctgcacctggaaaagaagcacggcgaggactggggaaaggtgtacgacgaggcctgggagcggattgacaagaaagtggaaggcctgagcaagcacatcaagctggaagaggaacggagaagcgaggacgcccagagcaaggccgccctgaccgactggctgcgggctaaggccagcttcgtgatcgagggcctgaaggaggccgacaaggacgagttctgcagatgcgagctgaagctgcagaagtggtacggggacctgcggggaaagcccttcgccatcgaagccgagaacagcatcctggacatcagcggcttcagcaagcagtacaactgtgccttcatctggcagaaggacggcgtgaagaagctgaacctgtacctgatcatcaactacttcaagggcggcaagctgcggttcaagaagatcaaacctgaagccttcgaagccaacagattctacaccgtgatcaacaaaaagagcggcgagatcgtgcccatggaggtgaacttcaacttcgacgaccccaacctgatcatcctgcctctggcctttggcaagagacagggcagagaattcatctggaacgacctgctgtccctggaaaccggcagcctgaagctggccaacggaagagtgatcgagaagacactgtacaacagaagaacccggcaggatgagcctgccctgttcgtggccctgaccttcgagcggcgggaggtcctggactcctccaatatcaaaccaatgaacctgatcggcgtggcaagaggcgaaaacatccccgccgtgatcgccctgaccgaccccgagggctgcccactgagccggtttaaggatagcctgggaaacccaacccacatcctgagaatcggcgagagctataaggagaagcagcggaccatccaggccaagaaggaggtggagcagcggagagccggcggctacagccggaagtacgccagcaaagccaagaatctggcagacgatatggtgagaaacaccgctagagatctgctgtactacgccgtgacccaggatgccatgctgatcttcgccaacctgagccggggcttcggccggcagggcaagcggaccttcatggccgagagacagtacacacggatggaggactggctgaccgccaagctggcctacgagggcctgagcaagacctacctgtccaagacactggcccagtacacctccaagacatgcagcaactgtgggtttaccatcaccagcgccgactacgacagggtgctggagaagctgaagaagacagcaacaggctggatgaccacaattaacggcaaggagctgaaggtggagggccagattacctactacaacagatacaagagacagaacgtagtcaaggacctgtccgtcgagctggatagactgagcgaagaatctgtgaacaacgacatctcctcctggacaaagggcagaagcggagaagctctgagcctcctgaagaaaagattctcccatagacccgtgcaggagaagttcgtgtgcctgaactgcggcttcgagacacacgcagccgagcaagccgccctgaacatcgccagatcctggctgttcctgcggagccaggagtacaagaaataccagacaaacaagacaaccggcaacaccgataagagagccttcgtcgagacctggcagtccttttaccggaagaagcttaaggaggtgtggaaacctgccgtgcggtctggcggatctggcggaggctccagccagggcagcgtgagcttcaaggacgtgaccgtggacttcacccaggaggagtggcagcagctggaccccgcccagaaggccctgtacagggacgtgatgctggagaactactgccacttcatcgccgtgggcttccacatgaccaagcccgacatgatcaggaagctggagcagggcgaggagctgtggacccagaggatcttccccagctacagctacctggaggaggacggcaagaccggcggcccaagcagcggcgcccctcctcccagcggcggcagcccagccggctccccaacctctaccgaggagggcacctctgagtccgccacccccgagagcggccctggcacctccaccgagcccagcgagggcagcgcacccggcagccctgccggcagccccacctccacagaggagggaaccagcaccgagcccagcgaaggcagcgccccaggcaccagcaccgagcctagtgagcaggagattaaacggatcaacaagatcagaagaagacttgtgaaagacagcaacaccaagaaggccggcaagacaggccccatgaaaaccctgctggttagagtgatgacacccgatctgagagagcggctggaaaacctgagaaagaagcctgaaaatatcccccagcccatcagcaatacatctagagccaacctgaataagctgctgaccgattacaccgaaatgaagaaggcgatcctgcatgtgtactgggaagagttccagaaggaccctgtgggcctgatgagccgggtggcccagcctgccagcaagaagatcgatcagaacaagctgaaacctgagatggacgagaagggcaacctgaccaccgccggctttgcctgctctcagtgtggccagcccctgttcgtgtacaagctggagcaggtgtctgagaagggcaaggcttacaccaactacttcggacggtgcaatgtggccgagcacgaaaagctgatcctgctggcccagctgaagcccgagaaggatagcgacgaagccgtgacatatagcctgggaaagtttgggcagagggccctggatttctacagcattcatgtgaccaaggagtccacccaccccgtgaagcccctggcccagatcgccggaaacagatacgcctccggacctgtgggaaaggccctgagcgacgcatgtatgggcacaatcgcctccttcctgtctaagtaccaggacatcatcatcgaacaccagaaggtggtgaagggcaaccagaagagactggagagcctgcgggagctggccggcaaggaaaacctggaataccctagcgtgaccctgccacctcagcctcacaccaaggagggcgttgatgcctacaacgaagtgatcgcccgggtgcgaatgtgggtgaacctgaacctgtggcagaagctgaagctaagcagagatgatgccaagcctctgctgagactgaagggattcccttcctttcctctggtcgagagacaggccaacgaagtggactggtgggacatggtgtgtaacgtgaagaagctgatcaacgagaaaaaggaggatggcaaggtgttttggcagaatctggctggctacaagagacaggaagccctgagaccatacctgagcagcgaggaagatcggaagaagggaaagaaattcgctcggtaccagctgggcgacctgctgctgcacctggaaaagaagcacggcgaggactggggaaaggtgtacgacgaggcctgggagcggattgacaagaaagtggaaggcctgagcaagcacatcaagctggaagaggaacggagaagcgaggacgcccagagcaaggccgccctgaccgactggctgcgggctaaggccagcttcgtgatcgagggcctgaaggaggccgacaaggacgagttctgcagatgcgagctgaagctgcagaagtggtacggggacctgcggggaaagcccttcgccatcgaagccgagaacagcatcctggacatcagcggcttcagcaagcagtacaactgtgccttcatctggcagaaggacggcgtgaagaagctgaacctgtacctgatcatcaactacttcaagggcggcaagctgcggttcaagaagatcaaacctgaagccttcgaagccaacagattctacaccgtgatcaacaaaaagagcggcgagatcgtgcccatggaggtgaacttcaacttcgacgaccccaacctgatcatcctgcctctggcctttggcaagagacagggcagagaattcatctggaacgacctgctgtccctggaaaccggcagcctgaagctggccaacggaagagtgatcgagaagacactgtacaacagaagaacccggcaggatgagcctgccctgttcgtggccctgaccttcgagcggcgggaggtcctggactcctccaatatcaaaccaatgaacctgatcggcgtggcaagaggcgaaaacatccccgccgtgatcgccctgaccgaccccgagggctgcccactgagccggtttaaggatagcctgggaaacccaacccacatcctgagaatcggcgagagctataaggagaagcagcggaccatccaggccaagaaggaggtggagcagcggagagccggcggctacagccggaagtacgccagcaaagccaagaatctggcagacgatatggtgagaaacaccgctagagatctgctgtactacgccgtgacccaggatgccatgctgatcttcgccaacctgagccggggcttcggccggcagggcaagcggaccttcatggccgagagacagtacacacggatggaggactggctgaccgccaagctggcctacgagggcctgagcaagacctacctgtccaagacactggcccagtacacctccaagacatgcagcaactgtgggtttaccatcaccagcgccgactacgacagggtgctggagaagctgaagaagacagcaacaggctggatgaccacaattaacggcaaggagctgaaggtggagggccagattacctactacaacagatacaagagacagaacgtagtcaaggacctgtccgtcgagctggatagactgagcgaagaatctgtgaacaacgacatctcctcctggacaaagggcagaagcggagaagctctgagcctcctgaagaaaagattctcccatagacccgtgcaggagaagttcgtgtgcctgaactgcggcttcgagacacacgcagccgagcaagccgccctgaacatcgccagatcctggctgttcctgcggagccaggagtacaagaaataccagacaaacaagacaaccggcaacaccgataagagagccttcgtcgagacctggcagtccttttaccggaagaagcttaaggaggtgtggaaacctgccgtgcggtctggcggatctggcggaggctcctagccagggcagcgtgagcttcaaggacgtgaccgtggacttcacccaggaggagtggcagcagctggaccccgcccagaaggccctgtacagggacgtgatgctggagaactactgccacttcatcgccgtgggcttccacatgaccaagcccgacatgatcaggaagctggagcagggcgaggagctgtggacccagaggatcttccccagctacagctacctggaggaggacggcaagaccggatctggctccggcagcggccccaagaaaaagagaaaagtctaagctgccttctgcggggcttgccttctggccatgcccttcttctctcccttgcacctgtacctcttggtctttgaataaagcctgagtaggaaggctagcaaaaaaaaaaaaaaaaaaaaaaaaaaaaaaaaaaaaaaaaaaaaaaaaaaaaaaaaaaaaaaaaaaaaaaaaaaaaaaaa

SEQ ID NO: 15888 - RNA, 9485 nt, synthetic construct
  source 1..9485: mol_type = other RNA
aggaaataagagagaaaagaagagtaagaagaaatataagagccaccatggcccctaagaagaagcgtaaagtgagccggatggaacgcctcgtctacgaggtgcggcagaagtgcagaaacatcgaggacatctgcatctcctgcggatctctgaacgtgaccctggagcacccactgttcatcggcggcatgtgccagaactgtaaaaactgttttctggagtgtgcctatcaatacgacgatgacggctaccagagctactgcaccatctgttgcggcggaagagaggtgctgatgtgtggaaataacaactgctgccggtgcttctgcgtggaatgcgtggacctgctggtgggccccggcgccgcccaggccgctattaaggaagatccttggaactgctacatgtgcggccacaagggcacatacggcctgctgagacggagagaggactggcctagcagactgcagatgttcttcgccaataaccacgaccaggagttcgacccccctaaggtgtaccctcccgtccccgccgagaagagaaagcccatccgggtcctgagcctgttcgatggcatcgccaccggtctgctggtgctgaaggacctgggcatccaggtggataggtacattgcctccgaggtgtgcgaggactccatcaccgtgggaatggtgcgtcatcagggcaagatcatgtacgtgggcgacgtgcggagcgtgacacagaagcatatccaggagtggggccctttcgacctggtgatcggcggcagcccttgcaatgacctgagcatcgtgaacccagcccggaagggcctgtacgagggaaccggcagactgttcttcgagttttacagactgctgcacgacgcccggcctaaggaaggcgacgaccggcccttcttttggctgttcgagaatgtggtggccatgggagtcagcgacaagcgggatattagccggttcctggagagcaaccccgtgatgatcgatgccaaggaagtgagcgccgcccaccgggccagatacttctggggcaatctgcctggcatgaacagacccctggccagcaccgtgaacgacaagctggagctgcaggagtgcctggagcacggccggatcgccaagttcagcaaggtgagaaccatcaccacccgaagcaacagcatcaaacaaggcaaggaccagcactttcctgtgttcatgaacgagaaggaggacatcctgtggtgtaccgagatggagagagtgttcgggttcccagtccactacacagatgtcagcaacatgtctagactggccagacagagactgctgggaagaagctggtccgtccctgtgatcagacacctgttcgcccctctgaaggagtacttcgcctgcgtgagcagcggcaacagcaacgccaacagccggggccccagcttctctagcggcctggtgccactgtccctgagagggagccacatgggccccatggagatctacaaaaccgtgagcgcctggaagcggcagcctgtgcgcgtgctgagcctgtttcggaatatcgataaagtcctgaaaagcctgggattcctggagagcggctctggctccggcggtggcaccctgaagtacgtggaggatgtgacaaacgtggtcagacgggatgtggagaagtggggccccttcgatctggtgtacggcagcacccaacccctgggcagctcttgtgaccggtgccctggctggtacatgtttcagttccaccggatcctgcagtacgccctgccgagacaggagtcccagcggccattcttttggattttcatggacaacttgctgctgaccgaggatgaccaggaaactaccactcggttcctgcagaccgaagccgtgaccctgcaggacgtgagaggccgggactaccagaacgccatgcgggtgtggtccaacatccctggactgaaaagcaagcacgcacctctgacccctaaagaagaggagtacctgcaggcccaggtgcggagcagaagcaagctggacgcccctaaggtggatctgctggtgaagaattgcctcctgcccctgagagagtacttcaagtatttcagccagaatagtctgcccctgggaggcagcggcggcggcgccctggtgacatttgaggacgtcgccgtgcggttcacccaggaggaatgggctctgctggatccttctcagaaaatcctgtaccgggacgtgatgagagagacataccggaatctgacctccgtgggcatcaactgggaatgttgggaccttgaagcctgcttcagaagcctgggaagaaacctgagagtgcaggtggtgaagagaaagtgcgagctgaccaacagcggcccctgcgccgagggcggcccaagcagcggcgcccctcctcccagcggcggcagcccagccggctccccaacctctaccgaggagggcacctctgagtccgccacccccgagagcggccctggcacctccaccgagcccagcgagggcagcgcacccggcagccctgccggcagccccacctccacagaggagggaaccagcaccgagcccagcgaaggcagcgccccaggcaccagcaccgagcctagtgagcaggagattaaacggatcaacaagatcagaagaagacttgtgaaagacagcaacaccaagaaggccggcaagacaggccccatgaaaaccctgctggttagagtgatgacacccgatctgagagagcggctggaaaacctgagaaagaagcctgaaaatatcccccagcccatcagcaatacatctagagccaacctgaataagctgctgaccgattacaccgaaatgaagaaggcgatcctgcatgtgtactgggaagagttccagaaggaccctgtgggcctgatgagccgggtggcccagcctgccagcaagaagatcgatcagaacaagctgaaacctgagatggacgagaagggcaacctgaccaccgccggctttgcctgctctcagtgtggccagcccctgttcgtgtacaagctggagcaggtgtctgagaagggcaaggcttacaccaactacttcggacggtgcaatgtggccgagcacgaaaagctgatcctgctggcccagctgaagcccgagaaggatagcgacgaagccgtgacatatagcctgggaaagtttgggcagagggccctggatttctacagcattcatgtgaccaaggagtccacccaccccgtgaagcccctggcccagatcgccggaaacagatacgcctccggacctgtgggaaaggccctgagcgacgcatgtatgggcacaatcgcctccttcctgtctaagtaccaggacatcatcatcgaacaccagaaggtggtgaagggcaaccagaagagactggagagcctgcgggagctggccggcaaggaaaacctggaataccctagcgtgaccctgccacctcagcctcacaccaaggagggcgttgatgcctacaacgaagtgatcgcccgggtgcgaatgtgggtgaacctgaacctgtggcagaagctgaagctaagcagagatgatgccaagcctctgctgagactgaagggattcccttcctttcctctggtcgagagacaggccaacgaagtggactggtgggacatggtgtgtaacgtgaagaagctgatcaacgagaaaaaggaggatggcaaggtgttttggcagaatctggctggctacaagagacaggaagccctgagaccatacctgagcagcgaggaagatcggaagaagggaaagaaattcgctcggtaccagctgggcgacctgctgctgcacctggaaaagaagcacggcgaggactggggaaaggtgtacgacgaggcctgggagcggattgacaagaaagtggaaggcctgagcaagcacatcaagctggaagaggaacggagaagcgaggacgcccagagcaaggccgccctgaccgactggctgcgggctaaggccagcttcgtgatcgagggcctgaaggaggccgacaaggacgagttctgcagatgcgagctgaagctgcagaagtggtacggggacctgcggggaaagcccttcgccatcgaagccgagaacagcatcctggacatcagcggcttcagcaagcagtacaactgtgccttcatctggcagaaggacggcgtgaagaagctgaacctgtacctgatcatcaactacttcaagggcggcaagctgcggttcaagaagatcaaacctgaagccttcgaagccaacagattctacaccgtgatcaacaaaaagagcggcgagatcgtgcccatggaggtgaacttcaacttcgacgaccccaacctgatcatcctgcctctggcctttggcaagagacagggcagagaattcatctggaacgacctgctgtccctggaaaccggcagcctgaagctggccaacggaagagtgatcgagaagacactgtacaacagaagaacccggcaggatgagcctgccctgttcgtggccctgaccttcgagcggcgggaggtcctggactcctccaatatcaaaccaatgaacctgatcggcgtggcaagaggcgaaaacatccccgccgtgatcgccctgaccgaccccgagggctgcccactgagccggtttaaggatagcctgggaaacccaacccacatcctgagaatcggcgagagctataaggagaagcagcggaccatccaggccaagaaggaggtggagcagcggagagccggcggctacagccggaagtacgccagcaaagccaagaatctggcagacgatatggtgagaaacaccgctagagatctgctgtactacgccgtgacccaggatgccatgctgatcttcgccaacctgagccggggcttcggccggcagggcaagcggaccttcatggccgagagacagtacacacggatggaggactggctgaccgccaagctggcctacgagggcctgagcaagacctacctgtccaagacactggcccagtacacctccaagacatgcagcaactgtgggtttaccatcaccagcgccgactacgacagggtgctggagaagctgaagaagacagcaacaggctggatgaccacaattaacggcaaggagctgaaggtggagggccagattacctactacaacagatacaagagacagaacgtagtcaaggacctgtccgtcgagctggatagactgagcgaagaatctgtgaacaacgacatctcctcctggacaaagggcagaagcggagaagctctgagcctcctgaagaaaagattctcccatagacccgtgcaggagaagttcgtgtgcctgaactgcggcttcgagacacacgcagccgagcaagccgccctgaacatcgccagatcctggctgttcctgcggagccaggagtacaagaaataccagacaaacaagacaaccggcaacaccgataagagagccttcgtcgagacctggcagtccttttaccggaagaagcttaaggaggtgtggaaacctgccgtgcggtctggcggatctggcggaggctccaagcccgccgccgtgagcttcgccgacgtggccgtgtacttcagccccgaggagtggggctgcctgaggcccgcccagagggccctgtacagggaggtgatgagggagacctacggcctgctgggcgccctgggcggcggcggcaccaagcccgccctgatctgctgggtggagagggacgccgagctgtggggccccgacgcccaggaccccgccgccgccgccgccaggggctacggcaccggcggcccaagcagcggcgcccctcctcccagcggcggcagcccagccggctccccaacctctaccgaggagggcacctctgagtccgccacccccgagagcggccctggcacctccaccgagcccagcgagggcagcgcacccggcagccctgccggcagccccacctccacagaggagggaaccagcaccgagcccagcgaaggcagcgccccaggcaccagcaccgagcctagtgagcaggagattaaacggatcaacaagatcagaagaagacttgtgaaagacagcaacaccaagaaggccggcaagacaggccccatgaaaaccctgctggttagagtgatgacacccgatctgagagagcggctggaaaacctgagaaagaagcctgaaaatatcccccagcccatcagcaatacatctagagccaacctgaataagctgctgaccgattacaccgaaatgaagaaggcgatcctgcatgtgtactgggaagagttccagaaggaccctgtgggcctgatgagccgggtggcccagcctgccagcaagaagatcgatcagaacaagctgaaacctgagatggacgagaagggcaacctgaccaccgccggctttgcctgctctcagtgtggccagcccctgttcgtgtacaagctggagcaggtgtctgagaagggcaaggcttacaccaactacttcggacggtgcaatgtggccgagcacgaaaagctgatcctgctggcccagctgaagcccgagaaggatagcgacgaagccgtgacatatagcctgggaaagtttgggcagagggccctggatttctacagcattcatgtgaccaaggagtccacccaccccgtgaagcccctggcccagatcgccggaaacagatacgcctccggacctgtgggaaaggccctgagcgacgcatgtatgggcacaatcgcctccttcctgtctaagtaccaggacatcatcatcgaacaccagaaggtggtgaagggcaaccagaagagactggagagcctgcgggagctggccggcaaggaaaacctggaataccctagcgtgaccctgccacctcagcctcacaccaaggagggcgttgatgcctacaacgaagtgatcgcccgggtgcgaatgtgggtgaacctgaacctgtggcagaagctgaagctaagcagagatgatgccaagcctctgctgagactgaagggattcccttcctttcctctggtcgagagacaggccaacgaagtggactggtgggacatggtgtgtaacgtgaagaagctgatcaacgagaaaaaggaggatggcaaggtgttttggcagaatctggctggctacaagagacaggaagccctgagaccatacctgagcagcgaggaagatcggaagaagggaaagaaattcgctcggtaccagctgggcgacctgctgctgcacctggaaaagaagcacggcgaggactggggaaaggtgtacgacgaggcctgggagcggattgacaagaaagtggaaggcctgagcaagcacatcaagctggaagaggaacggagaagcgaggacgcccagagcaaggccgccctgaccgactggctgcgggctaaggccagcttcgtgatcgagggcctgaaggaggccgacaaggacgagttctgcagatgcgagctgaagctgcagaagtggtacggggacctgcggggaaagcccttcgccatcgaagccgagaacagcatcctggacatcagcggcttcagcaagcagtacaactgtgccttcatctggcagaaggacggcgtgaagaagctgaacctgtacctgatcatcaactacttcaagggcggcaagctgcggttcaagaagatcaaacctgaagccttcgaagccaacagattctacaccgtgatcaacaaaaagagcggcgagatcgtgcccatggaggtgaacttcaacttcgacgaccccaacctgatcatcctgcctctggcctttggcaagagacagggcagagaattcatctggaacgacctgctgtccctggaaaccggcagcctgaagctggccaacggaagagtgatcgagaagacactgtacaacagaagaacccggcaggatgagcctgccctgttcgtggccctgaccttcgagcggcgggaggtcctggactcctccaatatcaaaccaatgaacctgatcggcgtggcaagaggcgaaaacatccccgccgtgatcgccctgaccgaccccgagggctgcccactgagccggtttaaggatagcctgggaaacccaacccacatcctgagaatcggcgagagctataaggagaagcagcggaccatccaggccaagaaggaggtggagcagcggagagccggcggctacagccggaagtacgccagcaaagccaagaatctggcagacgatatggtgagaaacaccgctagagatctgctgtactacgccgtgacccaggatgccatgctgatcttcgccaacctgagccggggcttcggccggcagggcaagcggaccttcatggccgagagacagtacacacggatggaggactggctgaccgccaagctggcctacgagggcctgagcaagacctacctgtccaagacactggcccagtacacctccaagacatgcagcaactgtgggtttaccatcaccagcgccgactacgacagggtgctggagaagctgaagaagacagcaacaggctggatgaccacaattaacggcaaggagctgaaggtggagggccagattacctactacaacagatacaagagacagaacgtagtcaaggacctgtccgtcgagctggatagactgagcgaagaatctgtgaacaacgacatctcctcctggacaaagggcagaagcggagaagctctgagcctcctgaagaaaagattctcccatagacccgtgcaggagaagttcgtgtgcctgaactgcggcttcgagacacacgcagccgagcaagccgccctgaacatcgccagatcctggctgttcctgcggagccaggagtacaagaaataccagacaaacaagacaaccggcaacaccgataagagagccttcgtcgagacctggcagtccttttaccggaagaagcttaaggaggtgtggaaacctgccgtgcggtctggcggatctggcggaggctcctaagcccgccgccgtgagcttcgccgacgtggccgtgtacttcagccccgaggagtggggctgcctgaggcccgcccagagggccctgtacagggaggtgatgagggagacctacggcctgctgggcgccctgggcggcggcggcaccaagcccgccctgatctgctgggtggagagggacgccgagctgtggggccccgacgcccaggaccccgccgccgccgccgccaggggctacggcaccggatctggctccggcagcggccccaagaaaaagagaaaagtctaagctgccttctgcggggcttgccttctggccatgcccttcttctctcccttgcacctgtacctcttggtctttgaataaagcctgagtaggaaggctagcaaaaaaaaaaaaaaaaaaaaaaaaaaaaaaaaaaaaaaaaaaaaaaaaaaaaaaaaaaaaaaaaaaaaaaaaaaaaaaaa

SEQ ID NO: 15889 - RNA, 9485 nt, synthetic construct
  source 1..9485: mol_type = other RNA
aggaaataagagagaaaagaagagtaagaagaaatataagagccaccatggcccctaagaagaagcgtaaagtgagccggatggaacgcctcgtctacgaggtgcggcagaagtgcagaaacatcgaggacatctgcatctcctgcggatctctgaacgtgaccctggagcacccactgttcatcggcggcatgtgccagaactgtaaaaactgttttctggagtgtgcctatcaatacgacgatgacggctaccagagctactgcaccatctgttgcggcggaagagaggtgctgatgtgtggaaataacaactgctgccggtgcttctgcgtggaatgcgtggacctgctggtgggccccggcgccgcccaggccgctattaaggaagatccttggaactgctacatgtgcggccacaagggcacatacggcctgctgagacggagagaggactggcctagcagactgcagatgttcttcgccaataaccacgaccaggagttcgacccccctaaggtgtaccctcccgtccccgccgagaagagaaagcccatccgggtcctgagcctgttcgatggcatcgccaccggtctgctggtgctgaaggacctgggcatccaggtggataggtacattgcctccgaggtgtgcgaggactccatcaccgtgggaatggtgcgtcatcagggcaagatcatgtacgtgggcgacgtgcggagcgtgacacagaagcatatccaggagtggggccctttcgacctggtgatcggcggcagcccttgcaatgacctgagcatcgtgaacccagcccggaagggcctgtacgagggaaccggcagactgttcttcgagttttacagactgctgcacgacgcccggcctaaggaaggcgacgaccggcccttcttttggctgttcgagaatgtggtggccatgggagtcagcgacaagcgggatattagccggttcctggagagcaaccccgtgatgatcgatgccaaggaagtgagcgccgcccaccgggccagatacttctggggcaatctgcctggcatgaacagacccctggccagcaccgtgaacgacaagctggagctgcaggagtgcctggagcacggccggatcgccaagttcagcaaggtgagaaccatcaccacccgaagcaacagcatcaaacaaggcaaggaccagcactttcctgtgttcatgaacgagaaggaggacatcctgtggtgtaccgagatggagagagtgttcgggttcccagtccactacacagatgtcagcaacatgtctagactggccagacagagactgctgggaagaagctggtccgtccctgtgatcagacacctgttcgcccctctgaaggagtacttcgcctgcgtgagcagcggcaacagcaacgccaacagccggggccccagcttctctagcggcctggtgccactgtccctgagagggagccacatgggccccatggagatctacaaaaccgtgagcgcctggaagcggcagcctgtgcgcgtgctgagcctgtttcggaatatcgataaagtcctgaaaagcctgggattcctggagagcggctctggctccggcggtggcaccctgaagtacgtggaggatgtgacaaacgtggtcagacgggatgtggagaagtggggccccttcgatctggtgtacggcagcacccaacccctgggcagctcttgtgaccggtgccctggctggtacatgtttcagttccaccggatcctgcagtacgccctgccgagacaggagtcccagcggccattcttttggattttcatggacaacttgctgctgaccgaggatgaccaggaaactaccactcggttcctgcagaccgaagccgtgaccctgcaggacgtgagaggccgggactaccagaacgccatgcgggtgtggtccaacatccctggactgaaaagcaagcacgcacctctgacccctaaagaagaggagtacctgcaggcccaggtgcggagcagaagcaagctggacgcccctaaggtggatctgctggtgaagaattgcctcctgcccctgagagagtacttcaagtatttcagccagaatagtctgcccctgggaggcagcggcggcggcgccctggtgacatttgaggacgtcgccgtgcggttcacccaggaggaatgggctctgctggatccttctcagaaaatcctgtaccgggacgtgatgagagagacataccggaatctgacctccgtgggcatcaactgggaatgttgggaccttgaagcctgcttcagaagcctgggaagaaacctgagagtgcaggtggtgaagagaaagtgcgagctgaccaacagcggcccctgcgccgagggcggcccaagcagcggcgcccctcctcccagcggcggcagcccagccggctccccaacctctaccgaggagggcacctctgagtccgccacccccgagagcggccctggcacctccaccgagcccagcgagggcagcgcacccggcagccctgccggcagccccacctccacagaggagggaaccagcaccgagcccagcgaaggcagcgccccaggcaccagcaccgagcctagtgagcaggagattaaacggatcaacaagatcagaagaagacttgtgaaagacagcaacaccaagaaggccggcaagacaggccccatgaaaaccctgctggttagagtgatgacacccgatctgagagagcggctggaaaacctgagaaagaagcctgaaaatatcccccagcccatcagcaatacatctagagccaacctgaataagctgctgaccgattacaccgaaatgaagaaggcgatcctgcatgtgtactgggaagagttccagaaggaccctgtgggcctgatgagccgggtggcccagcctgccagcaagaagatcgatcagaacaagctgaaacctgagatggacgagaagggcaacctgaccaccgccggctttgcctgctctcagtgtggccagcccctgttcgtgtacaagctggagcaggtgtctgagaagggcaaggcttacaccaactacttcggacggtgcaatgtggccgagcacgaaaagctgatcctgctggcccagctgaagcccgagaaggatagcgacgaagccgtgacatatagcctgggaaagtttgggcagagggccctggatttctacagcattcatgtgaccaaggagtccacccaccccgtgaagcccctggcccagatcgccggaaacagatacgcctccggacctgtgggaaaggccctgagcgacgcatgtatgggcacaatcgcctccttcctgtctaagtaccaggacatcatcatcgaacaccagaaggtggtgaagggcaaccagaagagactggagagcctgcgggagctggccggcaaggaaaacctggaataccctagcgtgaccctgccacctcagcctcacaccaaggagggcgttgatgcctacaacgaagtgatcgcccgggtgcgaatgtgggtgaacctgaacctgtggcagaagctgaagctaagcagagatgatgccaagcctctgctgagactgaagggattcccttcctttcctctggtcgagagacaggccaacgaagtggactggtgggacatggtgtgtaacgtgaagaagctgatcaacgagaaaaaggaggatggcaaggtgttttggcagaatctggctggctacaagagacaggaagccctgagaccatacctgagcagcgaggaagatcggaagaagggaaagaaattcgctcggtaccagctgggcgacctgctgctgcacctggaaaagaagcacggcgaggactggggaaaggtgtacgacgaggcctgggagcggattgacaagaaagtggaaggcctgagcaagcacatcaagctggaagaggaacggagaagcgaggacgcccagagcaaggccgccctgaccgactggctgcgggctaaggccagcttcgtgatcgagggcctgaaggaggccgacaaggacgagttctgcagatgcgagctgaagctgcagaagtggtacggggacctgcggggaaagcccttcgccatcgaagccgagaacagcatcctggacatcagcggcttcagcaagcagtacaactgtgccttcatctggcagaaggacggcgtgaagaagctgaacctgtacctgatcatcaactacttcaagggcggcaagctgcggttcaagaagatcaaacctgaagccttcgaagccaacagattctacaccgtgatcaacaaaaagagcggcgagatcgtgcccatggaggtgaacttcaacttcgacgaccccaacctgatcatcctgcctctggcctttggcaagagacagggcagagaattcatctggaacgacctgctgtccctggaaaccggcagcctgaagctggccaacggaagagtgatcgagaagacactgtacaacagaagaacccggcaggatgagcctgccctgttcgtggccctgaccttcgagcggcgggaggtcctggactcctccaatatcaaaccaatgaacctgatcggcgtggcaagaggcgaaaacatccccgccgtgatcgccctgaccgaccccgagggctgcccactgagccggtttaaggatagcctgggaaacccaacccacatcctgagaatcggcgagagctataaggagaagcagcggaccatccaggccaagaaggaggtggagcagcggagagccggcggctacagccggaagtacgccagcaaagccaagaatctggcagacgatatggtgagaaacaccgctagagatctgctgtactacgccgtgacccaggatgccatgctgatcttcgccaacctgagccggggcttcggccggcagggcaagcggaccttcatggccgagagacagtacacacggatggaggactggctgaccgccaagctggcctacgagggcctgagcaagacctacctgtccaagacactggcccagtacacctccaagacatgcagcaactgtgggtttaccatcaccagcgccgactacgacagggtgctggagaagctgaagaagacagcaacaggctggatgaccacaattaacggcaaggagctgaaggtggagggccagattacctactacaacagatacaagagacagaacgtagtcaaggacctgtccgtcgagctggatagactgagcgaagaatctgtgaacaacgacatctcctcctggacaaagggcagaagcggagaagctctgagcctcctgaagaaaagattctcccatagacccgtgcaggagaagttcgtgtgcctgaactgcggcttcgagacacacgcagccgagcaagccgccctgaacatcgccagatcctggctgttcctgcggagccaggagtacaagaaataccagacaaacaagacaaccggcaacaccgataagagagccttcgtcgagacctggcagtccttttaccggaagaagcttaaggaggtgtggaaacctgccgtgcggtctggcggatctggcggaggctccctgctgaccttcgaggacgtggccgtgagcttcagcgaggaggagtggaggctgctggaccccgcccagaagagcctgtacaacgacgtgatgcaggagaactacgagaccatcgtgagcctgggcctgaagctgaagaacgacaccggcaacgaccagcccatcagcctgagcgccctggagatccaggccagcggctgcagggtgctgaggaaggccaggatgaaggtggcccagaagaccggcggcccaagcagcggcgcccctcctcccagcggcggcagcccagccggctccccaacctctaccgaggagggcacctctgagtccgccacccccgagagcggccctggcacctccaccgagcccagcgagggcagcgcacccggcagccctgccggcagccccacctccacagaggagggaaccagcaccgagcccagcgaaggcagcgccccaggcaccagcaccgagcctagtgagcaggagattaaacggatcaacaagatcagaagaagacttgtgaaagacagcaacaccaagaaggccggcaagacaggccccatgaaaaccctgctggttagagtgatgacacccgatctgagagagcggctggaaaacctgagaaagaagcctgaaaatatcccccagcccatcagcaatacatctagagccaacctgaataagctgctgaccgattacaccgaaatgaagaaggcgatcctgcatgtgtactgggaagagttccagaaggaccctgtgggcctgatgagccgggtggcccagcctgccagcaagaagatcgatcagaacaagctgaaacctgagatggacgagaagggcaacctgaccaccgccggctttgcctgctctcagtgtggccagcccctgttcgtgtacaagctggagcaggtgtctgagaagggcaaggcttacaccaactacttcggacggtgcaatgtggccgagcacgaaaagctgatcctgctggcccagctgaagcccgagaaggatagcgacgaagccgtgacatatagcctgggaaagtttgggcagagggccctggatttctacagcattcatgtgaccaaggagtccacccaccccgtgaagcccctggcccagatcgccggaaacagatacgcctccggacctgtgggaaaggccctgagcgacgcatgtatgggcacaatcgcctccttcctgtctaagtaccaggacatcatcatcgaacaccagaaggtggtgaagggcaaccagaagagactggagagcctgcgggagctggccggcaaggaaaacctggaataccctagcgtgaccctgccacctcagcctcacaccaaggagggcgttgatgcctacaacgaagtgatcgcccgggtgcgaatgtgggtgaacctgaacctgtggcagaagctgaagctaagcagagatgatgccaagcctctgctgagactgaagggattcccttcctttcctctggtcgagagacaggccaacgaagtggactggtgggacatggtgtgtaacgtgaagaagctgatcaacgagaaaaaggaggatggcaaggtgttttggcagaatctggctggctacaagagacaggaagccctgagaccatacctgagcagcgaggaagatcggaagaagggaaagaaattcgctcggtaccagctgggcgacctgctgctgcacctggaaaagaagcacggcgaggactggggaaaggtgtacgacgaggcctgggagcggattgacaagaaagtggaaggcctgagcaagcacatcaagctggaagaggaacggagaagcgaggacgcccagagcaaggccgccctgaccgactggctgcgggctaaggccagcttcgtgatcgagggcctgaaggaggccgacaaggacgagttctgcagatgcgagctgaagctgcagaagtggtacggggacctgcggggaaagcccttcgccatcgaagccgagaacagcatcctggacatcagcggcttcagcaagcagtacaactgtgccttcatctggcagaaggacggcgtgaagaagctgaacctgtacctgatcatcaactacttcaagggcggcaagctgcggttcaagaagatcaaacctgaagccttcgaagccaacagattctacaccgtgatcaacaaaaagagcggcgagatcgtgcccatggaggtgaacttcaacttcgacgaccccaacctgatcatcctgcctctggcctttggcaagagacagggcagagaattcatctggaacgacctgctgtccctggaaaccggcagcctgaagctggccaacggaagagtgatcgagaagacactgtacaacagaagaacccggcaggatgagcctgccctgttcgtggccctgaccttcgagcggcgggaggtcctggactcctccaatatcaaaccaatgaacctgatcggcgtggcaagaggcgaaaacatccccgccgtgatcgccctgaccgaccccgagggctgcccactgagccggtttaaggatagcctgggaaacccaacccacatcctgagaatcggcgagagctataaggagaagcagcggaccatccaggccaagaaggaggtggagcagcggagagccggcggctacagccggaagtacgccagcaaagccaagaatctggcagacgatatggtgagaaacaccgctagagatctgctgtactacgccgtgacccaggatgccatgctgatcttcgccaacctgagccggggcttcggccggcagggcaagcggaccttcatggccgagagacagtacacacggatggaggactggctgaccgccaagctggcctacgagggcctgagcaagacctacctgtccaagacactggcccagtacacctccaagacatgcagcaactgtgggtttaccatcaccagcgccgactacgacagggtgctggagaagctgaagaagacagcaacaggctggatgaccacaattaacggcaaggagctgaaggtggagggccagattacctactacaacagatacaagagacagaacgtagtcaaggacctgtccgtcgagctggatagactgagcgaagaatctgtgaacaacgacatctcctcctggacaaagggcagaagcggagaagctctgagcctcctgaagaaaagattctcccatagacccgtgcaggagaagttcgtgtgcctgaactgcggcttcgagacacacgcagccgagcaagccgccctgaacatcgccagatcctggctgttcctgcggagccaggagtacaagaaataccagacaaacaagacaaccggcaacaccgataagagagccttcgtcgagacctggcagtccttttaccggaagaagcttaaggaggtgtggaaacctgccgtgcggtctggcggatctggcggaggctcctctgctgaccttcgaggacgtggccgtgagcttcagcgaggaggagtggaggctgctggaccccgcccagaagagcctgtacaacgacgtgatgcaggagaactacgagaccatcgtgagcctgggcctgaagctgaagaacgacaccggcaacgaccagcccatcagcctgagcgccctggagatccaggccagcggctgcagggtgctgaggaaggccaggatgaaggtggcccagaagaccggatctggctccggcagcggccccaagaaaaagagaaaagtctaagctgccttctgcggggcttgccttctggccatgcccttcttctctcccttgcacctgtacctcttggtctttgaataaagcctgagtaggaaggctagcaaaaaaaaaaaaaaaaaaaaaaaaaaaaaaaaaaaaaaaaaaaaaaaaaaaaaaaaaaaaaaaaaaaaaaaaaaaaaaaa

SEQ ID NO: 15890 - RNA, 9485 nt, synthetic construct
  source 1..9485: mol_type = other RNA
aggaaataagagagaaaagaagagtaagaagaaatataagagccaccatggcccctaagaagaagcgtaaagtgagccggatggaacgcctcgtctacgaggtgcggcagaagtgcagaaacatcgaggacatctgcatctcctgcggatctctgaacgtgaccctggagcacccactgttcatcggcggcatgtgccagaactgtaaaaactgttttctggagtgtgcctatcaatacgacgatgacggctaccagagctactgcaccatctgttgcggcggaagagaggtgctgatgtgtggaaataacaactgctgccggtgcttctgcgtggaatgcgtggacctgctggtgggccccggcgccgcccaggccgctattaaggaagatccttggaactgctacatgtgcggccacaagggcacatacggcctgctgagacggagagaggactggcctagcagactgcagatgttcttcgccaataaccacgaccaggagttcgacccccctaaggtgtaccctcccgtccccgccgagaagagaaagcccatccgggtcctgagcctgttcgatggcatcgccaccggtctgctggtgctgaaggacctgggcatccaggtggataggtacattgcctccgaggtgtgcgaggactccatcaccgtgggaatggtgcgtcatcagggcaagatcatgtacgtgggcgacgtgcggagcgtgacacagaagcatatccaggagtggggccctttcgacctggtgatcggcggcagcccttgcaatgacctgagcatcgtgaacccagcccggaagggcctgtacgagggaaccggcagactgttcttcgagttttacagactgctgcacgacgcccggcctaaggaaggcgacgaccggcccttcttttggctgttcgagaatgtggtggccatgggagtcagcgacaagcgggatattagccggttcctggagagcaaccccgtgatgatcgatgccaaggaagtgagcgccgcccaccgggccagatacttctggggcaatctgcctggcatgaacagacccctggccagcaccgtgaacgacaagctggagctgcaggagtgcctggagcacggccggatcgccaagttcagcaaggtgagaaccatcaccacccgaagcaacagcatcaaacaaggcaaggaccagcactttcctgtgttcatgaacgagaaggaggacatcctgtggtgtaccgagatggagagagtgttcgggttcccagtccactacacagatgtcagcaacatgtctagactggccagacagagactgctgggaagaagctggtccgtccctgtgatcagacacctgttcgcccctctgaaggagtacttcgcctgcgtgagcagcggcaacagcaacgccaacagccggggccccagcttctctagcggcctggtgccactgtccctgagagggagccacatgggccccatggagatctacaaaaccgtgagcgcctggaagcggcagcctgtgcgcgtgctgagcctgtttcggaatatcgataaagtcctgaaaagcctgggattcctggagagcggctctggctccggcggtggcaccctgaagtacgtggaggatgtgacaaacgtggtcagacgggatgtggagaagtggggccccttcgatctggtgtacggcagcacccaacccctgggcagctcttgtgaccggtgccctggctggtacatgtttcagttccaccggatcctgcagtacgccctgccgagacaggagtcccagcggccattcttttggattttcatggacaacttgctgctgaccgaggatgaccaggaaactaccactcggttcctgcagaccgaagccgtgaccctgcaggacgtgagaggccgggactaccagaacgccatgcgggtgtggtccaacatccctggactgaaaagcaagcacgcacctctgacccctaaagaagaggagtacctgcaggcccaggtgcggagcagaagcaagctggacgcccctaaggtggatctgctggtgaagaattgcctcctgcccctgagagagtacttcaagtatttcagccagaatagtctgcccctgggaggcagcggcggcggcgccctggtgacatttgaggacgtcgccgtgcggttcacccaggaggaatgggctctgctggatccttctcagaaaatcctgtaccgggacgtgatgagagagacataccggaatctgacctccgtgggcatcaactgggaatgttgggaccttgaagcctgcttcagaagcctgggaagaaacctgagagtgcaggtggtgaagagaaagtgcgagctgaccaacagcggcccctgcgccgagggcggcccaagcagcggcgcccctcctcccagcggcggcagcccagccggctccccaacctctaccgaggagggcacctctgagtccgccacccccgagagcggccctggcacctccaccgagcccagcgagggcagcgcacccggcagccctgccggcagccccacctccacagaggagggaaccagcaccgagcccagcgaaggcagcgccccaggcaccagcaccgagcctagtgagcaggagattaaacggatcaacaagatcagaagaagacttgtgaaagacagcaacaccaagaaggccggcaagacaggccccatgaaaaccctgctggttagagtgatgacacccgatctgagagagcggctggaaaacctgagaaagaagcctgaaaatatcccccagcccatcagcaatacatctagagccaacctgaataagctgctgaccgattacaccgaaatgaagaaggcgatcctgcatgtgtactgggaagagttccagaaggaccctgtgggcctgatgagccgggtggcccagcctgccagcaagaagatcgatcagaacaagctgaaacctgagatggacgagaagggcaacctgaccaccgccggctttgcctgctctcagtgtggccagcccctgttcgtgtacaagctggagcaggtgtctgagaagggcaaggcttacaccaactacttcggacggtgcaatgtggccgagcacgaaaagctgatcctgctggcccagctgaagcccgagaaggatagcgacgaagccgtgacatatagcctgggaaagtttgggcagagggccctggatttctacagcattcatgtgaccaaggagtccacccaccccgtgaagcccctggcccagatcgccggaaacagatacgcctccggacctgtgggaaaggccctgagcgacgcatgtatgggcacaatcgcctccttcctgtctaagtaccaggacatcatcatcgaacaccagaaggtggtgaagggcaaccagaagagactggagagcctgcgggagctggccggcaaggaaaacctggaataccctagcgtgaccctgccacctcagcctcacaccaaggagggcgttgatgcctacaacgaagtgatcgcccgggtgcgaatgtgggtgaacctgaacctgtggcagaagctgaagctaagcagagatgatgccaagcctctgctgagactgaagggattcccttcctttcctctggtcgagagacaggccaacgaagtggactggtgggacatggtgtgtaacgtgaagaagctgatcaacgagaaaaaggaggatggcaaggtgttttggcagaatctggctggctacaagagacaggaagccctgagaccatacctgagcagcgaggaagatcggaagaagggaaagaaattcgctcggtaccagctgggcgacctgctgctgcacctggaaaagaagcacggcgaggactggggaaaggtgtacgacgaggcctgggagcggattgacaagaaagtggaaggcctgagcaagcacatcaagctggaagaggaacggagaagcgaggacgcccagagcaaggccgccctgaccgactggctgcgggctaaggccagcttcgtgatcgagggcctgaaggaggccgacaaggacgagttctgcagatgcgagctgaagctgcagaagtggtacggggacctgcggggaaagcccttcgccatcgaagccgagaacagcatcctggacatcagcggcttcagcaagcagtacaactgtgccttcatctggcagaaggacggcgtgaagaagctgaacctgtacctgatcatcaactacttcaagggcggcaagctgcggttcaagaagatcaaacctgaagccttcgaagccaacagattctacaccgtgatcaacaaaaagagcggcgagatcgtgcccatggaggtgaacttcaacttcgacgaccccaacctgatcatcctgcctctggcctttggcaagagacagggcagagaattcatctggaacgacctgctgtccctggaaaccggcagcctgaagctggccaacggaagagtgatcgagaagacactgtacaacagaagaacccggcaggatgagcctgccctgttcgtggccctgaccttcgagcggcgggaggtcctggactcctccaatatcaaaccaatgaacctgatcggcgtggcaagaggcgaaaacatccccgccgtgatcgccctgaccgaccccgagggctgcccactgagccggtttaaggatagcctgggaaacccaacccacatcctgagaatcggcgagagctataaggagaagcagcggaccatccaggccaagaaggaggtggagcagcggagagccggcggctacagccggaagtacgccagcaaagccaagaatctggcagacgatatggtgagaaacaccgctagagatctgctgtactacgccgtgacccaggatgccatgctgatcttcgccaacctgagccggggcttcggccggcagggcaagcggaccttcatggccgagagacagtacacacggatggaggactggctgaccgccaagctggcctacgagggcctgagcaagacctacctgtccaagacactggcccagtacacctccaagacatgcagcaactgtgggtttaccatcaccagcgccgactacgacagggtgctggagaagctgaagaagacagcaacaggctggatgaccacaattaacggcaaggagctgaaggtggagggccagattacctactacaacagatacaagagacagaacgtagtcaaggacctgtccgtcgagctggatagactgagcgaagaatctgtgaacaacgacatctcctcctggacaaagggcagaagcggagaagctctgagcctcctgaagaaaagattctcccatagacccgtgcaggagaagttcgtgtgcctgaactgcggcttcgagacacacgcagccgagcaagccgccctgaacatcgccagatcctggctgttcctgcggagccaggagtacaagaaataccagacaaacaagacaaccggcaacaccgataagagagccttcgtcgagacctggcagtccttttaccggaagaagcttaaggaggtgtggaaacctgccgtgcggtctggcggatctggcggaggctccagccacaccctggtgaccttcaaggacatcctggtgaacttcaccagggaggagtggaagctgctggacaccgcccagcagatcatgtacaaggacgtgatgctggagaactacaggaacctggtgagcctgggccaccagctgcccaagcccgacgtgatcctgaggctggagaagggcgaggagccctggctggtggagaaggagatccaccaggagacccaccccgacctggagacccccggcggcccaagcagcggcgcccctcctcccagcggcggcagcccagccggctccccaacctctaccgaggagggcacctctgagtccgccacccccgagagcggccctggcacctccaccgagcccagcgagggcagcgcacccggcagccctgccggcagccccacctccacagaggagggaaccagcaccgagcccagcgaaggcagcgccccaggcaccagcaccgagcctagtgagcaggagattaaacggatcaacaagatcagaagaagacttgtgaaagacagcaacaccaagaaggccggcaagacaggccccatgaaaaccctgctggttagagtgatgacacccgatctgagagagcggctggaaaacctgagaaagaagcctgaaaatatcccccagcccatcagcaatacatctagagccaacctgaataagctgctgaccgattacaccgaaatgaagaaggcgatcctgcatgtgtactgggaagagttccagaaggaccctgtgggcctgatgagccgggtggcccagcctgccagcaagaagatcgatcagaacaagctgaaacctgagatggacgagaagggcaacctgaccaccgccggctttgcctgctctcagtgtggccagcccctgttcgtgtacaagctggagcaggtgtctgagaagggcaaggcttacaccaactacttcggacggtgcaatgtggccgagcacgaaaagctgatcctgctggcccagctgaagcccgagaaggatagcgacgaagccgtgacatatagcctgggaaagtttgggcagagggccctggatttctacagcattcatgtgaccaaggagtccacccaccccgtgaagcccctggcccagatcgccggaaacagatacgcctccggacctgtgggaaaggccctgagcgacgcatgtatgggcacaatcgcctccttcctgtctaagtaccaggacatcatcatcgaacaccagaaggtggtgaagggcaaccagaagagactggagagcctgcgggagctggccggcaaggaaaacctggaataccctagcgtgaccctgccacctcagcctcacaccaaggagggcgttgatgcctacaacgaagtgatcgcccgggtgcgaatgtgggtgaacctgaacctgtggcagaagctgaagctaagcagagatgatgccaagcctctgctgagactgaagggattcccttcctttcctctggtcgagagacaggccaacgaagtggactggtgggacatggtgtgtaacgtgaagaagctgatcaacgagaaaaaggaggatggcaaggtgttttggcagaatctggctggctacaagagacaggaagccctgagaccatacctgagcagcgaggaagatcggaagaagggaaagaaattcgctcggtaccagctgggcgacctgctgctgcacctggaaaagaagcacggcgaggactggggaaaggtgtacgacgaggcctgggagcggattgacaagaaagtggaaggcctgagcaagcacatcaagctggaagaggaacggagaagcgaggacgcccagagcaaggccgccctgaccgactggctgcgggctaaggccagcttcgtgatcgagggcctgaaggaggccgacaaggacgagttctgcagatgcgagctgaagctgcagaagtggtacggggacctgcggggaaagcccttcgccatcgaagccgagaacagcatcctggacatcagcggcttcagcaagcagtacaactgtgccttcatctggcagaaggacggcgtgaagaagctgaacctgtacctgatcatcaactacttcaagggcggcaagctgcggttcaagaagatcaaacctgaagccttcgaagccaacagattctacaccgtgatcaacaaaaagagcggcgagatcgtgcccatggaggtgaacttcaacttcgacgaccccaacctgatcatcctgcctctggcctttggcaagagacagggcagagaattcatctggaacgacctgctgtccctggaaaccggcagcctgaagctggccaacggaagagtgatcgagaagacactgtacaacagaagaacccggcaggatgagcctgccctgttcgtggccctgaccttcgagcggcgggaggtcctggactcctccaatatcaaaccaatgaacctgatcggcgtggcaagaggcgaaaacatccccgccgtgatcgccctgaccgaccccgagggctgcccactgagccggtttaaggatagcctgggaaacccaacccacatcctgagaatcggcgagagctataaggagaagcagcggaccatccaggccaagaaggaggtggagcagcggagagccggcggctacagccggaagtacgccagcaaagccaagaatctggcagacgatatggtgagaaacaccgctagagatctgctgtactacgccgtgacccaggatgccatgctgatcttcgccaacctgagccggggcttcggccggcagggcaagcggaccttcatggccgagagacagtacacacggatggaggactggctgaccgccaagctggcctacgagggcctgagcaagacctacctgtccaagacactggcccagtacacctccaagacatgcagcaactgtgggtttaccatcaccagcgccgactacgacagggtgctggagaagctgaagaagacagcaacaggctggatgaccacaattaacggcaaggagctgaaggtggagggccagattacctactacaacagatacaagagacagaacgtagtcaaggacctgtccgtcgagctggatagactgagcgaagaatctgtgaacaacgacatctcctcctggacaaagggcagaagcggagaagctctgagcctcctgaagaaaagattctcccatagacccgtgcaggagaagttcgtgtgcctgaactgcggcttcgagacacacgcagccgagcaagccgccctgaacatcgccagatcctggctgttcctgcggagccaggagtacaagaaataccagacaaacaagacaaccggcaacaccgataagagagccttcgtcgagacctggcagtccttttaccggaagaagcttaaggaggtgtggaaacctgccgtgcggtctggcggatctggcggaggctcctagccacaccctggtgaccttcaaggacatcctggtgaacttcaccagggaggagtggaagctgctggacaccgcccagcagatcatgtacaaggacgtgatgctggagaactacaggaacctggtgagcctgggccaccagctgcccaagcccgacgtgatcctgaggctggagaagggcgaggagccctggctggtggagaaggagatccaccaggagacccaccccgacctggagacccccggatctggctccggcagcggccccaagaaaaagagaaaagtctaagctgccttctgcggggcttgccttctggccatgcccttcttctctcccttgcacctgtacctcttggtctttgaataaagcctgagtaggaaggctagcaaaaaaaaaaaaaaaaaaaaaaaaaaaaaaaaaaaaaaaaaaaaaaaaaaaaaaaaaaaaaaaaaaaaaaaaaaaaaaaa

SEQ ID NO: 15891 - RNA, 9485 nt, synthetic construct
  source 1..9485: mol_type = other RNA
aggaaataagagagaaaagaagagtaagaagaaatataagagccaccatggcccctaagaagaagcgtaaagtgagccggatggaacgcctcgtctacgaggtgcggcagaagtgcagaaacatcgaggacatctgcatctcctgcggatctctgaacgtgaccctggagcacccactgttcatcggcggcatgtgccagaactgtaaaaactgttttctggagtgtgcctatcaatacgacgatgacggctaccagagctactgcaccatctgttgcggcggaagagaggtgctgatgtgtggaaataacaactgctgccggtgcttctgcgtggaatgcgtggacctgctggtgggccccggcgccgcccaggccgctattaaggaagatccttggaactgctacatgtgcggccacaagggcacatacggcctgctgagacggagagaggactggcctagcagactgcagatgttcttcgccaataaccacgaccaggagttcgacccccctaaggtgtaccctcccgtccccgccgagaagagaaagcccatccgggtcctgagcctgttcgatggcatcgccaccggtctgctggtgctgaaggacctgggcatccaggtggataggtacattgcctccgaggtgtgcgaggactccatcaccgtgggaatggtgcgtcatcagggcaagatcatgtacgtgggcgacgtgcggagcgtgacacagaagcatatccaggagtggggccctttcgacctggtgatcggcggcagcccttgcaatgacctgagcatcgtgaacccagcccggaagggcctgtacgagggaaccggcagactgttcttcgagttttacagactgctgcacgacgcccggcctaaggaaggcgacgaccggcccttcttttggctgttcgagaatgtggtggccatgggagtcagcgacaagcgggatattagccggttcctggagagcaaccccgtgatgatcgatgccaaggaagtgagcgccgcccaccgggccagatacttctggggcaatctgcctggcatgaacagacccctggccagcaccgtgaacgacaagctggagctgcaggagtgcctggagcacggccggatcgccaagttcagcaaggtgagaaccatcaccacccgaagcaacagcatcaaacaaggcaaggaccagcactttcctgtgttcatgaacgagaaggaggacatcctgtggtgtaccgagatggagagagtgttcgggttcccagtccactacacagatgtcagcaacatgtctagactggccagacagagactgctgggaagaagctggtccgtccctgtgatcagacacctgttcgcccctctgaaggagtacttcgcctgcgtgagcagcggcaacagcaacgccaacagccggggccccagcttctctagcggcctggtgccactgtccctgagagggagccacatgggccccatggagatctacaaaaccgtgagcgcctggaagcggcagcctgtgcgcgtgctgagcctgtttcggaatatcgataaagtcctgaaaagcctgggattcctggagagcggctctggctccggcggtggcaccctgaagtacgtggaggatgtgacaaacgtggtcagacgggatgtggagaagtggggccccttcgatctggtgtacggcagcacccaacccctgggcagctcttgtgaccggtgccctggctggtacatgtttcagttccaccggatcctgcagtacgccctgccgagacaggagtcccagcggccattcttttggattttcatggacaacttgctgctgaccgaggatgaccaggaaactaccactcggttcctgcagaccgaagccgtgaccctgcaggacgtgagaggccgggactaccagaacgccatgcgggtgtggtccaacatccctggactgaaaagcaagcacgcacctctgacccctaaagaagaggagtacctgcaggcccaggtgcggagcagaagcaagctggacgcccctaaggtggatctgctggtgaagaattgcctcctgcccctgagagagtacttcaagtatttcagccagaatagtctgcccctgggaggcagcggcggcggcgccctggtgacatttgaggacgtcgccgtgcggttcacccaggaggaatgggctctgctggatccttctcagaaaatcctgtaccgggacgtgatgagagagacataccggaatctgacctccgtgggcatcaactgggaatgttgggaccttgaagcctgcttcagaagcctgggaagaaacctgagagtgcaggtggtgaagagaaagtgcgagctgaccaacagcggcccctgcgccgagggcggcccaagcagcggcgcccctcctcccagcggcggcagcccagccggctccccaacctctaccgaggagggcacctctgagtccgccacccccgagagcggccctggcacctccaccgagcccagcgagggcagcgcacccggcagccctgccggcagccccacctccacagaggagggaaccagcaccgagcccagcgaaggcagcgccccaggcaccagcaccgagcctagtgagcaggagattaaacggatcaacaagatcagaagaagacttgtgaaagacagcaacaccaagaaggccggcaagacaggccccatgaaaaccctgctggttagagtgatgacacccgatctgagagagcggctggaaaacctgagaaagaagcctgaaaatatcccccagcccatcagcaatacatctagagccaacctgaataagctgctgaccgattacaccgaaatgaagaaggcgatcctgcatgtgtactgggaagagttccagaaggaccctgtgggcctgatgagccgggtggcccagcctgccagcaagaagatcgatcagaacaagctgaaacctgagatggacgagaagggcaacctgaccaccgccggctttgcctgctctcagtgtggccagcccctgttcgtgtacaagctggagcaggtgtctgagaagggcaaggcttacaccaactacttcggacggtgcaatgtggccgagcacgaaaagctgatcctgctggcccagctgaagcccgagaaggatagcgacgaagccgtgacatatagcctgggaaagtttgggcagagggccctggatttctacagcattcatgtgaccaaggagtccacccaccccgtgaagcccctggcccagatcgccggaaacagatacgcctccggacctgtgggaaaggccctgagcgacgcatgtatgggcacaatcgcctccttcctgtctaagtaccaggacatcatcatcgaacaccagaaggtggtgaagggcaaccagaagagactggagagcctgcgggagctggccggcaaggaaaacctggaataccctagcgtgaccctgccacctcagcctcacaccaaggagggcgttgatgcctacaacgaagtgatcgcccgggtgcgaatgtgggtgaacctgaacctgtggcagaagctgaagctaagcagagatgatgccaagcctctgctgagactgaagggattcccttcctttcctctggtcgagagacaggccaacgaagtggactggtgggacatggtgtgtaacgtgaagaagctgatcaacgagaaaaaggaggatggcaaggtgttttggcagaatctggctggctacaagagacaggaagccctgagaccatacctgagcagcgaggaagatcggaagaagggaaagaaattcgctcggtaccagctgggcgacctgctgctgcacctggaaaagaagcacggcgaggactggggaaaggtgtacgacgaggcctgggagcggattgacaagaaagtggaaggcctgagcaagcacatcaagctggaagaggaacggagaagcgaggacgcccagagcaaggccgccctgaccgactggctgcgggctaaggccagcttcgtgatcgagggcctgaaggaggccgacaaggacgagttctgcagatgcgagctgaagctgcagaagtggtacggggacctgcggggaaagcccttcgccatcgaagccgagaacagcatcctggacatcagcggcttcagcaagcagtacaactgtgccttcatctggcagaaggacggcgtgaagaagctgaacctgtacctgatcatcaactacttcaagggcggcaagctgcggttcaagaagatcaaacctgaagccttcgaagccaacagattctacaccgtgatcaacaaaaagagcggcgagatcgtgcccatggaggtgaacttcaacttcgacgaccccaacctgatcatcctgcctctggcctttggcaagagacagggcagagaattcatctggaacgacctgctgtccctggaaaccggcagcctgaagctggccaacggaagagtgatcgagaagacactgtacaacagaagaacccggcaggatgagcctgccctgttcgtggccctgaccttcgagcggcgggaggtcctggactcctccaatatcaaaccaatgaacctgatcggcgtggcaagaggcgaaaacatccccgccgtgatcgccctgaccgaccccgagggctgcccactgagccggtttaaggatagcctgggaaacccaacccacatcctgagaatcggcgagagctataaggagaagcagcggaccatccaggccaagaaggaggtggagcagcggagagccggcggctacagccggaagtacgccagcaaagccaagaatctggcagacgatatggtgagaaacaccgctagagatctgctgtactacgccgtgacccaggatgccatgctgatcttcgccaacctgagccggggcttcggccggcagggcaagcggaccttcatggccgagagacagtacacacggatggaggactggctgaccgccaagctggcctacgagggcctgagcaagacctacctgtccaagacactggcccagtacacctccaagacatgcagcaactgtgggtttaccatcaccagcgccgactacgacagggtgctggagaagctgaagaagacagcaacaggctggatgaccacaattaacggcaaggagctgaaggtggagggccagattacctactacaacagatacaagagacagaacgtagtcaaggacctgtccgtcgagctggatagactgagcgaagaatctgtgaacaacgacatctcctcctggacaaagggcagaagcggagaagctctgagcctcctgaagaaaagattctcccatagacccgtgcaggagaagttcgtgtgcctgaactgcggcttcgagacacacgcagccgagcaagccgccctgaacatcgccagatcctggctgttcctgcggagccaggagtacaagaaataccagacaaacaagacaaccggcaacaccgataagagagccttcgtcgagacctggcagtccttttaccggaagaagcttaaggaggtgtggaaacctgccgtgcggtctggcggatctggcggaggctccatgaacatggagggcctggtgatgttccaggacctgagcatcgacttcagccaggaggagtgggagtgcctgaaccccgcccagaaggacctgtacagggacgtgatgatggagaactacagcagcctgctgagcctgggcctgagcatccccaagcccgacgtgatcagcctgctggagcagggcaaggagccctggatggtgagcagggacatcctgggcggctggtgccccgacaggctgggcggcccaagcagcggcgcccctcctcccagcggcggcagcccagccggctccccaacctctaccgaggagggcacctctgagtccgccacccccgagagcggccctggcacctccaccgagcccagcgagggcagcgcacccggcagccctgccggcagccccacctccacagaggagggaaccagcaccgagcccagcgaaggcagcgccccaggcaccagcaccgagcctagtgagcaggagattaaacggatcaacaagatcagaagaagacttgtgaaagacagcaacaccaagaaggccggcaagacaggccccatgaaaaccctgctggttagagtgatgacacccgatctgagagagcggctggaaaacctgagaaagaagcctgaaaatatcccccagcccatcagcaatacatctagagccaacctgaataagctgctgaccgattacaccgaaatgaagaaggcgatcctgcatgtgtactgggaagagttccagaaggaccctgtgggcctgatgagccgggtggcccagcctgccagcaagaagatcgatcagaacaagctgaaacctgagatggacgagaagggcaacctgaccaccgccggctttgcctgctctcagtgtggccagcccctgttcgtgtacaagctggagcaggtgtctgagaagggcaaggcttacaccaactacttcggacggtgcaatgtggccgagcacgaaaagctgatcctgctggcccagctgaagcccgagaaggatagcgacgaagccgtgacatatagcctgggaaagtttgggcagagggccctggatttctacagcattcatgtgaccaaggagtccacccaccccgtgaagcccctggcccagatcgccggaaacagatacgcctccggacctgtgggaaaggccctgagcgacgcatgtatgggcacaatcgcctccttcctgtctaagtaccaggacatcatcatcgaacaccagaaggtggtgaagggcaaccagaagagactggagagcctgcgggagctggccggcaaggaaaacctggaataccctagcgtgaccctgccacctcagcctcacaccaaggagggcgttgatgcctacaacgaagtgatcgcccgggtgcgaatgtgggtgaacctgaacctgtggcagaagctgaagctaagcagagatgatgccaagcctctgctgagactgaagggattcccttcctttcctctggtcgagagacaggccaacgaagtggactggtgggacatggtgtgtaacgtgaagaagctgatcaacgagaaaaaggaggatggcaaggtgttttggcagaatctggctggctacaagagacaggaagccctgagaccatacctgagcagcgaggaagatcggaagaagggaaagaaattcgctcggtaccagctgggcgacctgctgctgcacctggaaaagaagcacggcgaggactggggaaaggtgtacgacgaggcctgggagcggattgacaagaaagtggaaggcctgagcaagcacatcaagctggaagaggaacggagaagcgaggacgcccagagcaaggccgccctgaccgactggctgcgggctaaggccagcttcgtgatcgagggcctgaaggaggccgacaaggacgagttctgcagatgcgagctgaagctgcagaagtggtacggggacctgcggggaaagcccttcgccatcgaagccgagaacagcatcctggacatcagcggcttcagcaagcagtacaactgtgccttcatctggcagaaggacggcgtgaagaagctgaacctgtacctgatcatcaactacttcaagggcggcaagctgcggttcaagaagatcaaacctgaagccttcgaagccaacagattctacaccgtgatcaacaaaaagagcggcgagatcgtgcccatggaggtgaacttcaacttcgacgaccccaacctgatcatcctgcctctggcctttggcaagagacagggcagagaattcatctggaacgacctgctgtccctggaaaccggcagcctgaagctggccaacggaagagtgatcgagaagacactgtacaacagaagaacccggcaggatgagcctgccctgttcgtggccctgaccttcgagcggcgggaggtcctggactcctccaatatcaaaccaatgaacctgatcggcgtggcaagaggcgaaaacatccccgccgtgatcgccctgaccgaccccgagggctgcccactgagccggtttaaggatagcctgggaaacccaacccacatcctgagaatcggcgagagctataaggagaagcagcggaccatccaggccaagaaggaggtggagcagcggagagccggcggctacagccggaagtacgccagcaaagccaagaatctggcagacgatatggtgagaaacaccgctagagatctgctgtactacgccgtgacccaggatgccatgctgatcttcgccaacctgagccggggcttcggccggcagggcaagcggaccttcatggccgagagacagtacacacggatggaggactggctgaccgccaagctggcctacgagggcctgagcaagacctacctgtccaagacactggcccagtacacctccaagacatgcagcaactgtgggtttaccatcaccagcgccgactacgacagggtgctggagaagctgaagaagacagcaacaggctggatgaccacaattaacggcaaggagctgaaggtggagggccagattacctactacaacagatacaagagacagaacgtagtcaaggacctgtccgtcgagctggatagactgagcgaagaatctgtgaacaacgacatctcctcctggacaaagggcagaagcggagaagctctgagcctcctgaagaaaagattctcccatagacccgtgcaggagaagttcgtgtgcctgaactgcggcttcgagacacacgcagccgagcaagccgccctgaacatcgccagatcctggctgttcctgcggagccaggagtacaagaaataccagacaaacaagacaaccggcaacaccgataagagagccttcgtcgagacctggcagtccttttaccggaagaagcttaaggaggtgtggaaacctgccgtgcggtctggcggatctggcggaggctcctatgaacatggagggcctggtgatgttccaggacctgagcatcgacttcagccaggaggagtgggagtgcctgaaccccgcccagaaggacctgtacagggacgtgatgatggagaactacagcagcctgctgagcctgggcctgagcatccccaagcccgacgtgatcagcctgctggagcagggcaaggagccctggatggtgagcagggacatcctgggcggctggtgccccgacaggctgggatctggctccggcagcggccccaagaaaaagagaaaagtctaagctgccttctgcggggcttgccttctggccatgcccttcttctctcccttgcacctgtacctcttggtctttgaataaagcctgagtaggaaggctagcaaaaaaaaaaaaaaaaaaaaaaaaaaaaaaaaaaaaaaaaaaaaaaaaaaaaaaaaaaaaaaaaaaaaaaaaaaaaaaaa

SEQ ID NO: 15892 - RNA, 9485 nt, synthetic construct
  source 1..9485: mol_type = other RNA
aggaaataagagagaaaagaagagtaagaagaaatataagagccaccatggcccctaagaagaagcgtaaagtgagccggatggaacgcctcgtctacgaggtgcggcagaagtgcagaaacatcgaggacatctgcatctcctgcggatctctgaacgtgaccctggagcacccactgttcatcggcggcatgtgccagaactgtaaaaactgttttctggagtgtgcctatcaatacgacgatgacggctaccagagctactgcaccatctgttgcggcggaagagaggtgctgatgtgtggaaataacaactgctgccggtgcttctgcgtggaatgcgtggacctgctggtgggccccggcgccgcccaggccgctattaaggaagatccttggaactgctacatgtgcggccacaagggcacatacggcctgctgagacggagagaggactggcctagcagactgcagatgttcttcgccaataaccacgaccaggagttcgacccccctaaggtgtaccctcccgtccccgccgagaagagaaagcccatccgggtcctgagcctgttcgatggcatcgccaccggtctgctggtgctgaaggacctgggcatccaggtggataggtacattgcctccgaggtgtgcgaggactccatcaccgtgggaatggtgcgtcatcagggcaagatcatgtacgtgggcgacgtgcggagcgtgacacagaagcatatccaggagtggggccctttcgacctggtgatcggcggcagcccttgcaatgacctgagcatcgtgaacccagcccggaagggcctgtacgagggaaccggcagactgttcttcgagttttacagactgctgcacgacgcccggcctaaggaaggcgacgaccggcccttcttttggctgttcgagaatgtggtggccatgggagtcagcgacaagcgggatattagccggttcctggagagcaaccccgtgatgatcgatgccaaggaagtgagcgccgcccaccgggccagatacttctggggcaatctgcctggcatgaacagacccctggccagcaccgtgaacgacaagctggagctgcaggagtgcctggagcacggccggatcgccaagttcagcaaggtgagaaccatcaccacccgaagcaacagcatcaaacaaggcaaggaccagcactttcctgtgttcatgaacgagaaggaggacatcctgtggtgtaccgagatggagagagtgttcgggttcccagtccactacacagatgtcagcaacatgtctagactggccagacagagactgctgggaagaagctggtccgtccctgtgatcagacacctgttcgcccctctgaaggagtacttcgcctgcgtgagcagcggcaacagcaacgccaacagccggggccccagcttctctagcggcctggtgccactgtccctgagagggagccacatgggccccatggagatctacaaaaccgtgagcgcctggaagcggcagcctgtgcgcgtgctgagcctgtttcggaatatcgataaagtcctgaaaagcctgggattcctggagagcggctctggctccggcggtggcaccctgaagtacgtggaggatgtgacaaacgtggtcagacgggatgtggagaagtggggccccttcgatctggtgtacggcagcacccaacccctgggcagctcttgtgaccggtgccctggctggtacatgtttcagttccaccggatcctgcagtacgccctgccgagacaggagtcccagcggccattcttttggattttcatggacaacttgctgctgaccgaggatgaccaggaaactaccactcggttcctgcagaccgaagccgtgaccctgcaggacgtgagaggccgggactaccagaacgccatgcgggtgtggtccaacatccctggactgaaaagcaagcacgcacctctgacccctaaagaagaggagtacctgcaggcccaggtgcggagcagaagcaagctggacgcccctaaggtggatctgctggtgaagaattgcctcctgcccctgagagagtacttcaagtatttcagccagaatagtctgcccctgggaggcagcggcggcggcgccctggtgacatttgaggacgtcgccgtgcggttcacccaggaggaatgggctctgctggatccttctcagaaaatcctgtaccgggacgtgatgagagagacataccggaatctgacctccgtgggcatcaactgggaatgttgggaccttgaagcctgcttcagaagcctgggaagaaacctgagagtgcaggtggtgaagagaaagtgcgagctgaccaacagcggcccctgcgccgagggcggcccaagcagcggcgcccctcctcccagcggcggcagcccagccggctccccaacctctaccgaggagggcacctctgagtccgccacccccgagagcggccctggcacctccaccgagcccagcgagggcagcgcacccggcagccctgccggcagccccacctccacagaggagggaaccagcaccgagcccagcgaaggcagcgccccaggcaccagcaccgagcctagtgagcaggagattaaacggatcaacaagatcagaagaagacttgtgaaagacagcaacaccaagaaggccggcaagacaggccccatgaaaaccctgctggttagagtgatgacacccgatctgagagagcggctggaaaacctgagaaagaagcctgaaaatatcccccagcccatcagcaatacatctagagccaacctgaataagctgctgaccgattacaccgaaatgaagaaggcgatcctgcatgtgtactgggaagagttccagaaggaccctgtgggcctgatgagccgggtggcccagcctgccagcaagaagatcgatcagaacaagctgaaacctgagatggacgagaagggcaacctgaccaccgccggctttgcctgctctcagtgtggccagcccctgttcgtgtacaagctggagcaggtgtctgagaagggcaaggcttacaccaactacttcggacggtgcaatgtggccgagcacgaaaagctgatcctgctggcccagctgaagcccgagaaggatagcgacgaagccgtgacatatagcctgggaaagtttgggcagagggccctggatttctacagcattcatgtgaccaaggagtccacccaccccgtgaagcccctggcccagatcgccggaaacagatacgcctccggacctgtgggaaaggccctgagcgacgcatgtatgggcacaatcgcctccttcctgtctaagtaccaggacatcatcatcgaacaccagaaggtggtgaagggcaaccagaagagactggagagcctgcgggagctggccggcaaggaaaacctggaataccctagcgtgaccctgccacctcagcctcacaccaaggagggcgttgatgcctacaacgaagtgatcgcccgggtgcgaatgtgggtgaacctgaacctgtggcagaagctgaagctaagcagagatgatgccaagcctctgctgagactgaagggattcccttcctttcctctggtcgagagacaggccaacgaagtggactggtgggacatggtgtgtaacgtgaagaagctgatcaacgagaaaaaggaggatggcaaggtgttttggcagaatctggctggctacaagagacaggaagccctgagaccatacctgagcagcgaggaagatcggaagaagggaaagaaattcgctcggtaccagctgggcgacctgctgctgcacctggaaaagaagcacggcgaggactggggaaaggtgtacgacgaggcctgggagcggattgacaagaaagtggaaggcctgagcaagcacatcaagctggaagaggaacggagaagcgaggacgcccagagcaaggccgccctgaccgactggctgcgggctaaggccagcttcgtgatcgagggcctgaaggaggccgacaaggacgagttctgcagatgcgagctgaagctgcagaagtggtacggggacctgcggggaaagcccttcgccatcgaagccgagaacagcatcctggacatcagcggcttcagcaagcagtacaactgtgccttcatctggcagaaggacggcgtgaagaagctgaacctgtacctgatcatcaactacttcaagggcggcaagctgcggttcaagaagatcaaacctgaagccttcgaagccaacagattctacaccgtgatcaacaaaaagagcggcgagatcgtgcccatggaggtgaacttcaacttcgacgaccccaacctgatcatcctgcctctggcctttggcaagagacagggcagagaattcatctggaacgacctgctgtccctggaaaccggcagcctgaagctggccaacggaagagtgatcgagaagacactgtacaacagaagaacccggcaggatgagcctgccctgttcgtggccctgaccttcgagcggcgggaggtcctggactcctccaatatcaaaccaatgaacctgatcggcgtggcaagaggcgaaaacatccccgccgtgatcgccctgaccgaccccgagggctgcccactgagccggtttaaggatagcctgggaaacccaacccacatcctgagaatcggcgagagctataaggagaagcagcggaccatccaggccaagaaggaggtggagcagcggagagccggcggctacagccggaagtacgccagcaaagccaagaatctggcagacgatatggtgagaaacaccgctagagatctgctgtactacgccgtgacccaggatgccatgctgatcttcgccaacctgagccggggcttcggccggcagggcaagcggaccttcatggccgagagacagtacacacggatggaggactggctgaccgccaagctggcctacgagggcctgagcaagacctacctgtccaagacactggcccagtacacctccaagacatgcagcaactgtgggtttaccatcaccagcgccgactacgacagggtgctggagaagctgaagaagacagcaacaggctggatgaccacaattaacggcaaggagctgaaggtggagggccagattacctactacaacagatacaagagacagaacgtagtcaaggacctgtccgtcgagctggatagactgagcgaagaatctgtgaacaacgacatctcctcctggacaaagggcagaagcggagaagctctgagcctcctgaagaaaagattctcccatagacccgtgcaggagaagttcgtgtgcctgaactgcggcttcgagacacacgcagccgagcaagccgccctgaacatcgccagatcctggctgttcctgcggagccaggagtacaagaaataccagacaaacaagacaaccggcaacaccgataagagagccttcgtcgagacctggcagtccttttaccggaagaagcttaaggaggtgtggaaacctgccgtgcggtctggcggatctggcggaggctccaggcaggagcccgtgaccttcgaggacgtggccgtgtacttcacccagaacgagtgggccagcctggacagcgtgcagagggccctgtacagggaggtgatgctggagaactacgccaacgtggccagcctggccttccccttcaccacccccgtgctggtgagccagctggagcagggcgagctgccctggggcctggacccctgggagcccatgggcagggaggccctgaggggcatctgcggcggcccaagcagcggcgcccctcctcccagcggcggcagcccagccggctccccaacctctaccgaggagggcacctctgagtccgccacccccgagagcggccctggcacctccaccgagcccagcgagggcagcgcacccggcagccctgccggcagccccacctccacagaggagggaaccagcaccgagcccagcgaaggcagcgccccaggcaccagcaccgagcctagtgagcaggagattaaacggatcaacaagatcagaagaagacttgtgaaagacagcaacaccaagaaggccggcaagacaggccccatgaaaaccctgctggttagagtgatgacacccgatctgagagagcggctggaaaacctgagaaagaagcctgaaaatatcccccagcccatcagcaatacatctagagccaacctgaataagctgctgaccgattacaccgaaatgaagaaggcgatcctgcatgtgtactgggaagagttccagaaggaccctgtgggcctgatgagccgggtggcccagcctgccagcaagaagatcgatcagaacaagctgaaacctgagatggacgagaagggcaacctgaccaccgccggctttgcctgctctcagtgtggccagcccctgttcgtgtacaagctggagcaggtgtctgagaagggcaaggcttacaccaactacttcggacggtgcaatgtggccgagcacgaaaagctgatcctgctggcccagctgaagcccgagaaggatagcgacgaagccgtgacatatagcctgggaaagtttgggcagagggccctggatttctacagcattcatgtgaccaaggagtccacccaccccgtgaagcccctggcccagatcgccggaaacagatacgcctccggacctgtgggaaaggccctgagcgacgcatgtatgggcacaatcgcctccttcctgtctaagtaccaggacatcatcatcgaacaccagaaggtggtgaagggcaaccagaagagactggagagcctgcgggagctggccggcaaggaaaacctggaataccctagcgtgaccctgccacctcagcctcacaccaaggagggcgttgatgcctacaacgaagtgatcgcccgggtgcgaatgtgggtgaacctgaacctgtggcagaagctgaagctaagcagagatgatgccaagcctctgctgagactgaagggattcccttcctttcctctggtcgagagacaggccaacgaagtggactggtgggacatggtgtgtaacgtgaagaagctgatcaacgagaaaaaggaggatggcaaggtgttttggcagaatctggctggctacaagagacaggaagccctgagaccatacctgagcagcgaggaagatcggaagaagggaaagaaattcgctcggtaccagctgggcgacctgctgctgcacctggaaaagaagcacggcgaggactggggaaaggtgtacgacgaggcctgggagcggattgacaagaaagtggaaggcctgagcaagcacatcaagctggaagaggaacggagaagcgaggacgcccagagcaaggccgccctgaccgactggctgcgggctaaggccagcttcgtgatcgagggcctgaaggaggccgacaaggacgagttctgcagatgcgagctgaagctgcagaagtggtacggggacctgcggggaaagcccttcgccatcgaagccgagaacagcatcctggacatcagcggcttcagcaagcagtacaactgtgccttcatctggcagaaggacggcgtgaagaagctgaacctgtacctgatcatcaactacttcaagggcggcaagctgcggttcaagaagatcaaacctgaagccttcgaagccaacagattctacaccgtgatcaacaaaaagagcggcgagatcgtgcccatggaggtgaacttcaacttcgacgaccccaacctgatcatcctgcctctggcctttggcaagagacagggcagagaattcatctggaacgacctgctgtccctggaaaccggcagcctgaagctggccaacggaagagtgatcgagaagacactgtacaacagaagaacccggcaggatgagcctgccctgttcgtggccctgaccttcgagcggcgggaggtcctggactcctccaatatcaaaccaatgaacctgatcggcgtggcaagaggcgaaaacatccccgccgtgatcgccctgaccgaccccgagggctgcccactgagccggtttaaggatagcctgggaaacccaacccacatcctgagaatcggcgagagctataaggagaagcagcggaccatccaggccaagaaggaggtggagcagcggagagccggcggctacagccggaagtacgccagcaaagccaagaatctggcagacgatatggtgagaaacaccgctagagatctgctgtactacgccgtgacccaggatgccatgctgatcttcgccaacctgagccggggcttcggccggcagggcaagcggaccttcatggccgagagacagtacacacggatggaggactggctgaccgccaagctggcctacgagggcctgagcaagacctacctgtccaagacactggcccagtacacctccaagacatgcagcaactgtgggtttaccatcaccagcgccgactacgacagggtgctggagaagctgaagaagacagcaacaggctggatgaccacaattaacggcaaggagctgaaggtggagggccagattacctactacaacagatacaagagacagaacgtagtcaaggacctgtccgtcgagctggatagactgagcgaagaatctgtgaacaacgacatctcctcctggacaaagggcagaagcggagaagctctgagcctcctgaagaaaagattctcccatagacccgtgcaggagaagttcgtgtgcctgaactgcggcttcgagacacacgcagccgagcaagccgccctgaacatcgccagatcctggctgttcctgcggagccaggagtacaagaaataccagacaaacaagacaaccggcaacaccgataagagagccttcgtcgagacctggcagtccttttaccggaagaagcttaaggaggtgtggaaacctgccgtgcggtctggcggatctggcggaggctcctaggcaggagcccgtgaccttcgaggacgtggccgtgtacttcacccagaacgagtgggccagcctggacagcgtgcagagggccctgtacagggaggtgatgctggagaactacgccaacgtggccagcctggccttccccttcaccacccccgtgctggtgagccagctggagcagggcgagctgccctggggcctggacccctgggagcccatgggcagggaggccctgaggggcatctgcggatctggctccggcagcggccccaagaaaaagagaaaagtctaagctgccttctgcggggcttgccttctggccatgcccttcttctctcccttgcacctgtacctcttggtctttgaataaagcctgagtaggaaggctagcaaaaaaaaaaaaaaaaaaaaaaaaaaaaaaaaaaaaaaaaaaaaaaaaaaaaaaaaaaaaaaaaaaaaaaaaaaaaaaaa

SEQ ID NO: 15893 - RNA, 9485 nt, synthetic construct
  source 1..9485: mol_type = other RNA
aggaaataagagagaaaagaagagtaagaagaaatataagagccaccatggcccctaagaagaagcgtaaagtgagccggatggaacgcctcgtctacgaggtgcggcagaagtgcagaaacatcgaggacatctgcatctcctgcggatctctgaacgtgaccctggagcacccactgttcatcggcggcatgtgccagaactgtaaaaactgttttctggagtgtgcctatcaatacgacgatgacggctaccagagctactgcaccatctgttgcggcggaagagaggtgctgatgtgtggaaataacaactgctgccggtgcttctgcgtggaatgcgtggacctgctggtgggccccggcgccgcccaggccgctattaaggaagatccttggaactgctacatgtgcggccacaagggcacatacggcctgctgagacggagagaggactggcctagcagactgcagatgttcttcgccaataaccacgaccaggagttcgacccccctaaggtgtaccctcccgtccccgccgagaagagaaagcccatccgggtcctgagcctgttcgatggcatcgccaccggtctgctggtgctgaaggacctgggcatccaggtggataggtacattgcctccgaggtgtgcgaggactccatcaccgtgggaatggtgcgtcatcagggcaagatcatgtacgtgggcgacgtgcggagcgtgacacagaagcatatccaggagtggggccctttcgacctggtgatcggcggcagcccttgcaatgacctgagcatcgtgaacccagcccggaagggcctgtacgagggaaccggcagactgttcttcgagttttacagactgctgcacgacgcccggcctaaggaaggcgacgaccggcccttcttttggctgttcgagaatgtggtggccatgggagtcagcgacaagcgggatattagccggttcctggagagcaaccccgtgatgatcgatgccaaggaagtgagcgccgcccaccgggccagatacttctggggcaatctgcctggcatgaacagacccctggccagcaccgtgaacgacaagctggagctgcaggagtgcctggagcacggccggatcgccaagttcagcaaggtgagaaccatcaccacccgaagcaacagcatcaaacaaggcaaggaccagcactttcctgtgttcatgaacgagaaggaggacatcctgtggtgtaccgagatggagagagtgttcgggttcccagtccactacacagatgtcagcaacatgtctagactggccagacagagactgctgggaagaagctggtccgtccctgtgatcagacacctgttcgcccctctgaaggagtacttcgcctgcgtgagcagcggcaacagcaacgccaacagccggggccccagcttctctagcggcctggtgccactgtccctgagagggagccacatgggccccatggagatctacaaaaccgtgagcgcctggaagcggcagcctgtgcgcgtgctgagcctgtttcggaatatcgataaagtcctgaaaagcctgggattcctggagagcggctctggctccggcggtggcaccctgaagtacgtggaggatgtgacaaacgtggtcagacgggatgtggagaagtggggccccttcgatctggtgtacggcagcacccaacccctgggcagctcttgtgaccggtgccctggctggtacatgtttcagttccaccggatcctgcagtacgccctgccgagacaggagtcccagcggccattcttttggattttcatggacaacttgctgctgaccgaggatgaccaggaaactaccactcggttcctgcagaccgaagccgtgaccctgcaggacgtgagaggccgggactaccagaacgccatgcgggtgtggtccaacatccctggactgaaaagcaagcacgcacctctgacccctaaagaagaggagtacctgcaggcccaggtgcggagcagaagcaagctggacgcccctaaggtggatctgctggtgaagaattgcctcctgcccctgagagagtacttcaagtatttcagccagaatagtctgcccctgggaggcagcggcggcggcgccctggtgacatttgaggacgtcgccgtgcggttcacccaggaggaatgggctctgctggatccttctcagaaaatcctgtaccgggacgtgatgagagagacataccggaatctgacctccgtgggcatcaactgggaatgttgggaccttgaagcctgcttcagaagcctgggaagaaacctgagagtgcaggtggtgaagagaaagtgcgagctgaccaacagcggcccctgcgccgagggcggcccaagcagcggcgcccctcctcccagcggcggcagcccagccggctccccaacctctaccgaggagggcacctctgagtccgccacccccgagagcggccctggcacctccaccgagcccagcgagggcagcgcacccggcagccctgccggcagccccacctccacagaggagggaaccagcaccgagcccagcgaaggcagcgccccaggcaccagcaccgagcctagtgagcaggagattaaacggatcaacaagatcagaagaagacttgtgaaagacagcaacaccaagaaggccggcaagacaggccccatgaaaaccctgctggttagagtgatgacacccgatctgagagagcggctggaaaacctgagaaagaagcctgaaaatatcccccagcccatcagcaatacatctagagccaacctgaataagctgctgaccgattacaccgaaatgaagaaggcgatcctgcatgtgtactgggaagagttccagaaggaccctgtgggcctgatgagccgggtggcccagcctgccagcaagaagatcgatcagaacaagctgaaacctgagatggacgagaagggcaacctgaccaccgccggctttgcctgctctcagtgtggccagcccctgttcgtgtacaagctggagcaggtgtctgagaagggcaaggcttacaccaactacttcggacggtgcaatgtggccgagcacgaaaagctgatcctgctggcccagctgaagcccgagaaggatagcgacgaagccgtgacatatagcctgggaaagtttgggcagagggccctggatttctacagcattcatgtgaccaaggagtccacccaccccgtgaagcccctggcccagatcgccggaaacagatacgcctccggacctgtgggaaaggccctgagcgacgcatgtatgggcacaatcgcctccttcctgtctaagtaccaggacatcatcatcgaacaccagaaggtggtgaagggcaaccagaagagactggagagcctgcgggagctggccggcaaggaaaacctggaataccctagcgtgaccctgccacctcagcctcacaccaaggagggcgttgatgcctacaacgaagtgatcgcccgggtgcgaatgtgggtgaacctgaacctgtggcagaagctgaagctaagcagagatgatgccaagcctctgctgagactgaagggattcccttcctttcctctggtcgagagacaggccaacgaagtggactggtgggacatggtgtgtaacgtgaagaagctgatcaacgagaaaaaggaggatggcaaggtgttttggcagaatctggctggctacaagagacaggaagccctgagaccatacctgagcagcgaggaagatcggaagaagggaaagaaattcgctcggtaccagctgggcgacctgctgctgcacctggaaaagaagcacggcgaggactggggaaaggtgtacgacgaggcctgggagcggattgacaagaaagtggaaggcctgagcaagcacatcaagctggaagaggaacggagaagcgaggacgcccagagcaaggccgccctgaccgactggctgcgggctaaggccagcttcgtgatcgagggcctgaaggaggccgacaaggacgagttctgcagatgcgagctgaagctgcagaagtggtacggggacctgcggggaaagcccttcgccatcgaagccgagaacagcatcctggacatcagcggcttcagcaagcagtacaactgtgccttcatctggcagaaggacggcgtgaagaagctgaacctgtacctgatcatcaactacttcaagggcggcaagctgcggttcaagaagatcaaacctgaagccttcgaagccaacagattctacaccgtgatcaacaaaaagagcggcgagatcgtgcccatggaggtgaacttcaacttcgacgaccccaacctgatcatcctgcctctggcctttggcaagagacagggcagagaattcatctggaacgacctgctgtccctggaaaccggcagcctgaagctggccaacggaagagtgatcgagaagacactgtacaacagaagaacccggcaggatgagcctgccctgttcgtggccctgaccttcgagcggcgggaggtcctggactcctccaatatcaaaccaatgaacctgatcggcgtggcaagaggcgaaaacatccccgccgtgatcgccctgaccgaccccgagggctgcccactgagccggtttaaggatagcctgggaaacccaacccacatcctgagaatcggcgagagctataaggagaagcagcggaccatccaggccaagaaggaggtggagcagcggagagccggcggctacagccggaagtacgccagcaaagccaagaatctggcagacgatatggtgagaaacaccgctagagatctgctgtactacgccgtgacccaggatgccatgctgatcttcgccaacctgagccggggcttcggccggcagggcaagcggaccttcatggccgagagacagtacacacggatggaggactggctgaccgccaagctggcctacgagggcctgagcaagacctacctgtccaagacactggcccagtacacctccaagacatgcagcaactgtgggtttaccatcaccagcgccgactacgacagggtgctggagaagctgaagaagacagcaacaggctggatgaccacaattaacggcaaggagctgaaggtggagggccagattacctactacaacagatacaagagacagaacgtagtcaaggacctgtccgtcgagctggatagactgagcgaagaatctgtgaacaacgacatctcctcctggacaaagggcagaagcggagaagctctgagcctcctgaagaaaagattctcccatagacccgtgcaggagaagttcgtgtgcctgaactgcggcttcgagacacacgcagccgagcaagccgccctgaacatcgccagatcctggctgttcctgcggagccaggagtacaagaaataccagacaaacaagacaaccggcaacaccgataagagagccttcgtcgagacctggcagtccttttaccggaagaagcttaaggaggtgtggaaacctgccgtgcggtctggcggatctggcggaggctccgtgaccttcgaggaggtggccgtgtacttcagcgccgaggagtgggccctgctgggccccgcccagagggccctgtacagggaggtgatgagggagaactacgaggccgtgaccagcctggcctgggccggcctgcccatcagcaagcccgacctgatcagctgcatggagaggggcgaggagccctgggtggcccacctgcagagccagaggaggagggagctgcccaggggcaggaacagcggcggcccaagcagcggcgcccctcctcccagcggcggcagcccagccggctccccaacctctaccgaggagggcacctctgagtccgccacccccgagagcggccctggcacctccaccgagcccagcgagggcagcgcacccggcagccctgccggcagccccacctccacagaggagggaaccagcaccgagcccagcgaaggcagcgccccaggcaccagcaccgagcctagtgagcaggagattaaacggatcaacaagatcagaagaagacttgtgaaagacagcaacaccaagaaggccggcaagacaggccccatgaaaaccctgctggttagagtgatgacacccgatctgagagagcggctggaaaacctgagaaagaagcctgaaaatatcccccagcccatcagcaatacatctagagccaacctgaataagctgctgaccgattacaccgaaatgaagaaggcgatcctgcatgtgtactgggaagagttccagaaggaccctgtgggcctgatgagccgggtggcccagcctgccagcaagaagatcgatcagaacaagctgaaacctgagatggacgagaagggcaacctgaccaccgccggctttgcctgctctcagtgtggccagcccctgttcgtgtacaagctggagcaggtgtctgagaagggcaaggcttacaccaactacttcggacggtgcaatgtggccgagcacgaaaagctgatcctgctggcccagctgaagcccgagaaggatagcgacgaagccgtgacatatagcctgggaaagtttgggcagagggccctggatttctacagcattcatgtgaccaaggagtccacccaccccgtgaagcccctggcccagatcgccggaaacagatacgcctccggacctgtgggaaaggccctgagcgacgcatgtatgggcacaatcgcctccttcctgtctaagtaccaggacatcatcatcgaacaccagaaggtggtgaagggcaaccagaagagactggagagcctgcgggagctggccggcaaggaaaacctggaataccctagcgtgaccctgccacctcagcctcacaccaaggagggcgttgatgcctacaacgaagtgatcgcccgggtgcgaatgtgggtgaacctgaacctgtggcagaagctgaagctaagcagagatgatgccaagcctctgctgagactgaagggattcccttcctttcctctggtcgagagacaggccaacgaagtggactggtgggacatggtgtgtaacgtgaagaagctgatcaacgagaaaaaggaggatggcaaggtgttttggcagaatctggctggctacaagagacaggaagccctgagaccatacctgagcagcgaggaagatcggaagaagggaaagaaattcgctcggtaccagctgggcgacctgctgctgcacctggaaaagaagcacggcgaggactggggaaaggtgtacgacgaggcctgggagcggattgacaagaaagtggaaggcctgagcaagcacatcaagctggaagaggaacggagaagcgaggacgcccagagcaaggccgccctgaccgactggctgcgggctaaggccagcttcgtgatcgagggcctgaaggaggccgacaaggacgagttctgcagatgcgagctgaagctgcagaagtggtacggggacctgcggggaaagcccttcgccatcgaagccgagaacagcatcctggacatcagcggcttcagcaagcagtacaactgtgccttcatctggcagaaggacggcgtgaagaagctgaacctgtacctgatcatcaactacttcaagggcggcaagctgcggttcaagaagatcaaacctgaagccttcgaagccaacagattctacaccgtgatcaacaaaaagagcggcgagatcgtgcccatggaggtgaacttcaacttcgacgaccccaacctgatcatcctgcctctggcctttggcaagagacagggcagagaattcatctggaacgacctgctgtccctggaaaccggcagcctgaagctggccaacggaagagtgatcgagaagacactgtacaacagaagaacccggcaggatgagcctgccctgttcgtggccctgaccttcgagcggcgggaggtcctggactcctccaatatcaaaccaatgaacctgatcggcgtggcaagaggcgaaaacatccccgccgtgatcgccctgaccgaccccgagggctgcccactgagccggtttaaggatagcctgggaaacccaacccacatcctgagaatcggcgagagctataaggagaagcagcggaccatccaggccaagaaggaggtggagcagcggagagccggcggctacagccggaagtacgccagcaaagccaagaatctggcagacgatatggtgagaaacaccgctagagatctgctgtactacgccgtgacccaggatgccatgctgatcttcgccaacctgagccggggcttcggccggcagggcaagcggaccttcatggccgagagacagtacacacggatggaggactggctgaccgccaagctggcctacgagggcctgagcaagacctacctgtccaagacactggcccagtacacctccaagacatgcagcaactgtgggtttaccatcaccagcgccgactacgacagggtgctggagaagctgaagaagacagcaacaggctggatgaccacaattaacggcaaggagctgaaggtggagggccagattacctactacaacagatacaagagacagaacgtagtcaaggacctgtccgtcgagctggatagactgagcgaagaatctgtgaacaacgacatctcctcctggacaaagggcagaagcggagaagctctgagcctcctgaagaaaagattctcccatagacccgtgcaggagaagttcgtgtgcctgaactgcggcttcgagacacacgcagccgagcaagccgccctgaacatcgccagatcctggctgttcctgcggagccaggagtacaagaaataccagacaaacaagacaaccggcaacaccgataagagagccttcgtcgagacctggcagtccttttaccggaagaagcttaaggaggtgtggaaacctgccgtgcggtctggcggatctggcggaggctcctgtgaccttcgaggaggtggccgtgtacttcagcgccgaggagtgggccctgctgggccccgcccagagggccctgtacagggaggtgatgagggagaactacgaggccgtgaccagcctggcctgggccggcctgcccatcagcaagcccgacctgatcagctgcatggagaggggcgaggagccctgggtggcccacctgcagagccagaggaggagggagctgcccaggggcaggaacagcggatctggctccggcagcggccccaagaaaaagagaaaagtctaagctgccttctgcggggcttgccttctggccatgcccttcttctctcccttgcacctgtacctcttggtctttgaataaagcctgagtaggaaggctagcaaaaaaaaaaaaaaaaaaaaaaaaaaaaaaaaaaaaaaaaaaaaaaaaaaaaaaaaaaaaaaaaaaaaaaaaaaaaaaaa

SEQ ID NO: 15894 - RNA, 9485 nt, synthetic construct
  source 1..9485: mol_type = other RNA
aggaaataagagagaaaagaagagtaagaagaaatataagagccaccatggcccctaagaagaagcgtaaagtgagccggatggaacgcctcgtctacgaggtgcggcagaagtgcagaaacatcgaggacatctgcatctcctgcggatctctgaacgtgaccctggagcacccactgttcatcggcggcatgtgccagaactgtaaaaactgttttctggagtgtgcctatcaatacgacgatgacggctaccagagctactgcaccatctgttgcggcggaagagaggtgctgatgtgtggaaataacaactgctgccggtgcttctgcgtggaatgcgtggacctgctggtgggccccggcgccgcccaggccgctattaaggaagatccttggaactgctacatgtgcggccacaagggcacatacggcctgctgagacggagagaggactggcctagcagactgcagatgttcttcgccaataaccacgaccaggagttcgacccccctaaggtgtaccctcccgtccccgccgagaagagaaagcccatccgggtcctgagcctgttcgatggcatcgccaccggtctgctggtgctgaaggacctgggcatccaggtggataggtacattgcctccgaggtgtgcgaggactccatcaccgtgggaatggtgcgtcatcagggcaagatcatgtacgtgggcgacgtgcggagcgtgacacagaagcatatccaggagtggggccctttcgacctggtgatcggcggcagcccttgcaatgacctgagcatcgtgaacccagcccggaagggcctgtacgagggaaccggcagactgttcttcgagttttacagactgctgcacgacgcccggcctaaggaaggcgacgaccggcccttcttttggctgttcgagaatgtggtggccatgggagtcagcgacaagcgggatattagccggttcctggagagcaaccccgtgatgatcgatgccaaggaagtgagcgccgcccaccgggccagatacttctggggcaatctgcctggcatgaacagacccctggccagcaccgtgaacgacaagctggagctgcaggagtgcctggagcacggccggatcgccaagttcagcaaggtgagaaccatcaccacccgaagcaacagcatcaaacaaggcaaggaccagcactttcctgtgttcatgaacgagaaggaggacatcctgtggtgtaccgagatggagagagtgttcgggttcccagtccactacacagatgtcagcaacatgtctagactggccagacagagactgctgggaagaagctggtccgtccctgtgatcagacacctgttcgcccctctgaaggagtacttcgcctgcgtgagcagcggcaacagcaacgccaacagccggggccccagcttctctagcggcctggtgccactgtccctgagagggagccacatgggccccatggagatctacaaaaccgtgagcgcctggaagcggcagcctgtgcgcgtgctgagcctgtttcggaatatcgataaagtcctgaaaagcctgggattcctggagagcggctctggctccggcggtggcaccctgaagtacgtggaggatgtgacaaacgtggtcagacgggatgtggagaagtggggccccttcgatctggtgtacggcagcacccaacccctgggcagctcttgtgaccggtgccctggctggtacatgtttcagttccaccggatcctgcagtacgccctgccgagacaggagtcccagcggccattcttttggattttcatggacaacttgctgctgaccgaggatgaccaggaaactaccactcggttcctgcagaccgaagccgtgaccctgcaggacgtgagaggccgggactaccagaacgccatgcgggtgtggtccaacatccctggactgaaaagcaagcacgcacctctgacccctaaagaagaggagtacctgcaggcccaggtgcggagcagaagcaagctggacgcccctaaggtggatctgctggtgaagaattgcctcctgcccctgagagagtacttcaagtatttcagccagaatagtctgcccctgggaggcagcggcggcggcgccctggtgacatttgaggacgtcgccgtgcggttcacccaggaggaatgggctctgctggatccttctcagaaaatcctgtaccgggacgtgatgagagagacataccggaatctgacctccgtgggcatcaactgggaatgttgggaccttgaagcctgcttcagaagcctgggaagaaacctgagagtgcaggtggtgaagagaaagtgcgagctgaccaacagcggcccctgcgccgagggcggcccaagcagcggcgcccctcctcccagcggcggcagcccagccggctccccaacctctaccgaggagggcacctctgagtccgccacccccgagagcggccctggcacctccaccgagcccagcgagggcagcgcacccggcagccctgccggcagccccacctccacagaggagggaaccagcaccgagcccagcgaaggcagcgccccaggcaccagcaccgagcctagtgagcaggagattaaacggatcaacaagatcagaagaagacttgtgaaagacagcaacaccaagaaggccggcaagacaggccccatgaaaaccctgctggttagagtgatgacacccgatctgagagagcggctggaaaacctgagaaagaagcctgaaaatatcccccagcccatcagcaatacatctagagccaacctgaataagctgctgaccgattacaccgaaatgaagaaggcgatcctgcatgtgtactgggaagagttccagaaggaccctgtgggcctgatgagccgggtggcccagcctgccagcaagaagatcgatcagaacaagctgaaacctgagatggacgagaagggcaacctgaccaccgccggctttgcctgctctcagtgtggccagcccctgttcgtgtacaagctggagcaggtgtctgagaagggcaaggcttacaccaactacttcggacggtgcaatgtggccgagcacgaaaagctgatcctgctggcccagctgaagcccgagaaggatagcgacgaagccgtgacatatagcctgggaaagtttgggcagagggccctggatttctacagcattcatgtgaccaaggagtccacccaccccgtgaagcccctggcccagatcgccggaaacagatacgcctccggacctgtgggaaaggccctgagcgacgcatgtatgggcacaatcgcctccttcctgtctaagtaccaggacatcatcatcgaacaccagaaggtggtgaagggcaaccagaagagactggagagcctgcgggagctggccggcaaggaaaacctggaataccctagcgtgaccctgccacctcagcctcacaccaaggagggcgttgatgcctacaacgaagtgatcgcccgggtgcgaatgtgggtgaacctgaacctgtggcagaagctgaagctaagcagagatgatgccaagcctctgctgagactgaagggattcccttcctttcctctggtcgagagacaggccaacgaagtggactggtgggacatggtgtgtaacgtgaagaagctgatcaacgagaaaaaggaggatggcaaggtgttttggcagaatctggctggctacaagagacaggaagccctgagaccatacctgagcagcgaggaagatcggaagaagggaaagaaattcgctcggtaccagctgggcgacctgctgctgcacctggaaaagaagcacggcgaggactggggaaaggtgtacgacgaggcctgggagcggattgacaagaaagtggaaggcctgagcaagcacatcaagctggaagaggaacggagaagcgaggacgcccagagcaaggccgccctgaccgactggctgcgggctaaggccagcttcgtgatcgagggcctgaaggaggccgacaaggacgagttctgcagatgcgagctgaagctgcagaagtggtacggggacctgcggggaaagcccttcgccatcgaagccgagaacagcatcctggacatcagcggcttcagcaagcagtacaactgtgccttcatctggcagaaggacggcgtgaagaagctgaacctgtacctgatcatcaactacttcaagggcggcaagctgcggttcaagaagatcaaacctgaagccttcgaagccaacagattctacaccgtgatcaacaaaaagagcggcgagatcgtgcccatggaggtgaacttcaacttcgacgaccccaacctgatcatcctgcctctggcctttggcaagagacagggcagagaattcatctggaacgacctgctgtccctggaaaccggcagcctgaagctggccaacggaagagtgatcgagaagacactgtacaacagaagaacccggcaggatgagcctgccctgttcgtggccctgaccttcgagcggcgggaggtcctggactcctccaatatcaaaccaatgaacctgatcggcgtggcaagaggcgaaaacatccccgccgtgatcgccctgaccgaccccgagggctgcccactgagccggtttaaggatagcctgggaaacccaacccacatcctgagaatcggcgagagctataaggagaagcagcggaccatccaggccaagaaggaggtggagcagcggagagccggcggctacagccggaagtacgccagcaaagccaagaatctggcagacgatatggtgagaaacaccgctagagatctgctgtactacgccgtgacccaggatgccatgctgatcttcgccaacctgagccggggcttcggccggcagggcaagcggaccttcatggccgagagacagtacacacggatggaggactggctgaccgccaagctggcctacgagggcctgagcaagacctacctgtccaagacactggcccagtacacctccaagacatgcagcaactgtgggtttaccatcaccagcgccgactacgacagggtgctggagaagctgaagaagacagcaacaggctggatgaccacaattaacggcaaggagctgaaggtggagggccagattacctactacaacagatacaagagacagaacgtagtcaaggacctgtccgtcgagctggatagactgagcgaagaatctgtgaacaacgacatctcctcctggacaaagggcagaagcggagaagctctgagcctcctgaagaaaagattctcccatagacccgtgcaggagaagttcgtgtgcctgaactgcggcttcgagacacacgcagccgagcaagccgccctgaacatcgccagatcctggctgttcctgcggagccaggagtacaagaaataccagacaaacaagacaaccggcaacaccgataagagagccttcgtcgagacctggcagtccttttaccggaagaagcttaaggaggtgtggaaacctgccgtgcggtctggcggatctggcggaggctccgtgcagggcagcatgagcttcgaggacgtgatcgtggagttcacccaggacgagtggcagtacatgagccccgcccagaggatcctgtacagggacgtgatgctggagaactacagccacctgatcagcgtgggctactgcaccaccaagcccgagatgatcttcaagctggagcagggcgaggagccctggagcctggaggaggagttcctgaaccagaggtaccccggctacttcagcgtgggcggcccaagcagcggcgcccctcctcccagcggcggcagcccagccggctccccaacctctaccgaggagggcacctctgagtccgccacccccgagagcggccctggcacctccaccgagcccagcgagggcagcgcacccggcagccctgccggcagccccacctccacagaggagggaaccagcaccgagcccagcgaaggcagcgccccaggcaccagcaccgagcctagtgagcaggagattaaacggatcaacaagatcagaagaagacttgtgaaagacagcaacaccaagaaggccggcaagacaggccccatgaaaaccctgctggttagagtgatgacacccgatctgagagagcggctggaaaacctgagaaagaagcctgaaaatatcccccagcccatcagcaatacatctagagccaacctgaataagctgctgaccgattacaccgaaatgaagaaggcgatcctgcatgtgtactgggaagagttccagaaggaccctgtgggcctgatgagccgggtggcccagcctgccagcaagaagatcgatcagaacaagctgaaacctgagatggacgagaagggcaacctgaccaccgccggctttgcctgctctcagtgtggccagcccctgttcgtgtacaagctggagcaggtgtctgagaagggcaaggcttacaccaactacttcggacggtgcaatgtggccgagcacgaaaagctgatcctgctggcccagctgaagcccgagaaggatagcgacgaagccgtgacatatagcctgggaaagtttgggcagagggccctggatttctacagcattcatgtgaccaaggagtccacccaccccgtgaagcccctggcccagatcgccggaaacagatacgcctccggacctgtgggaaaggccctgagcgacgcatgtatgggcacaatcgcctccttcctgtctaagtaccaggacatcatcatcgaacaccagaaggtggtgaagggcaaccagaagagactggagagcctgcgggagctggccggcaaggaaaacctggaataccctagcgtgaccctgccacctcagcctcacaccaaggagggcgttgatgcctacaacgaagtgatcgcccgggtgcgaatgtgggtgaacctgaacctgtggcagaagctgaagctaagcagagatgatgccaagcctctgctgagactgaagggattcccttcctttcctctggtcgagagacaggccaacgaagtggactggtgggacatggtgtgtaacgtgaagaagctgatcaacgagaaaaaggaggatggcaaggtgttttggcagaatctggctggctacaagagacaggaagccctgagaccatacctgagcagcgaggaagatcggaagaagggaaagaaattcgctcggtaccagctgggcgacctgctgctgcacctggaaaagaagcacggcgaggactggggaaaggtgtacgacgaggcctgggagcggattgacaagaaagtggaaggcctgagcaagcacatcaagctggaagaggaacggagaagcgaggacgcccagagcaaggccgccctgaccgactggctgcgggctaaggccagcttcgtgatcgagggcctgaaggaggccgacaaggacgagttctgcagatgcgagctgaagctgcagaagtggtacggggacctgcggggaaagcccttcgccatcgaagccgagaacagcatcctggacatcagcggcttcagcaagcagtacaactgtgccttcatctggcagaaggacggcgtgaagaagctgaacctgtacctgatcatcaactacttcaagggcggcaagctgcggttcaagaagatcaaacctgaagccttcgaagccaacagattctacaccgtgatcaacaaaaagagcggcgagatcgtgcccatggaggtgaacttcaacttcgacgaccccaacctgatcatcctgcctctggcctttggcaagagacagggcagagaattcatctggaacgacctgctgtccctggaaaccggcagcctgaagctggccaacggaagagtgatcgagaagacactgtacaacagaagaacccggcaggatgagcctgccctgttcgtggccctgaccttcgagcggcgggaggtcctggactcctccaatatcaaaccaatgaacctgatcggcgtggcaagaggcgaaaacatccccgccgtgatcgccctgaccgaccccgagggctgcccactgagccggtttaaggatagcctgggaaacccaacccacatcctgagaatcggcgagagctataaggagaagcagcggaccatccaggccaagaaggaggtggagcagcggagagccggcggctacagccggaagtacgccagcaaagccaagaatctggcagacgatatggtgagaaacaccgctagagatctgctgtactacgccgtgacccaggatgccatgctgatcttcgccaacctgagccggggcttcggccggcagggcaagcggaccttcatggccgagagacagtacacacggatggaggactggctgaccgccaagctggcctacgagggcctgagcaagacctacctgtccaagacactggcccagtacacctccaagacatgcagcaactgtgggtttaccatcaccagcgccgactacgacagggtgctggagaagctgaagaagacagcaacaggctggatgaccacaattaacggcaaggagctgaaggtggagggccagattacctactacaacagatacaagagacagaacgtagtcaaggacctgtccgtcgagctggatagactgagcgaagaatctgtgaacaacgacatctcctcctggacaaagggcagaagcggagaagctctgagcctcctgaagaaaagattctcccatagacccgtgcaggagaagttcgtgtgcctgaactgcggcttcgagacacacgcagccgagcaagccgccctgaacatcgccagatcctggctgttcctgcggagccaggagtacaagaaataccagacaaacaagacaaccggcaacaccgataagagagccttcgtcgagacctggcagtccttttaccggaagaagcttaaggaggtgtggaaacctgccgtgcggtctggcggatctggcggaggctcctgtgcagggcagcatgagcttcgaggacgtgatcgtggagttcacccaggacgagtggcagtacatgagccccgcccagaggatcctgtacagggacgtgatgctggagaactacagccacctgatcagcgtgggctactgcaccaccaagcccgagatgatcttcaagctggagcagggcgaggagccctggagcctggaggaggagttcctgaaccagaggtaccccggctacttcagcgtgggatctggctccggcagcggccccaagaaaaagagaaaagtctaagctgccttctgcggggcttgccttctggccatgcccttcttctctcccttgcacctgtacctcttggtctttgaataaagcctgagtaggaaggctagcaaaaaaaaaaaaaaaaaaaaaaaaaaaaaaaaaaaaaaaaaaaaaaaaaaaaaaaaaaaaaaaaaaaaaaaaaaaaaaaa

SEQ ID NO: 15895 - RNA, 9485 nt, synthetic construct
  source 1..9485: mol_type = other RNA
aggaaataagagagaaaagaagagtaagaagaaatataagagccaccatggcccctaagaagaagcgtaaagtgagccggatggaacgcctcgtctacgaggtgcggcagaagtgcagaaacatcgaggacatctgcatctcctgcggatctctgaacgtgaccctggagcacccactgttcatcggcggcatgtgccagaactgtaaaaactgttttctggagtgtgcctatcaatacgacgatgacggctaccagagctactgcaccatctgttgcggcggaagagaggtgctgatgtgtggaaataacaactgctgccggtgcttctgcgtggaatgcgtggacctgctggtgggccccggcgccgcccaggccgctattaaggaagatccttggaactgctacatgtgcggccacaagggcacatacggcctgctgagacggagagaggactggcctagcagactgcagatgttcttcgccaataaccacgaccaggagttcgacccccctaaggtgtaccctcccgtccccgccgagaagagaaagcccatccgggtcctgagcctgttcgatggcatcgccaccggtctgctggtgctgaaggacctgggcatccaggtggataggtacattgcctccgaggtgtgcgaggactccatcaccgtgggaatggtgcgtcatcagggcaagatcatgtacgtgggcgacgtgcggagcgtgacacagaagcatatccaggagtggggccctttcgacctggtgatcggcggcagcccttgcaatgacctgagcatcgtgaacccagcccggaagggcctgtacgagggaaccggcagactgttcttcgagttttacagactgctgcacgacgcccggcctaaggaaggcgacgaccggcccttcttttggctgttcgagaatgtggtggccatgggagtcagcgacaagcgggatattagccggttcctggagagcaaccccgtgatgatcgatgccaaggaagtgagcgccgcccaccgggccagatacttctggggcaatctgcctggcatgaacagacccctggccagcaccgtgaacgacaagctggagctgcaggagtgcctggagcacggccggatcgccaagttcagcaaggtgagaaccatcaccacccgaagcaacagcatcaaacaaggcaaggaccagcactttcctgtgttcatgaacgagaaggaggacatcctgtggtgtaccgagatggagagagtgttcgggttcccagtccactacacagatgtcagcaacatgtctagactggccagacagagactgctgggaagaagctggtccgtccctgtgatcagacacctgttcgcccctctgaaggagtacttcgcctgcgtgagcagcggcaacagcaacgccaacagccggggccccagcttctctagcggcctggtgccactgtccctgagagggagccacatgggccccatggagatctacaaaaccgtgagcgcctggaagcggcagcctgtgcgcgtgctgagcctgtttcggaatatcgataaagtcctgaaaagcctgggattcctggagagcggctctggctccggcggtggcaccctgaagtacgtggaggatgtgacaaacgtggtcagacgggatgtggagaagtggggccccttcgatctggtgtacggcagcacccaacccctgggcagctcttgtgaccggtgccctggctggtacatgtttcagttccaccggatcctgcagtacgccctgccgagacaggagtcccagcggccattcttttggattttcatggacaacttgctgctgaccgaggatgaccaggaaactaccactcggttcctgcagaccgaagccgtgaccctgcaggacgtgagaggccgggactaccagaacgccatgcgggtgtggtccaacatccctggactgaaaagcaagcacgcacctctgacccctaaagaagaggagtacctgcaggcccaggtgcggagcagaagcaagctggacgcccctaaggtggatctgctggtgaagaattgcctcctgcccctgagagagtacttcaagtatttcagccagaatagtctgcccctgggaggcagcggcggcggcgccctggtgacatttgaggacgtcgccgtgcggttcacccaggaggaatgggctctgctggatccttctcagaaaatcctgtaccgggacgtgatgagagagacataccggaatctgacctccgtgggcatcaactgggaatgttgggaccttgaagcctgcttcagaagcctgggaagaaacctgagagtgcaggtggtgaagagaaagtgcgagctgaccaacagcggcccctgcgccgagggcggcccaagcagcggcgcccctcctcccagcggcggcagcccagccggctccccaacctctaccgaggagggcacctctgagtccgccacccccgagagcggccctggcacctccaccgagcccagcgagggcagcgcacccggcagccctgccggcagccccacctccacagaggagggaaccagcaccgagcccagcgaaggcagcgccccaggcaccagcaccgagcctagtgagcaggagattaaacggatcaacaagatcagaagaagacttgtgaaagacagcaacaccaagaaggccggcaagacaggccccatgaaaaccctgctggttagagtgatgacacccgatctgagagagcggctggaaaacctgagaaagaagcctgaaaatatcccccagcccatcagcaatacatctagagccaacctgaataagctgctgaccgattacaccgaaatgaagaaggcgatcctgcatgtgtactgggaagagttccagaaggaccctgtgggcctgatgagccgggtggcccagcctgccagcaagaagatcgatcagaacaagctgaaacctgagatggacgagaagggcaacctgaccaccgccggctttgcctgctctcagtgtggccagcccctgttcgtgtacaagctggagcaggtgtctgagaagggcaaggcttacaccaactacttcggacggtgcaatgtggccgagcacgaaaagctgatcctgctggcccagctgaagcccgagaaggatagcgacgaagccgtgacatatagcctgggaaagtttgggcagagggccctggatttctacagcattcatgtgaccaaggagtccacccaccccgtgaagcccctggcccagatcgccggaaacagatacgcctccggacctgtgggaaaggccctgagcgacgcatgtatgggcacaatcgcctccttcctgtctaagtaccaggacatcatcatcgaacaccagaaggtggtgaagggcaaccagaagagactggagagcctgcgggagctggccggcaaggaaaacctggaataccctagcgtgaccctgccacctcagcctcacaccaaggagggcgttgatgcctacaacgaagtgatcgcccgggtgcgaatgtgggtgaacctgaacctgtggcagaagctgaagctaagcagagatgatgccaagcctctgctgagactgaagggattcccttcctttcctctggtcgagagacaggccaacgaagtggactggtgggacatggtgtgtaacgtgaagaagctgatcaacgagaaaaaggaggatggcaaggtgttttggcagaatctggctggctacaagagacaggaagccctgagaccatacctgagcagcgaggaagatcggaagaagggaaagaaattcgctcggtaccagctgggcgacctgctgctgcacctggaaaagaagcacggcgaggactggggaaaggtgtacgacgaggcctgggagcggattgacaagaaagtggaaggcctgagcaagcacatcaagctggaagaggaacggagaagcgaggacgcccagagcaaggccgccctgaccgactggctgcgggctaaggccagcttcgtgatcgagggcctgaaggaggccgacaaggacgagttctgcagatgcgagctgaagctgcagaagtggtacggggacctgcggggaaagcccttcgccatcgaagccgagaacagcatcctggacatcagcggcttcagcaagcagtacaactgtgccttcatctggcagaaggacggcgtgaagaagctgaacctgtacctgatcatcaactacttcaagggcggcaagctgcggttcaagaagatcaaacctgaagccttcgaagccaacagattctacaccgtgatcaacaaaaagagcggcgagatcgtgcccatggaggtgaacttcaacttcgacgaccccaacctgatcatcctgcctctggcctttggcaagagacagggcagagaattcatctggaacgacctgctgtccctggaaaccggcagcctgaagctggccaacggaagagtgatcgagaagacactgtacaacagaagaacccggcaggatgagcctgccctgttcgtggccctgaccttcgagcggcgggaggtcctggactcctccaatatcaaaccaatgaacctgatcggcgtggcaagaggcgaaaacatccccgccgtgatcgccctgaccgaccccgagggctgcccactgagccggtttaaggatagcctgggaaacccaacccacatcctgagaatcggcgagagctataaggagaagcagcggaccatccaggccaagaaggaggtggagcagcggagagccggcggctacagccggaagtacgccagcaaagccaagaatctggcagacgatatggtgagaaacaccgctagagatctgctgtactacgccgtgacccaggatgccatgctgatcttcgccaacctgagccggggcttcggccggcagggcaagcggaccttcatggccgagagacagtacacacggatggaggactggctgaccgccaagctggcctacgagggcctgagcaagacctacctgtccaagacactggcccagtacacctccaagacatgcagcaactgtgggtttaccatcaccagcgccgactacgacagggtgctggagaagctgaagaagacagcaacaggctggatgaccacaattaacggcaaggagctgaaggtggagggccagattacctactacaacagatacaagagacagaacgtagtcaaggacctgtccgtcgagctggatagactgagcgaagaatctgtgaacaacgacatctcctcctggacaaagggcagaagcggagaagctctgagcctcctgaagaaaagattctcccatagacccgtgcaggagaagttcgtgtgcctgaactgcggcttcgagacacacgcagccgagcaagccgccctgaacatcgccagatcctggctgttcctgcggagccaggagtacaagaaataccagacaaacaagacaaccggcaacaccgataagagagccttcgtcgagacctggcagtccttttaccggaagaagcttaaggaggtgtggaaacctgccgtgcggtctggcggatctggcggaggctccatggcccacctgatgttcagggacgtggccatcgacttcagccaggaggagtgggagggcctggacctgaagcagagggacctgtacagggacgtgatgctggagaactacagcaacatggtgagcctgggcctgtgcatctaccagcccgacgtgttcagcctgctggagaagggcaaggagccctggaagatcctgagggacgagaccaggggcccctgccccgacatgcagagcaggtgcggcggcccaagcagcggcgcccctcctcccagcggcggcagcccagccggctccccaacctctaccgaggagggcacctctgagtccgccacccccgagagcggccctggcacctccaccgagcccagcgagggcagcgcacccggcagccctgccggcagccccacctccacagaggagggaaccagcaccgagcccagcgaaggcagcgccccaggcaccagcaccgagcctagtgagcaggagattaaacggatcaacaagatcagaagaagacttgtgaaagacagcaacaccaagaaggccggcaagacaggccccatgaaaaccctgctggttagagtgatgacacccgatctgagagagcggctggaaaacctgagaaagaagcctgaaaatatcccccagcccatcagcaatacatctagagccaacctgaataagctgctgaccgattacaccgaaatgaagaaggcgatcctgcatgtgtactgggaagagttccagaaggaccctgtgggcctgatgagccgggtggcccagcctgccagcaagaagatcgatcagaacaagctgaaacctgagatggacgagaagggcaacctgaccaccgccggctttgcctgctctcagtgtggccagcccctgttcgtgtacaagctggagcaggtgtctgagaagggcaaggcttacaccaactacttcggacggtgcaatgtggccgagcacgaaaagctgatcctgctggcccagctgaagcccgagaaggatagcgacgaagccgtgacatatagcctgggaaagtttgggcagagggccctggatttctacagcattcatgtgaccaaggagtccacccaccccgtgaagcccctggcccagatcgccggaaacagatacgcctccggacctgtgggaaaggccctgagcgacgcatgtatgggcacaatcgcctccttcctgtctaagtaccaggacatcatcatcgaacaccagaaggtggtgaagggcaaccagaagagactggagagcctgcgggagctggccggcaaggaaaacctggaataccctagcgtgaccctgccacctcagcctcacaccaaggagggcgttgatgcctacaacgaagtgatcgcccgggtgcgaatgtgggtgaacctgaacctgtggcagaagctgaagctaagcagagatgatgccaagcctctgctgagactgaagggattcccttcctttcctctggtcgagagacaggccaacgaagtggactggtgggacatggtgtgtaacgtgaagaagctgatcaacgagaaaaaggaggatggcaaggtgttttggcagaatctggctggctacaagagacaggaagccctgagaccatacctgagcagcgaggaagatcggaagaagggaaagaaattcgctcggtaccagctgggcgacctgctgctgcacctggaaaagaagcacggcgaggactggggaaaggtgtacgacgaggcctgggagcggattgacaagaaagtggaaggcctgagcaagcacatcaagctggaagaggaacggagaagcgaggacgcccagagcaaggccgccctgaccgactggctgcgggctaaggccagcttcgtgatcgagggcctgaaggaggccgacaaggacgagttctgcagatgcgagctgaagctgcagaagtggtacggggacctgcggggaaagcccttcgccatcgaagccgagaacagcatcctggacatcagcggcttcagcaagcagtacaactgtgccttcatctggcagaaggacggcgtgaagaagctgaacctgtacctgatcatcaactacttcaagggcggcaagctgcggttcaagaagatcaaacctgaagccttcgaagccaacagattctacaccgtgatcaacaaaaagagcggcgagatcgtgcccatggaggtgaacttcaacttcgacgaccccaacctgatcatcctgcctctggcctttggcaagagacagggcagagaattcatctggaacgacctgctgtccctggaaaccggcagcctgaagctggccaacggaagagtgatcgagaagacactgtacaacagaagaacccggcaggatgagcctgccctgttcgtggccctgaccttcgagcggcgggaggtcctggactcctccaatatcaaaccaatgaacctgatcggcgtggcaagaggcgaaaacatccccgccgtgatcgccctgaccgaccccgagggctgcccactgagccggtttaaggatagcctgggaaacccaacccacatcctgagaatcggcgagagctataaggagaagcagcggaccatccaggccaagaaggaggtggagcagcggagagccggcggctacagccggaagtacgccagcaaagccaagaatctggcagacgatatggtgagaaacaccgctagagatctgctgtactacgccgtgacccaggatgccatgctgatcttcgccaacctgagccggggcttcggccggcagggcaagcggaccttcatggccgagagacagtacacacggatggaggactggctgaccgccaagctggcctacgagggcctgagcaagacctacctgtccaagacactggcccagtacacctccaagacatgcagcaactgtgggtttaccatcaccagcgccgactacgacagggtgctggagaagctgaagaagacagcaacaggctggatgaccacaattaacggcaaggagctgaaggtggagggccagattacctactacaacagatacaagagacagaacgtagtcaaggacctgtccgtcgagctggatagactgagcgaagaatctgtgaacaacgacatctcctcctggacaaagggcagaagcggagaagctctgagcctcctgaagaaaagattctcccatagacccgtgcaggagaagttcgtgtgcctgaactgcggcttcgagacacacgcagccgagcaagccgccctgaacatcgccagatcctggctgttcctgcggagccaggagtacaagaaataccagacaaacaagacaaccggcaacaccgataagagagccttcgtcgagacctggcagtccttttaccggaagaagcttaaggaggtgtggaaacctgccgtgcggtctggcggatctggcggaggctcctatggcccacctgatgttcagggacgtggccatcgacttcagccaggaggagtgggagggcctggacctgaagcagagggacctgtacagggacgtgatgctggagaactacagcaacatggtgagcctgggcctgtgcatctaccagcccgacgtgttcagcctgctggagaagggcaaggagccctggaagatcctgagggacgagaccaggggcccctgccccgacatgcagagcaggtgcggatctggctccggcagcggccccaagaaaaagagaaaagtctaagctgccttctgcggggcttgccttctggccatgcccttcttctctcccttgcacctgtacctcttggtctttgaataaagcctgagtaggaaggctagcaaaaaaaaaaaaaaaaaaaaaaaaaaaaaaaaaaaaaaaaaaaaaaaaaaaaaaaaaaaaaaaaaaaaaaaaaaaaaaaa

SEQ ID NO: 15896 - RNA, 9485 nt, synthetic construct
  source 1..9485: mol_type = other RNA
aggaaataagagagaaaagaagagtaagaagaaatataagagccaccatggcccctaagaagaagcgtaaagtgagccggatggaacgcctcgtctacgaggtgcggcagaagtgcagaaacatcgaggacatctgcatctcctgcggatctctgaacgtgaccctggagcacccactgttcatcggcggcatgtgccagaactgtaaaaactgttttctggagtgtgcctatcaatacgacgatgacggctaccagagctactgcaccatctgttgcggcggaagagaggtgctgatgtgtggaaataacaactgctgccggtgcttctgcgtggaatgcgtggacctgctggtgggccccggcgccgcccaggccgctattaaggaagatccttggaactgctacatgtgcggccacaagggcacatacggcctgctgagacggagagaggactggcctagcagactgcagatgttcttcgccaataaccacgaccaggagttcgacccccctaaggtgtaccctcccgtccccgccgagaagagaaagcccatccgggtcctgagcctgttcgatggcatcgccaccggtctgctggtgctgaaggacctgggcatccaggtggataggtacattgcctccgaggtgtgcgaggactccatcaccgtgggaatggtgcgtcatcagggcaagatcatgtacgtgggcgacgtgcggagcgtgacacagaagcatatccaggagtggggccctttcgacctggtgatcggcggcagcccttgcaatgacctgagcatcgtgaacccagcccggaagggcctgtacgagggaaccggcagactgttcttcgagttttacagactgctgcacgacgcccggcctaaggaaggcgacgaccggcccttcttttggctgttcgagaatgtggtggccatgggagtcagcgacaagcgggatattagccggttcctggagagcaaccccgtgatgatcgatgccaaggaagtgagcgccgcccaccgggccagatacttctggggcaatctgcctggcatgaacagacccctggccagcaccgtgaacgacaagctggagctgcaggagtgcctggagcacggccggatcgccaagttcagcaaggtgagaaccatcaccacccgaagcaacagcatcaaacaaggcaaggaccagcactttcctgtgttcatgaacgagaaggaggacatcctgtggtgtaccgagatggagagagtgttcgggttcccagtccactacacagatgtcagcaacatgtctagactggccagacagagactgctgggaagaagctggtccgtccctgtgatcagacacctgttcgcccctctgaaggagtacttcgcctgcgtgagcagcggcaacagcaacgccaacagccggggccccagcttctctagcggcctggtgccactgtccctgagagggagccacatgggccccatggagatctacaaaaccgtgagcgcctggaagcggcagcctgtgcgcgtgctgagcctgtttcggaatatcgataaagtcctgaaaagcctgggattcctggagagcggctctggctccggcggtggcaccctgaagtacgtggaggatgtgacaaacgtggtcagacgggatgtggagaagtggggccccttcgatctggtgtacggcagcacccaacccctgggcagctcttgtgaccggtgccctggctggtacatgtttcagttccaccggatcctgcagtacgccctgccgagacaggagtcccagcggccattcttttggattttcatggacaacttgctgctgaccgaggatgaccaggaaactaccactcggttcctgcagaccgaagccgtgaccctgcaggacgtgagaggccgggactaccagaacgccatgcgggtgtggtccaacatccctggactgaaaagcaagcacgcacctctgacccctaaagaagaggagtacctgcaggcccaggtgcggagcagaagcaagctggacgcccctaaggtggatctgctggtgaagaattgcctcctgcccctgagagagtacttcaagtatttcagccagaatagtctgcccctgggaggcagcggcggcggcgccctggtgacatttgaggacgtcgccgtgcggttcacccaggaggaatgggctctgctggatccttctcagaaaatcctgtaccgggacgtgatgagagagacataccggaatctgacctccgtgggcatcaactgggaatgttgggaccttgaagcctgcttcagaagcctgggaagaaacctgagagtgcaggtggtgaagagaaagtgcgagctgaccaacagcggcccctgcgccgagggcggcccaagcagcggcgcccctcctcccagcggcggcagcccagccggctccccaacctctaccgaggagggcacctctgagtccgccacccccgagagcggccctggcacctccaccgagcccagcgagggcagcgcacccggcagccctgccggcagccccacctccacagaggagggaaccagcaccgagcccagcgaaggcagcgccccaggcaccagcaccgagcctagtgagcaggagattaaacggatcaacaagatcagaagaagacttgtgaaagacagcaacaccaagaaggccggcaagacaggccccatgaaaaccctgctggttagagtgatgacacccgatctgagagagcggctggaaaacctgagaaagaagcctgaaaatatcccccagcccatcagcaatacatctagagccaacctgaataagctgctgaccgattacaccgaaatgaagaaggcgatcctgcatgtgtactgggaagagttccagaaggaccctgtgggcctgatgagccgggtggcccagcctgccagcaagaagatcgatcagaacaagctgaaacctgagatggacgagaagggcaacctgaccaccgccggctttgcctgctctcagtgtggccagcccctgttcgtgtacaagctggagcaggtgtctgagaagggcaaggcttacaccaactacttcggacggtgcaatgtggccgagcacgaaaagctgatcctgctggcccagctgaagcccgagaaggatagcgacgaagccgtgacatatagcctgggaaagtttgggcagagggccctggatttctacagcattcatgtgaccaaggagtccacccaccccgtgaagcccctggcccagatcgccggaaacagatacgcctccggacctgtgggaaaggccctgagcgacgcatgtatgggcacaatcgcctccttcctgtctaagtaccaggacatcatcatcgaacaccagaaggtggtgaagggcaaccagaagagactggagagcctgcgggagctggccggcaaggaaaacctggaataccctagcgtgaccctgccacctcagcctcacaccaaggagggcgttgatgcctacaacgaagtgatcgcccgggtgcgaatgtgggtgaacctgaacctgtggcagaagctgaagctaagcagagatgatgccaagcctctgctgagactgaagggattcccttcctttcctctggtcgagagacaggccaacgaagtggactggtgggacatggtgtgtaacgtgaagaagctgatcaacgagaaaaaggaggatggcaaggtgttttggcagaatctggctggctacaagagacaggaagccctgagaccatacctgagcagcgaggaagatcggaagaagggaaagaaattcgctcggtaccagctgggcgacctgctgctgcacctggaaaagaagcacggcgaggactggggaaaggtgtacgacgaggcctgggagcggattgacaagaaagtggaaggcctgagcaagcacatcaagctggaagaggaacggagaagcgaggacgcccagagcaaggccgccctgaccgactggctgcgggctaaggccagcttcgtgatcgagggcctgaaggaggccgacaaggacgagttctgcagatgcgagctgaagctgcagaagtggtacggggacctgcggggaaagcccttcgccatcgaagccgagaacagcatcctggacatcagcggcttcagcaagcagtacaactgtgccttcatctggcagaaggacggcgtgaagaagctgaacctgtacctgatcatcaactacttcaagggcggcaagctgcggttcaagaagatcaaacctgaagccttcgaagccaacagattctacaccgtgatcaacaaaaagagcggcgagatcgtgcccatggaggtgaacttcaacttcgacgaccccaacctgatcatcctgcctctggcctttggcaagagacagggcagagaattcatctggaacgacctgctgtccctggaaaccggcagcctgaagctggccaacggaagagtgatcgagaagacactgtacaacagaagaacccggcaggatgagcctgccctgttcgtggccctgaccttcgagcggcgggaggtcctggactcctccaatatcaaaccaatgaacctgatcggcgtggcaagaggcgaaaacatccccgccgtgatcgccctgaccgaccccgagggctgcccactgagccggtttaaggatagcctgggaaacccaacccacatcctgagaatcggcgagagctataaggagaagcagcggaccatccaggccaagaaggaggtggagcagcggagagccggcggctacagccggaagtacgccagcaaagccaagaatctggcagacgatatggtgagaaacaccgctagagatctgctgtactacgccgtgacccaggatgccatgctgatcttcgccaacctgagccggggcttcggccggcagggcaagcggaccttcatggccgagagacagtacacacggatggaggactggctgaccgccaagctggcctacgagggcctgagcaagacctacctgtccaagacactggcccagtacacctccaagacatgcagcaactgtgggtttaccatcaccagcgccgactacgacagggtgctggagaagctgaagaagacagcaacaggctggatgaccacaattaacggcaaggagctgaaggtggagggccagattacctactacaacagatacaagagacagaacgtagtcaaggacctgtccgtcgagctggatagactgagcgaagaatctgtgaacaacgacatctcctcctggacaaagggcagaagcggagaagctctgagcctcctgaagaaaagattctcccatagacccgtgcaggagaagttcgtgtgcctgaactgcggcttcgagacacacgcagccgagcaagccgccctgaacatcgccagatcctggctgttcctgcggagccaggagtacaagaaataccagacaaacaagacaaccggcaacaccgataagagagccttcgtcgagacctggcagtccttttaccggaagaagcttaaggaggtgtggaaacctgccgtgcggtctggcggatctggcggaggctccgcccacggcctggtgatgttcaaggacgtggccatcgacgtgagccaggaggagtgggagtgcctgaaccccacccagaggagcctgtacaaggacgtgatgctggagaactacagcaacctggtgagcctgggcctgagcatcagcaagcccgccgtgatcagcagcctggagcagggcaaggagccctggatggtggtgagggaggtgaccggcgagcagtgccccgacctggtgagcaggggcggcccaagcagcggcgcccctcctcccagcggcggcagcccagccggctccccaacctctaccgaggagggcacctctgagtccgccacccccgagagcggccctggcacctccaccgagcccagcgagggcagcgcacccggcagccctgccggcagccccacctccacagaggagggaaccagcaccgagcccagcgaaggcagcgccccaggcaccagcaccgagcctagtgagcaggagattaaacggatcaacaagatcagaagaagacttgtgaaagacagcaacaccaagaaggccggcaagacaggccccatgaaaaccctgctggttagagtgatgacacccgatctgagagagcggctggaaaacctgagaaagaagcctgaaaatatcccccagcccatcagcaatacatctagagccaacctgaataagctgctgaccgattacaccgaaatgaagaaggcgatcctgcatgtgtactgggaagagttccagaaggaccctgtgggcctgatgagccgggtggcccagcctgccagcaagaagatcgatcagaacaagctgaaacctgagatggacgagaagggcaacctgaccaccgccggctttgcctgctctcagtgtggccagcccctgttcgtgtacaagctggagcaggtgtctgagaagggcaaggcttacaccaactacttcggacggtgcaatgtggccgagcacgaaaagctgatcctgctggcccagctgaagcccgagaaggatagcgacgaagccgtgacatatagcctgggaaagtttgggcagagggccctggatttctacagcattcatgtgaccaaggagtccacccaccccgtgaagcccctggcccagatcgccggaaacagatacgcctccggacctgtgggaaaggccctgagcgacgcatgtatgggcacaatcgcctccttcctgtctaagtaccaggacatcatcatcgaacaccagaaggtggtgaagggcaaccagaagagactggagagcctgcgggagctggccggcaaggaaaacctggaataccctagcgtgaccctgccacctcagcctcacaccaaggagggcgttgatgcctacaacgaagtgatcgcccgggtgcgaatgtgggtgaacctgaacctgtggcagaagctgaagctaagcagagatgatgccaagcctctgctgagactgaagggattcccttcctttcctctggtcgagagacaggccaacgaagtggactggtgggacatggtgtgtaacgtgaagaagctgatcaacgagaaaaaggaggatggcaaggtgttttggcagaatctggctggctacaagagacaggaagccctgagaccatacctgagcagcgaggaagatcggaagaagggaaagaaattcgctcggtaccagctgggcgacctgctgctgcacctggaaaagaagcacggcgaggactggggaaaggtgtacgacgaggcctgggagcggattgacaagaaagtggaaggcctgagcaagcacatcaagctggaagaggaacggagaagcgaggacgcccagagcaaggccgccctgaccgactggctgcgggctaaggccagcttcgtgatcgagggcctgaaggaggccgacaaggacgagttctgcagatgcgagctgaagctgcagaagtggtacggggacctgcggggaaagcccttcgccatcgaagccgagaacagcatcctggacatcagcggcttcagcaagcagtacaactgtgccttcatctggcagaaggacggcgtgaagaagctgaacctgtacctgatcatcaactacttcaagggcggcaagctgcggttcaagaagatcaaacctgaagccttcgaagccaacagattctacaccgtgatcaacaaaaagagcggcgagatcgtgcccatggaggtgaacttcaacttcgacgaccccaacctgatcatcctgcctctggcctttggcaagagacagggcagagaattcatctggaacgacctgctgtccctggaaaccggcagcctgaagctggccaacggaagagtgatcgagaagacactgtacaacagaagaacccggcaggatgagcctgccctgttcgtggccctgaccttcgagcggcgggaggtcctggactcctccaatatcaaaccaatgaacctgatcggcgtggcaagaggcgaaaacatccccgccgtgatcgccctgaccgaccccgagggctgcccactgagccggtttaaggatagcctgggaaacccaacccacatcctgagaatcggcgagagctataaggagaagcagcggaccatccaggccaagaaggaggtggagcagcggagagccggcggctacagccggaagtacgccagcaaagccaagaatctggcagacgatatggtgagaaacaccgctagagatctgctgtactacgccgtgacccaggatgccatgctgatcttcgccaacctgagccggggcttcggccggcagggcaagcggaccttcatggccgagagacagtacacacggatggaggactggctgaccgccaagctggcctacgagggcctgagcaagacctacctgtccaagacactggcccagtacacctccaagacatgcagcaactgtgggtttaccatcaccagcgccgactacgacagggtgctggagaagctgaagaagacagcaacaggctggatgaccacaattaacggcaaggagctgaaggtggagggccagattacctactacaacagatacaagagacagaacgtagtcaaggacctgtccgtcgagctggatagactgagcgaagaatctgtgaacaacgacatctcctcctggacaaagggcagaagcggagaagctctgagcctcctgaagaaaagattctcccatagacccgtgcaggagaagttcgtgtgcctgaactgcggcttcgagacacacgcagccgagcaagccgccctgaacatcgccagatcctggctgttcctgcggagccaggagtacaagaaataccagacaaacaagacaaccggcaacaccgataagagagccttcgtcgagacctggcagtccttttaccggaagaagcttaaggaggtgtggaaacctgccgtgcggtctggcggatctggcggaggctcctgcccacggcctggtgatgttcaaggacgtggccatcgacgtgagccaggaggagtgggagtgcctgaaccccacccagaggagcctgtacaaggacgtgatgctggagaactacagcaacctggtgagcctgggcctgagcatcagcaagcccgccgtgatcagcagcctggagcagggcaaggagccctggatggtggtgagggaggtgaccggcgagcagtgccccgacctggtgagcaggggatctggctccggcagcggccccaagaaaaagagaaaagtctaagctgccttctgcggggcttgccttctggccatgcccttcttctctcccttgcacctgtacctcttggtctttgaataaagcctgagtaggaaggctagcaaaaaaaaaaaaaaaaaaaaaaaaaaaaaaaaaaaaaaaaaaaaaaaaaaaaaaaaaaaaaaaaaaaaaaaaaaaaaaaa

SEQ ID NO: 15897 - RNA, 9485 nt, synthetic construct
  source 1..9485: mol_type = other RNA
aggaaataagagagaaaagaagagtaagaagaaatataagagccaccatggcccctaagaagaagcgtaaagtgagccggatggaacgcctcgtctacgaggtgcggcagaagtgcagaaacatcgaggacatctgcatctcctgcggatctctgaacgtgaccctggagcacccactgttcatcggcggcatgtgccagaactgtaaaaactgttttctggagtgtgcctatcaatacgacgatgacggctaccagagctactgcaccatctgttgcggcggaagagaggtgctgatgtgtggaaataacaactgctgccggtgcttctgcgtggaatgcgtggacctgctggtgggccccggcgccgcccaggccgctattaaggaagatccttggaactgctacatgtgcggccacaagggcacatacggcctgctgagacggagagaggactggcctagcagactgcagatgttcttcgccaataaccacgaccaggagttcgacccccctaaggtgtaccctcccgtccccgccgagaagagaaagcccatccgggtcctgagcctgttcgatggcatcgccaccggtctgctggtgctgaaggacctgggcatccaggtggataggtacattgcctccgaggtgtgcgaggactccatcaccgtgggaatggtgcgtcatcagggcaagatcatgtacgtgggcgacgtgcggagcgtgacacagaagcatatccaggagtggggccctttcgacctggtgatcggcggcagcccttgcaatgacctgagcatcgtgaacccagcccggaagggcctgtacgagggaaccggcagactgttcttcgagttttacagactgctgcacgacgcccggcctaaggaaggcgacgaccggcccttcttttggctgttcgagaatgtggtggccatgggagtcagcgacaagcgggatattagccggttcctggagagcaaccccgtgatgatcgatgccaaggaagtgagcgccgcccaccgggccagatacttctggggcaatctgcctggcatgaacagacccctggccagcaccgtgaacgacaagctggagctgcaggagtgcctggagcacggccggatcgccaagttcagcaaggtgagaaccatcaccacccgaagcaacagcatcaaacaaggcaaggaccagcactttcctgtgttcatgaacgagaaggaggacatcctgtggtgtaccgagatggagagagtgttcgggttcccagtccactacacagatgtcagcaacatgtctagactggccagacagagactgctgggaagaagctggtccgtccctgtgatcagacacctgttcgcccctctgaaggagtacttcgcctgcgtgagcagcggcaacagcaacgccaacagccggggccccagcttctctagcggcctggtgccactgtccctgagagggagccacatgggccccatggagatctacaaaaccgtgagcgcctggaagcggcagcctgtgcgcgtgctgagcctgtttcggaatatcgataaagtcctgaaaagcctgggattcctggagagcggctctggctccggcggtggcaccctgaagtacgtggaggatgtgacaaacgtggtcagacgggatgtggagaagtggggccccttcgatctggtgtacggcagcacccaacccctgggcagctcttgtgaccggtgccctggctggtacatgtttcagttccaccggatcctgcagtacgccctgccgagacaggagtcccagcggccattcttttggattttcatggacaacttgctgctgaccgaggatgaccaggaaactaccactcggttcctgcagaccgaagccgtgaccctgcaggacgtgagaggccgggactaccagaacgccatgcgggtgtggtccaacatccctggactgaaaagcaagcacgcacctctgacccctaaagaagaggagtacctgcaggcccaggtgcggagcagaagcaagctggacgcccctaaggtggatctgctggtgaagaattgcctcctgcccctgagagagtacttcaagtatttcagccagaatagtctgcccctgggaggcagcggcggcggcgccctggtgacatttgaggacgtcgccgtgcggttcacccaggaggaatgggctctgctggatccttctcagaaaatcctgtaccgggacgtgatgagagagacataccggaatctgacctccgtgggcatcaactgggaatgttgggaccttgaagcctgcttcagaagcctgggaagaaacctgagagtgcaggtggtgaagagaaagtgcgagctgaccaacagcggcccctgcgccgagggcggcccaagcagcggcgcccctcctcccagcggcggcagcccagccggctccccaacctctaccgaggagggcacctctgagtccgccacccccgagagcggccctggcacctccaccgagcccagcgagggcagcgcacccggcagccctgccggcagccccacctccacagaggagggaaccagcaccgagcccagcgaaggcagcgccccaggcaccagcaccgagcctagtgagcaggagattaaacggatcaacaagatcagaagaagacttgtgaaagacagcaacaccaagaaggccggcaagacaggccccatgaaaaccctgctggttagagtgatgacacccgatctgagagagcggctggaaaacctgagaaagaagcctgaaaatatcccccagcccatcagcaatacatctagagccaacctgaataagctgctgaccgattacaccgaaatgaagaaggcgatcctgcatgtgtactgggaagagttccagaaggaccctgtgggcctgatgagccgggtggcccagcctgccagcaagaagatcgatcagaacaagctgaaacctgagatggacgagaagggcaacctgaccaccgccggctttgcctgctctcagtgtggccagcccctgttcgtgtacaagctggagcaggtgtctgagaagggcaaggcttacaccaactacttcggacggtgcaatgtggccgagcacgaaaagctgatcctgctggcccagctgaagcccgagaaggatagcgacgaagccgtgacatatagcctgggaaagtttgggcagagggccctggatttctacagcattcatgtgaccaaggagtccacccaccccgtgaagcccctggcccagatcgccggaaacagatacgcctccggacctgtgggaaaggccctgagcgacgcatgtatgggcacaatcgcctccttcctgtctaagtaccaggacatcatcatcgaacaccagaaggtggtgaagggcaaccagaagagactggagagcctgcgggagctggccggcaaggaaaacctggaataccctagcgtgaccctgccacctcagcctcacaccaaggagggcgttgatgcctacaacgaagtgatcgcccgggtgcgaatgtgggtgaacctgaacctgtggcagaagctgaagctaagcagagatgatgccaagcctctgctgagactgaagggattcccttcctttcctctggtcgagagacaggccaacgaagtggactggtgggacatggtgtgtaacgtgaagaagctgatcaacgagaaaaaggaggatggcaaggtgttttggcagaatctggctggctacaagagacaggaagccctgagaccatacctgagcagcgaggaagatcggaagaagggaaagaaattcgctcggtaccagctgggcgacctgctgctgcacctggaaaagaagcacggcgaggactggggaaaggtgtacgacgaggcctgggagcggattgacaagaaagtggaaggcctgagcaagcacatcaagctggaagaggaacggagaagcgaggacgcccagagcaaggccgccctgaccgactggctgcgggctaaggccagcttcgtgatcgagggcctgaaggaggccgacaaggacgagttctgcagatgcgagctgaagctgcagaagtggtacggggacctgcggggaaagcccttcgccatcgaagccgagaacagcatcctggacatcagcggcttcagcaagcagtacaactgtgccttcatctggcagaaggacggcgtgaagaagctgaacctgtacctgatcatcaactacttcaagggcggcaagctgcggttcaagaagatcaaacctgaagccttcgaagccaacagattctacaccgtgatcaacaaaaagagcggcgagatcgtgcccatggaggtgaacttcaacttcgacgaccccaacctgatcatcctgcctctggcctttggcaagagacagggcagagaattcatctggaacgacctgctgtccctggaaaccggcagcctgaagctggccaacggaagagtgatcgagaagacactgtacaacagaagaacccggcaggatgagcctgccctgttcgtggccctgaccttcgagcggcgggaggtcctggactcctccaatatcaaaccaatgaacctgatcggcgtggcaagaggcgaaaacatccccgccgtgatcgccctgaccgaccccgagggctgcccactgagccggtttaaggatagcctgggaaacccaacccacatcctgagaatcggcgagagctataaggagaagcagcggaccatccaggccaagaaggaggtggagcagcggagagccggcggctacagccggaagtacgccagcaaagccaagaatctggcagacgatatggtgagaaacaccgctagagatctgctgtactacgccgtgacccaggatgccatgctgatcttcgccaacctgagccggggcttcggccggcagggcaagcggaccttcatggccgagagacagtacacacggatggaggactggctgaccgccaagctggcctacgagggcctgagcaagacctacctgtccaagacactggcccagtacacctccaagacatgcagcaactgtgggtttaccatcaccagcgccgactacgacagggtgctggagaagctgaagaagacagcaacaggctggatgaccacaattaacggcaaggagctgaaggtggagggccagattacctactacaacagatacaagagacagaacgtagtcaaggacctgtccgtcgagctggatagactgagcgaagaatctgtgaacaacgacatctcctcctggacaaagggcagaagcggagaagctctgagcctcctgaagaaaagattctcccatagacccgtgcaggagaagttcgtgtgcctgaactgcggcttcgagacacacgcagccgagcaagccgccctgaacatcgccagatcctggctgttcctgcggagccaggagtacaagaaataccagacaaacaagacaaccggcaacaccgataagagagccttcgtcgagacctggcagtccttttaccggaagaagcttaaggaggtgtggaaacctgccgtgcggtctggcggatctggcggaggctcccaggagcaggtgagcttcaaggacgtgtgcgtggacttcacccaggaggagtggtacctgctggaccccgcccagaagatcctgtacagggacgtgatcctggagaactacagccacctggtgagcgtgggcaactgcatcaccaagcccgaggtgatcttcaagatcgagcagggcgaggagccctggatcctggaggagaggttccccaagcagtggcacagcggcaagagctacaagtacggcggcccaagcagcggcgcccctcctcccagcggcggcagcccagccggctccccaacctctaccgaggagggcacctctgagtccgccacccccgagagcggccctggcacctccaccgagcccagcgagggcagcgcacccggcagccctgccggcagccccacctccacagaggagggaaccagcaccgagcccagcgaaggcagcgccccaggcaccagcaccgagcctagtgagcaggagattaaacggatcaacaagatcagaagaagacttgtgaaagacagcaacaccaagaaggccggcaagacaggccccatgaaaaccctgctggttagagtgatgacacccgatctgagagagcggctggaaaacctgagaaagaagcctgaaaatatcccccagcccatcagcaatacatctagagccaacctgaataagctgctgaccgattacaccgaaatgaagaaggcgatcctgcatgtgtactgggaagagttccagaaggaccctgtgggcctgatgagccgggtggcccagcctgccagcaagaagatcgatcagaacaagctgaaacctgagatggacgagaagggcaacctgaccaccgccggctttgcctgctctcagtgtggccagcccctgttcgtgtacaagctggagcaggtgtctgagaagggcaaggcttacaccaactacttcggacggtgcaatgtggccgagcacgaaaagctgatcctgctggcccagctgaagcccgagaaggatagcgacgaagccgtgacatatagcctgggaaagtttgggcagagggccctggatttctacagcattcatgtgaccaaggagtccacccaccccgtgaagcccctggcccagatcgccggaaacagatacgcctccggacctgtgggaaaggccctgagcgacgcatgtatgggcacaatcgcctccttcctgtctaagtaccaggacatcatcatcgaacaccagaaggtggtgaagggcaaccagaagagactggagagcctgcgggagctggccggcaaggaaaacctggaataccctagcgtgaccctgccacctcagcctcacaccaaggagggcgttgatgcctacaacgaagtgatcgcccgggtgcgaatgtgggtgaacctgaacctgtggcagaagctgaagctaagcagagatgatgccaagcctctgctgagactgaagggattcccttcctttcctctggtcgagagacaggccaacgaagtggactggtgggacatggtgtgtaacgtgaagaagctgatcaacgagaaaaaggaggatggcaaggtgttttggcagaatctggctggctacaagagacaggaagccctgagaccatacctgagcagcgaggaagatcggaagaagggaaagaaattcgctcggtaccagctgggcgacctgctgctgcacctggaaaagaagcacggcgaggactggggaaaggtgtacgacgaggcctgggagcggattgacaagaaagtggaaggcctgagcaagcacatcaagctggaagaggaacggagaagcgaggacgcccagagcaaggccgccctgaccgactggctgcgggctaaggccagcttcgtgatcgagggcctgaaggaggccgacaaggacgagttctgcagatgcgagctgaagctgcagaagtggtacggggacctgcggggaaagcccttcgccatcgaagccgagaacagcatcctggacatcagcggcttcagcaagcagtacaactgtgccttcatctggcagaaggacggcgtgaagaagctgaacctgtacctgatcatcaactacttcaagggcggcaagctgcggttcaagaagatcaaacctgaagccttcgaagccaacagattctacaccgtgatcaacaaaaagagcggcgagatcgtgcccatggaggtgaacttcaacttcgacgaccccaacctgatcatcctgcctctggcctttggcaagagacagggcagagaattcatctggaacgacctgctgtccctggaaaccggcagcctgaagctggccaacggaagagtgatcgagaagacactgtacaacagaagaacccggcaggatgagcctgccctgttcgtggccctgaccttcgagcggcgggaggtcctggactcctccaatatcaaaccaatgaacctgatcggcgtggcaagaggcgaaaacatccccgccgtgatcgccctgaccgaccccgagggctgcccactgagccggtttaaggatagcctgggaaacccaacccacatcctgagaatcggcgagagctataaggagaagcagcggaccatccaggccaagaaggaggtggagcagcggagagccggcggctacagccggaagtacgccagcaaagccaagaatctggcagacgatatggtgagaaacaccgctagagatctgctgtactacgccgtgacccaggatgccatgctgatcttcgccaacctgagccggggcttcggccggcagggcaagcggaccttcatggccgagagacagtacacacggatggaggactggctgaccgccaagctggcctacgagggcctgagcaagacctacctgtccaagacactggcccagtacacctccaagacatgcagcaactgtgggtttaccatcaccagcgccgactacgacagggtgctggagaagctgaagaagacagcaacaggctggatgaccacaattaacggcaaggagctgaaggtggagggccagattacctactacaacagatacaagagacagaacgtagtcaaggacctgtccgtcgagctggatagactgagcgaagaatctgtgaacaacgacatctcctcctggacaaagggcagaagcggagaagctctgagcctcctgaagaaaagattctcccatagacccgtgcaggagaagttcgtgtgcctgaactgcggcttcgagacacacgcagccgagcaagccgccctgaacatcgccagatcctggctgttcctgcggagccaggagtacaagaaataccagacaaacaagacaaccggcaacaccgataagagagccttcgtcgagacctggcagtccttttaccggaagaagcttaaggaggtgtggaaacctgccgtgcggtctggcggatctggcggaggctcctcaggagcaggtgagcttcaaggacgtgtgcgtggacttcacccaggaggagtggtacctgctggaccccgcccagaagatcctgtacagggacgtgatcctggagaactacagccacctggtgagcgtgggcaactgcatcaccaagcccgaggtgatcttcaagatcgagcagggcgaggagccctggatcctggaggagaggttccccaagcagtggcacagcggcaagagctacaagtacggatctggctccggcagcggccccaagaaaaagagaaaagtctaagctgccttctgcggggcttgccttctggccatgcccttcttctctcccttgcacctgtacctcttggtctttgaataaagcctgagtaggaaggctagcaaaaaaaaaaaaaaaaaaaaaaaaaaaaaaaaaaaaaaaaaaaaaaaaaaaaaaaaaaaaaaaaaaaaaaaaaaaaaaaa

SEQ ID NO: 15898 - RNA, 9485 nt, synthetic construct
  source 1..9485: mol_type = other RNA
aggaaataagagagaaaagaagagtaagaagaaatataagagccaccatggcccctaagaagaagcgtaaagtgagccggatggaacgcctcgtctacgaggtgcggcagaagtgcagaaacatcgaggacatctgcatctcctgcggatctctgaacgtgaccctggagcacccactgttcatcggcggcatgtgccagaactgtaaaaactgttttctggagtgtgcctatcaatacgacgatgacggctaccagagctactgcaccatctgttgcggcggaagagaggtgctgatgtgtggaaataacaactgctgccggtgcttctgcgtggaatgcgtggacctgctggtgggccccggcgccgcccaggccgctattaaggaagatccttggaactgctacatgtgcggccacaagggcacatacggcctgctgagacggagagaggactggcctagcagactgcagatgttcttcgccaataaccacgaccaggagttcgacccccctaaggtgtaccctcccgtccccgccgagaagagaaagcccatccgggtcctgagcctgttcgatggcatcgccaccggtctgctggtgctgaaggacctgggcatccaggtggataggtacattgcctccgaggtgtgcgaggactccatcaccgtgggaatggtgcgtcatcagggcaagatcatgtacgtgggcgacgtgcggagcgtgacacagaagcatatccaggagtggggccctttcgacctggtgatcggcggcagcccttgcaatgacctgagcatcgtgaacccagcccggaagggcctgtacgagggaaccggcagactgttcttcgagttttacagactgctgcacgacgcccggcctaaggaaggcgacgaccggcccttcttttggctgttcgagaatgtggtggccatgggagtcagcgacaagcgggatattagccggttcctggagagcaaccccgtgatgatcgatgccaaggaagtgagcgccgcccaccgggccagatacttctggggcaatctgcctggcatgaacagacccctggccagcaccgtgaacgacaagctggagctgcaggagtgcctggagcacggccggatcgccaagttcagcaaggtgagaaccatcaccacccgaagcaacagcatcaaacaaggcaaggaccagcactttcctgtgttcatgaacgagaaggaggacatcctgtggtgtaccgagatggagagagtgttcgggttcccagtccactacacagatgtcagcaacatgtctagactggccagacagagactgctgggaagaagctggtccgtccctgtgatcagacacctgttcgcccctctgaaggagtacttcgcctgcgtgagcagcggcaacagcaacgccaacagccggggccccagcttctctagcggcctggtgccactgtccctgagagggagccacatgggccccatggagatctacaaaaccgtgagcgcctggaagcggcagcctgtgcgcgtgctgagcctgtttcggaatatcgataaagtcctgaaaagcctgggattcctggagagcggctctggctccggcggtggcaccctgaagtacgtggaggatgtgacaaacgtggtcagacgggatgtggagaagtggggccccttcgatctggtgtacggcagcacccaacccctgggcagctcttgtgaccggtgccctggctggtacatgtttcagttccaccggatcctgcagtacgccctgccgagacaggagtcccagcggccattcttttggattttcatggacaacttgctgctgaccgaggatgaccaggaaactaccactcggttcctgcagaccgaagccgtgaccctgcaggacgtgagaggccgggactaccagaacgccatgcgggtgtggtccaacatccctggactgaaaagcaagcacgcacctctgacccctaaagaagaggagtacctgcaggcccaggtgcggagcagaagcaagctggacgcccctaaggtggatctgctggtgaagaattgcctcctgcccctgagagagtacttcaagtatttcagccagaatagtctgcccctgggaggcagcggcggcggcgccctggtgacatttgaggacgtcgccgtgcggttcacccaggaggaatgggctctgctggatccttctcagaaaatcctgtaccgggacgtgatgagagagacataccggaatctgacctccgtgggcatcaactgggaatgttgggaccttgaagcctgcttcagaagcctgggaagaaacctgagagtgcaggtggtgaagagaaagtgcgagctgaccaacagcggcccctgcgccgagggcggcccaagcagcggcgcccctcctcccagcggcggcagcccagccggctccccaacctctaccgaggagggcacctctgagtccgccacccccgagagcggccctggcacctccaccgagcccagcgagggcagcgcacccggcagccctgccggcagccccacctccacagaggagggaaccagcaccgagcccagcgaaggcagcgccccaggcaccagcaccgagcctagtgagcaggagattaaacggatcaacaagatcagaagaagacttgtgaaagacagcaacaccaagaaggccggcaagacaggccccatgaaaaccctgctggttagagtgatgacacccgatctgagagagcggctggaaaacctgagaaagaagcctgaaaatatcccccagcccatcagcaatacatctagagccaacctgaataagctgctgaccgattacaccgaaatgaagaaggcgatcctgcatgtgtactgggaagagttccagaaggaccctgtgggcctgatgagccgggtggcccagcctgccagcaagaagatcgatcagaacaagctgaaacctgagatggacgagaagggcaacctgaccaccgccggctttgcctgctctcagtgtggccagcccctgttcgtgtacaagctggagcaggtgtctgagaagggcaaggcttacaccaactacttcggacggtgcaatgtggccgagcacgaaaagctgatcctgctggcccagctgaagcccgagaaggatagcgacgaagccgtgacatatagcctgggaaagtttgggcagagggccctggatttctacagcattcatgtgaccaaggagtccacccaccccgtgaagcccctggcccagatcgccggaaacagatacgcctccggacctgtgggaaaggccctgagcgacgcatgtatgggcacaatcgcctccttcctgtctaagtaccaggacatcatcatcgaacaccagaaggtggtgaagggcaaccagaagagactggagagcctgcgggagctggccggcaaggaaaacctggaataccctagcgtgaccctgccacctcagcctcacaccaaggagggcgttgatgcctacaacgaagtgatcgcccgggtgcgaatgtgggtgaacctgaacctgtggcagaagctgaagctaagcagagatgatgccaagcctctgctgagactgaagggattcccttcctttcctctggtcgagagacaggccaacgaagtggactggtgggacatggtgtgtaacgtgaagaagctgatcaacgagaaaaaggaggatggcaaggtgttttggcagaatctggctggctacaagagacaggaagccctgagaccatacctgagcagcgaggaagatcggaagaagggaaagaaattcgctcggtaccagctgggcgacctgctgctgcacctggaaaagaagcacggcgaggactggggaaaggtgtacgacgaggcctgggagcggattgacaagaaagtggaaggcctgagcaagcacatcaagctggaagaggaacggagaagcgaggacgcccagagcaaggccgccctgaccgactggctgcgggctaaggccagcttcgtgatcgagggcctgaaggaggccgacaaggacgagttctgcagatgcgagctgaagctgcagaagtggtacggggacctgcggggaaagcccttcgccatcgaagccgagaacagcatcctggacatcagcggcttcagcaagcagtacaactgtgccttcatctggcagaaggacggcgtgaagaagctgaacctgtacctgatcatcaactacttcaagggcggcaagctgcggttcaagaagatcaaacctgaagccttcgaagccaacagattctacaccgtgatcaacaaaaagagcggcgagatcgtgcccatggaggtgaacttcaacttcgacgaccccaacctgatcatcctgcctctggcctttggcaagagacagggcagagaattcatctggaacgacctgctgtccctggaaaccggcagcctgaagctggccaacggaagagtgatcgagaagacactgtacaacagaagaacccggcaggatgagcctgccctgttcgtggccctgaccttcgagcggcgggaggtcctggactcctccaatatcaaaccaatgaacctgatcggcgtggcaagaggcgaaaacatccccgccgtgatcgccctgaccgaccccgagggctgcccactgagccggtttaaggatagcctgggaaacccaacccacatcctgagaatcggcgagagctataaggagaagcagcggaccatccaggccaagaaggaggtggagcagcggagagccggcggctacagccggaagtacgccagcaaagccaagaatctggcagacgatatggtgagaaacaccgctagagatctgctgtactacgccgtgacccaggatgccatgctgatcttcgccaacctgagccggggcttcggccggcagggcaagcggaccttcatggccgagagacagtacacacggatggaggactggctgaccgccaagctggcctacgagggcctgagcaagacctacctgtccaagacactggcccagtacacctccaagacatgcagcaactgtgggtttaccatcaccagcgccgactacgacagggtgctggagaagctgaagaagacagcaacaggctggatgaccacaattaacggcaaggagctgaaggtggagggccagattacctactacaacagatacaagagacagaacgtagtcaaggacctgtccgtcgagctggatagactgagcgaagaatctgtgaacaacgacatctcctcctggacaaagggcagaagcggagaagctctgagcctcctgaagaaaagattctcccatagacccgtgcaggagaagttcgtgtgcctgaactgcggcttcgagacacacgcagccgagcaagccgccctgaacatcgccagatcctggctgttcctgcggagccaggagtacaagaaataccagacaaacaagacaaccggcaacaccgataagagagccttcgtcgagacctggcagtccttttaccggaagaagcttaaggaggtgtggaaacctgccgtgcggtctggcggatctggcggaggctccttcctgccccaggtgaccttcgaggacgtggccatctacttcagcagggaggagtgggacgagctgagcgagtggcagagggagctgtaccaggccgtgatgatggagaactacgaggccgtgctgagcctgggcaagaacgacttcatcgcccagtgcacctggggcctgagggagggcgagaagagggccagcggcaagagcgagaaggccaggaacaggcccgtgagcaacctgtggaggggcggcccaagcagcggcgcccctcctcccagcggcggcagcccagccggctccccaacctctaccgaggagggcacctctgagtccgccacccccgagagcggccctggcacctccaccgagcccagcgagggcagcgcacccggcagccctgccggcagccccacctccacagaggagggaaccagcaccgagcccagcgaaggcagcgccccaggcaccagcaccgagcctagtgagcaggagattaaacggatcaacaagatcagaagaagacttgtgaaagacagcaacaccaagaaggccggcaagacaggccccatgaaaaccctgctggttagagtgatgacacccgatctgagagagcggctggaaaacctgagaaagaagcctgaaaatatcccccagcccatcagcaatacatctagagccaacctgaataagctgctgaccgattacaccgaaatgaagaaggcgatcctgcatgtgtactgggaagagttccagaaggaccctgtgggcctgatgagccgggtggcccagcctgccagcaagaagatcgatcagaacaagctgaaacctgagatggacgagaagggcaacctgaccaccgccggctttgcctgctctcagtgtggccagcccctgttcgtgtacaagctggagcaggtgtctgagaagggcaaggcttacaccaactacttcggacggtgcaatgtggccgagcacgaaaagctgatcctgctggcccagctgaagcccgagaaggatagcgacgaagccgtgacatatagcctgggaaagtttgggcagagggccctggatttctacagcattcatgtgaccaaggagtccacccaccccgtgaagcccctggcccagatcgccggaaacagatacgcctccggacctgtgggaaaggccctgagcgacgcatgtatgggcacaatcgcctccttcctgtctaagtaccaggacatcatcatcgaacaccagaaggtggtgaagggcaaccagaagagactggagagcctgcgggagctggccggcaaggaaaacctggaataccctagcgtgaccctgccacctcagcctcacaccaaggagggcgttgatgcctacaacgaagtgatcgcccgggtgcgaatgtgggtgaacctgaacctgtggcagaagctgaagctaagcagagatgatgccaagcctctgctgagactgaagggattcccttcctttcctctggtcgagagacaggccaacgaagtggactggtgggacatggtgtgtaacgtgaagaagctgatcaacgagaaaaaggaggatggcaaggtgttttggcagaatctggctggctacaagagacaggaagccctgagaccatacctgagcagcgaggaagatcggaagaagggaaagaaattcgctcggtaccagctgggcgacctgctgctgcacctggaaaagaagcacggcgaggactggggaaaggtgtacgacgaggcctgggagcggattgacaagaaagtggaaggcctgagcaagcacatcaagctggaagaggaacggagaagcgaggacgcccagagcaaggccgccctgaccgactggctgcgggctaaggccagcttcgtgatcgagggcctgaaggaggccgacaaggacgagttctgcagatgcgagctgaagctgcagaagtggtacggggacctgcggggaaagcccttcgccatcgaagccgagaacagcatcctggacatcagcggcttcagcaagcagtacaactgtgccttcatctggcagaaggacggcgtgaagaagctgaacctgtacctgatcatcaactacttcaagggcggcaagctgcggttcaagaagatcaaacctgaagccttcgaagccaacagattctacaccgtgatcaacaaaaagagcggcgagatcgtgcccatggaggtgaacttcaacttcgacgaccccaacctgatcatcctgcctctggcctttggcaagagacagggcagagaattcatctggaacgacctgctgtccctggaaaccggcagcctgaagctggccaacggaagagtgatcgagaagacactgtacaacagaagaacccggcaggatgagcctgccctgttcgtggccctgaccttcgagcggcgggaggtcctggactcctccaatatcaaaccaatgaacctgatcggcgtggcaagaggcgaaaacatccccgccgtgatcgccctgaccgaccccgagggctgcccactgagccggtttaaggatagcctgggaaacccaacccacatcctgagaatcggcgagagctataaggagaagcagcggaccatccaggccaagaaggaggtggagcagcggagagccggcggctacagccggaagtacgccagcaaagccaagaatctggcagacgatatggtgagaaacaccgctagagatctgctgtactacgccgtgacccaggatgccatgctgatcttcgccaacctgagccggggcttcggccggcagggcaagcggaccttcatggccgagagacagtacacacggatggaggactggctgaccgccaagctggcctacgagggcctgagcaagacctacctgtccaagacactggcccagtacacctccaagacatgcagcaactgtgggtttaccatcaccagcgccgactacgacagggtgctggagaagctgaagaagacagcaacaggctggatgaccacaattaacggcaaggagctgaaggtggagggccagattacctactacaacagatacaagagacagaacgtagtcaaggacctgtccgtcgagctggatagactgagcgaagaatctgtgaacaacgacatctcctcctggacaaagggcagaagcggagaagctctgagcctcctgaagaaaagattctcccatagacccgtgcaggagaagttcgtgtgcctgaactgcggcttcgagacacacgcagccgagcaagccgccctgaacatcgccagatcctggctgttcctgcggagccaggagtacaagaaataccagacaaacaagacaaccggcaacaccgataagagagccttcgtcgagacctggcagtccttttaccggaagaagcttaaggaggtgtggaaacctgccgtgcggtctggcggatctggcggaggctcctttcctgccccaggtgaccttcgaggacgtggccatctacttcagcagggaggagtgggacgagctgagcgagtggcagagggagctgtaccaggccgtgatgatggagaactacgaggccgtgctgagcctgggcaagaacgacttcatcgcccagtgcacctggggcctgagggagggcgagaagagggccagcggcaagagcgagaaggccaggaacaggcccgtgagcaacctgtggaggggatctggctccggcagcggccccaagaaaaagagaaaagtctaagctgccttctgcggggcttgccttctggccatgcccttcttctctcccttgcacctgtacctcttggtctttgaataaagcctgagtaggaaggctagcaaaaaaaaaaaaaaaaaaaaaaaaaaaaaaaaaaaaaaaaaaaaaaaaaaaaaaaaaaaaaaaaaaaaaaaaaaaaaaaa

SEQ ID NO: 15899 - RNA, 9485 nt, synthetic construct
  source 1..9485: mol_type = other RNA
aggaaataagagagaaaagaagagtaagaagaaatataagagccaccatggcccctaagaagaagcgtaaagtgagccggatggaacgcctcgtctacgaggtgcggcagaagtgcagaaacatcgaggacatctgcatctcctgcggatctctgaacgtgaccctggagcacccactgttcatcggcggcatgtgccagaactgtaaaaactgttttctggagtgtgcctatcaatacgacgatgacggctaccagagctactgcaccatctgttgcggcggaagagaggtgctgatgtgtggaaataacaactgctgccggtgcttctgcgtggaatgcgtggacctgctggtgggccccggcgccgcccaggccgctattaaggaagatccttggaactgctacatgtgcggccacaagggcacatacggcctgctgagacggagagaggactggcctagcagactgcagatgttcttcgccaataaccacgaccaggagttcgacccccctaaggtgtaccctcccgtccccgccgagaagagaaagcccatccgggtcctgagcctgttcgatggcatcgccaccggtctgctggtgctgaaggacctgggcatccaggtggataggtacattgcctccgaggtgtgcgaggactccatcaccgtgggaatggtgcgtcatcagggcaagatcatgtacgtgggcgacgtgcggagcgtgacacagaagcatatccaggagtggggccctttcgacctggtgatcggcggcagcccttgcaatgacctgagcatcgtgaacccagcccggaagggcctgtacgagggaaccggcagactgttcttcgagttttacagactgctgcacgacgcccggcctaaggaaggcgacgaccggcccttcttttggctgttcgagaatgtggtggccatgggagtcagcgacaagcgggatattagccggttcctggagagcaaccccgtgatgatcgatgccaaggaagtgagcgccgcccaccgggccagatacttctggggcaatctgcctggcatgaacagacccctggccagcaccgtgaacgacaagctggagctgcaggagtgcctggagcacggccggatcgccaagttcagcaaggtgagaaccatcaccacccgaagcaacagcatcaaacaaggcaaggaccagcactttcctgtgttcatgaacgagaaggaggacatcctgtggtgtaccgagatggagagagtgttcgggttcccagtccactacacagatgtcagcaacatgtctagactggccagacagagactgctgggaagaagctggtccgtccctgtgatcagacacctgttcgcccctctgaaggagtacttcgcctgcgtgagcagcggcaacagcaacgccaacagccggggccccagcttctctagcggcctggtgccactgtccctgagagggagccacatgggccccatggagatctacaaaaccgtgagcgcctggaagcggcagcctgtgcgcgtgctgagcctgtttcggaatatcgataaagtcctgaaaagcctgggattcctggagagcggctctggctccggcggtggcaccctgaagtacgtggaggatgtgacaaacgtggtcagacgggatgtggagaagtggggccccttcgatctggtgtacggcagcacccaacccctgggcagctcttgtgaccggtgccctggctggtacatgtttcagttccaccggatcctgcagtacgccctgccgagacaggagtcccagcggccattcttttggattttcatggacaacttgctgctgaccgaggatgaccaggaaactaccactcggttcctgcagaccgaagccgtgaccctgcaggacgtgagaggccgggactaccagaacgccatgcgggtgtggtccaacatccctggactgaaaagcaagcacgcacctctgacccctaaagaagaggagtacctgcaggcccaggtgcggagcagaagcaagctggacgcccctaaggtggatctgctggtgaagaattgcctcctgcccctgagagagtacttcaagtatttcagccagaatagtctgcccctgggaggcagcggcggcggcgccctggtgacatttgaggacgtcgccgtgcggttcacccaggaggaatgggctctgctggatccttctcagaaaatcctgtaccgggacgtgatgagagagacataccggaatctgacctccgtgggcatcaactgggaatgttgggaccttgaagcctgcttcagaagcctgggaagaaacctgagagtgcaggtggtgaagagaaagtgcgagctgaccaacagcggcccctgcgccgagggcggcccaagcagcggcgcccctcctcccagcggcggcagcccagccggctccccaacctctaccgaggagggcacctctgagtccgccacccccgagagcggccctggcacctccaccgagcccagcgagggcagcgcacccggcagccctgccggcagccccacctccacagaggagggaaccagcaccgagcccagcgaaggcagcgccccaggcaccagcaccgagcctagtgagcaggagattaaacggatcaacaagatcagaagaagacttgtgaaagacagcaacaccaagaaggccggcaagacaggccccatgaaaaccctgctggttagagtgatgacacccgatctgagagagcggctggaaaacctgagaaagaagcctgaaaatatcccccagcccatcagcaatacatctagagccaacctgaataagctgctgaccgattacaccgaaatgaagaaggcgatcctgcatgtgtactgggaagagttccagaaggaccctgtgggcctgatgagccgggtggcccagcctgccagcaagaagatcgatcagaacaagctgaaacctgagatggacgagaagggcaacctgaccaccgccggctttgcctgctctcagtgtggccagcccctgttcgtgtacaagctggagcaggtgtctgagaagggcaaggcttacaccaactacttcggacggtgcaatgtggccgagcacgaaaagctgatcctgctggcccagctgaagcccgagaaggatagcgacgaagccgtgacatatagcctgggaaagtttgggcagagggccctggatttctacagcattcatgtgaccaaggagtccacccaccccgtgaagcccctggcccagatcgccggaaacagatacgcctccggacctgtgggaaaggccctgagcgacgcatgtatgggcacaatcgcctccttcctgtctaagtaccaggacatcatcatcgaacaccagaaggtggtgaagggcaaccagaagagactggagagcctgcgggagctggccggcaaggaaaacctggaataccctagcgtgaccctgccacctcagcctcacaccaaggagggcgttgatgcctacaacgaagtgatcgcccgggtgcgaatgtgggtgaacctgaacctgtggcagaagctgaagctaagcagagatgatgccaagcctctgctgagactgaagggattcccttcctttcctctggtcgagagacaggccaacgaagtggactggtgggacatggtgtgtaacgtgaagaagctgatcaacgagaaaaaggaggatggcaaggtgttttggcagaatctggctggctacaagagacaggaagccctgagaccatacctgagcagcgaggaagatcggaagaagggaaagaaattcgctcggtaccagctgggcgacctgctgctgcacctggaaaagaagcacggcgaggactggggaaaggtgtacgacgaggcctgggagcggattgacaagaaagtggaaggcctgagcaagcacatcaagctggaagaggaacggagaagcgaggacgcccagagcaaggccgccctgaccgactggctgcgggctaaggccagcttcgtgatcgagggcctgaaggaggccgacaaggacgagttctgcagatgcgagctgaagctgcagaagtggtacggggacctgcggggaaagcccttcgccatcgaagccgagaacagcatcctggacatcagcggcttcagcaagcagtacaactgtgccttcatctggcagaaggacggcgtgaagaagctgaacctgtacctgatcatcaactacttcaagggcggcaagctgcggttcaagaagatcaaacctgaagccttcgaagccaacagattctacaccgtgatcaacaaaaagagcggcgagatcgtgcccatggaggtgaacttcaacttcgacgaccccaacctgatcatcctgcctctggcctttggcaagagacagggcagagaattcatctggaacgacctgctgtccctggaaaccggcagcctgaagctggccaacggaagagtgatcgagaagacactgtacaacagaagaacccggcaggatgagcctgccctgttcgtggccctgaccttcgagcggcgggaggtcctggactcctccaatatcaaaccaatgaacctgatcggcgtggcaagaggcgaaaacatccccgccgtgatcgccctgaccgaccccgagggctgcccactgagccggtttaaggatagcctgggaaacccaacccacatcctgagaatcggcgagagctataaggagaagcagcggaccatccaggccaagaaggaggtggagcagcggagagccggcggctacagccggaagtacgccagcaaagccaagaatctggcagacgatatggtgagaaacaccgctagagatctgctgtactacgccgtgacccaggatgccatgctgatcttcgccaacctgagccggggcttcggccggcagggcaagcggaccttcatggccgagagacagtacacacggatggaggactggctgaccgccaagctggcctacgagggcctgagcaagacctacctgtccaagacactggcccagtacacctccaagacatgcagcaactgtgggtttaccatcaccagcgccgactacgacagggtgctggagaagctgaagaagacagcaacaggctggatgaccacaattaacggcaaggagctgaaggtggagggccagattacctactacaacagatacaagagacagaacgtagtcaaggacctgtccgtcgagctggatagactgagcgaagaatctgtgaacaacgacatctcctcctggacaaagggcagaagcggagaagctctgagcctcctgaagaaaagattctcccatagacccgtgcaggagaagttcgtgtgcctgaactgcggcttcgagacacacgcagccgagcaagccgccctgaacatcgccagatcctggctgttcctgcggagccaggagtacaagaaataccagacaaacaagacaaccggcaacaccgataagagagccttcgtcgagacctggcagtccttttaccggaagaagcttaaggaggtgtggaaacctgccgtgcggtctggcggatctggcggaggctccagccaggagcccgtgaccttcgccgacgtggccgtggtgttcacccccgaggagtgggtgttcctggacagcacccagaggagcctgtacagggacgtgatgctggagaactacaggaacctggccagcgtggccgaccagctgtgcaagcccaacgccctgagctacctggaggagaggggcgagcagtggaccaccgacaggggcgtgctgcccgacacctgcgccgagccccagtgccagggcggcccaagcagcggcgcccctcctcccagcggcggcagcccagccggctccccaacctctaccgaggagggcacctctgagtccgccacccccgagagcggccctggcacctccaccgagcccagcgagggcagcgcacccggcagccctgccggcagccccacctccacagaggagggaaccagcaccgagcccagcgaaggcagcgccccaggcaccagcaccgagcctagtgagcaggagattaaacggatcaacaagatcagaagaagacttgtgaaagacagcaacaccaagaaggccggcaagacaggccccatgaaaaccctgctggttagagtgatgacacccgatctgagagagcggctggaaaacctgagaaagaagcctgaaaatatcccccagcccatcagcaatacatctagagccaacctgaataagctgctgaccgattacaccgaaatgaagaaggcgatcctgcatgtgtactgggaagagttccagaaggaccctgtgggcctgatgagccgggtggcccagcctgccagcaagaagatcgatcagaacaagctgaaacctgagatggacgagaagggcaacctgaccaccgccggctttgcctgctctcagtgtggccagcccctgttcgtgtacaagctggagcaggtgtctgagaagggcaaggcttacaccaactacttcggacggtgcaatgtggccgagcacgaaaagctgatcctgctggcccagctgaagcccgagaaggatagcgacgaagccgtgacatatagcctgggaaagtttgggcagagggccctggatttctacagcattcatgtgaccaaggagtccacccaccccgtgaagcccctggcccagatcgccggaaacagatacgcctccggacctgtgggaaaggccctgagcgacgcatgtatgggcacaatcgcctccttcctgtctaagtaccaggacatcatcatcgaacaccagaaggtggtgaagggcaaccagaagagactggagagcctgcgggagctggccggcaaggaaaacctggaataccctagcgtgaccctgccacctcagcctcacaccaaggagggcgttgatgcctacaacgaagtgatcgcccgggtgcgaatgtgggtgaacctgaacctgtggcagaagctgaagctaagcagagatgatgccaagcctctgctgagactgaagggattcccttcctttcctctggtcgagagacaggccaacgaagtggactggtgggacatggtgtgtaacgtgaagaagctgatcaacgagaaaaaggaggatggcaaggtgttttggcagaatctggctggctacaagagacaggaagccctgagaccatacctgagcagcgaggaagatcggaagaagggaaagaaattcgctcggtaccagctgggcgacctgctgctgcacctggaaaagaagcacggcgaggactggggaaaggtgtacgacgaggcctgggagcggattgacaagaaagtggaaggcctgagcaagcacatcaagctggaagaggaacggagaagcgaggacgcccagagcaaggccgccctgaccgactggctgcgggctaaggccagcttcgtgatcgagggcctgaaggaggccgacaaggacgagttctgcagatgcgagctgaagctgcagaagtggtacggggacctgcggggaaagcccttcgccatcgaagccgagaacagcatcctggacatcagcggcttcagcaagcagtacaactgtgccttcatctggcagaaggacggcgtgaagaagctgaacctgtacctgatcatcaactacttcaagggcggcaagctgcggttcaagaagatcaaacctgaagccttcgaagccaacagattctacaccgtgatcaacaaaaagagcggcgagatcgtgcccatggaggtgaacttcaacttcgacgaccccaacctgatcatcctgcctctggcctttggcaagagacagggcagagaattcatctggaacgacctgctgtccctggaaaccggcagcctgaagctggccaacggaagagtgatcgagaagacactgtacaacagaagaacccggcaggatgagcctgccctgttcgtggccctgaccttcgagcggcgggaggtcctggactcctccaatatcaaaccaatgaacctgatcggcgtggcaagaggcgaaaacatccccgccgtgatcgccctgaccgaccccgagggctgcccactgagccggtttaaggatagcctgggaaacccaacccacatcctgagaatcggcgagagctataaggagaagcagcggaccatccaggccaagaaggaggtggagcagcggagagccggcggctacagccggaagtacgccagcaaagccaagaatctggcagacgatatggtgagaaacaccgctagagatctgctgtactacgccgtgacccaggatgccatgctgatcttcgccaacctgagccggggcttcggccggcagggcaagcggaccttcatggccgagagacagtacacacggatggaggactggctgaccgccaagctggcctacgagggcctgagcaagacctacctgtccaagacactggcccagtacacctccaagacatgcagcaactgtgggtttaccatcaccagcgccgactacgacagggtgctggagaagctgaagaagacagcaacaggctggatgaccacaattaacggcaaggagctgaaggtggagggccagattacctactacaacagatacaagagacagaacgtagtcaaggacctgtccgtcgagctggatagactgagcgaagaatctgtgaacaacgacatctcctcctggacaaagggcagaagcggagaagctctgagcctcctgaagaaaagattctcccatagacccgtgcaggagaagttcgtgtgcctgaactgcggcttcgagacacacgcagccgagcaagccgccctgaacatcgccagatcctggctgttcctgcggagccaggagtacaagaaataccagacaaacaagacaaccggcaacaccgataagagagccttcgtcgagacctggcagtccttttaccggaagaagcttaaggaggtgtggaaacctgccgtgcggtctggcggatctggcggaggctcctagccaggagcccgtgaccttcgccgacgtggccgtggtgttcacccccgaggagtgggtgttcctggacagcacccagaggagcctgtacagggacgtgatgctggagaactacaggaacctggccagcgtggccgaccagctgtgcaagcccaacgccctgagctacctggaggagaggggcgagcagtggaccaccgacaggggcgtgctgcccgacacctgcgccgagccccagtgccagggatctggctccggcagcggccccaagaaaaagagaaaagtctaagctgccttctgcggggcttgccttctggccatgcccttcttctctcccttgcacctgtacctcttggtctttgaataaagcctgagtaggaaggctagcaaaaaaaaaaaaaaaaaaaaaaaaaaaaaaaaaaaaaaaaaaaaaaaaaaaaaaaaaaaaaaaaaaaaaaaaaaaaaaaa

SEQ ID NO: 15900 - RNA, 9485 nt, synthetic construct
  source 1..9485: mol_type = other RNA
aggaaataagagagaaaagaagagtaagaagaaatataagagccaccatggcccctaagaagaagcgtaaagtgagccggatggaacgcctcgtctacgaggtgcggcagaagtgcagaaacatcgaggacatctgcatctcctgcggatctctgaacgtgaccctggagcacccactgttcatcggcggcatgtgccagaactgtaaaaactgttttctggagtgtgcctatcaatacgacgatgacggctaccagagctactgcaccatctgttgcggcggaagagaggtgctgatgtgtggaaataacaactgctgccggtgcttctgcgtggaatgcgtggacctgctggtgggccccggcgccgcccaggccgctattaaggaagatccttggaactgctacatgtgcggccacaagggcacatacggcctgctgagacggagagaggactggcctagcagactgcagatgttcttcgccaataaccacgaccaggagttcgacccccctaaggtgtaccctcccgtccccgccgagaagagaaagcccatccgggtcctgagcctgttcgatggcatcgccaccggtctgctggtgctgaaggacctgggcatccaggtggataggtacattgcctccgaggtgtgcgaggactccatcaccgtgggaatggtgcgtcatcagggcaagatcatgtacgtgggcgacgtgcggagcgtgacacagaagcatatccaggagtggggccctttcgacctggtgatcggcggcagcccttgcaatgacctgagcatcgtgaacccagcccggaagggcctgtacgagggaaccggcagactgttcttcgagttttacagactgctgcacgacgcccggcctaaggaaggcgacgaccggcccttcttttggctgttcgagaatgtggtggccatgggagtcagcgacaagcgggatattagccggttcctggagagcaaccccgtgatgatcgatgccaaggaagtgagcgccgcccaccgggccagatacttctggggcaatctgcctggcatgaacagacccctggccagcaccgtgaacgacaagctggagctgcaggagtgcctggagcacggccggatcgccaagttcagcaaggtgagaaccatcaccacccgaagcaacagcatcaaacaaggcaaggaccagcactttcctgtgttcatgaacgagaaggaggacatcctgtggtgtaccgagatggagagagtgttcgggttcccagtccactacacagatgtcagcaacatgtctagactggccagacagagactgctgggaagaagctggtccgtccctgtgatcagacacctgttcgcccctctgaaggagtacttcgcctgcgtgagcagcggcaacagcaacgccaacagccggggccccagcttctctagcggcctggtgccactgtccctgagagggagccacatgggccccatggagatctacaaaaccgtgagcgcctggaagcggcagcctgtgcgcgtgctgagcctgtttcggaatatcgataaagtcctgaaaagcctgggattcctggagagcggctctggctccggcggtggcaccctgaagtacgtggaggatgtgacaaacgtggtcagacgggatgtggagaagtggggccccttcgatctggtgtacggcagcacccaacccctgggcagctcttgtgaccggtgccctggctggtacatgtttcagttccaccggatcctgcagtacgccctgccgagacaggagtcccagcggccattcttttggattttcatggacaacttgctgctgaccgaggatgaccaggaaactaccactcggttcctgcagaccgaagccgtgaccctgcaggacgtgagaggccgggactaccagaacgccatgcgggtgtggtccaacatccctggactgaaaagcaagcacgcacctctgacccctaaagaagaggagtacctgcaggcccaggtgcggagcagaagcaagctggacgcccctaaggtggatctgctggtgaagaattgcctcctgcccctgagagagtacttcaagtatttcagccagaatagtctgcccctgggaggcagcggcggcggcgccctggtgacatttgaggacgtcgccgtgcggttcacccaggaggaatgggctctgctggatccttctcagaaaatcctgtaccgggacgtgatgagagagacataccggaatctgacctccgtgggcatcaactgggaatgttgggaccttgaagcctgcttcagaagcctgggaagaaacctgagagtgcaggtggtgaagagaaagtgcgagctgaccaacagcggcccctgcgccgagggcggcccaagcagcggcgcccctcctcccagcggcggcagcccagccggctccccaacctctaccgaggagggcacctctgagtccgccacccccgagagcggccctggcacctccaccgagcccagcgagggcagcgcacccggcagccctgccggcagccccacctccacagaggagggaaccagcaccgagcccagcgaaggcagcgccccaggcaccagcaccgagcctagtgagcaggagattaaacggatcaacaagatcagaagaagacttgtgaaagacagcaacaccaagaaggccggcaagacaggccccatgaaaaccctgctggttagagtgatgacacccgatctgagagagcggctggaaaacctgagaaagaagcctgaaaatatcccccagcccatcagcaatacatctagagccaacctgaataagctgctgaccgattacaccgaaatgaagaaggcgatcctgcatgtgtactgggaagagttccagaaggaccctgtgggcctgatgagccgggtggcccagcctgccagcaagaagatcgatcagaacaagctgaaacctgagatggacgagaagggcaacctgaccaccgccggctttgcctgctctcagtgtggccagcccctgttcgtgtacaagctggagcaggtgtctgagaagggcaaggcttacaccaactacttcggacggtgcaatgtggccgagcacgaaaagctgatcctgctggcccagctgaagcccgagaaggatagcgacgaagccgtgacatatagcctgggaaagtttgggcagagggccctggatttctacagcattcatgtgaccaaggagtccacccaccccgtgaagcccctggcccagatcgccggaaacagatacgcctccggacctgtgggaaaggccctgagcgacgcatgtatgggcacaatcgcctccttcctgtctaagtaccaggacatcatcatcgaacaccagaaggtggtgaagggcaaccagaagagactggagagcctgcgggagctggccggcaaggaaaacctggaataccctagcgtgaccctgccacctcagcctcacaccaaggagggcgttgatgcctacaacgaagtgatcgcccgggtgcgaatgtgggtgaacctgaacctgtggcagaagctgaagctaagcagagatgatgccaagcctctgctgagactgaagggattcccttcctttcctctggtcgagagacaggccaacgaagtggactggtgggacatggtgtgtaacgtgaagaagctgatcaacgagaaaaaggaggatggcaaggtgttttggcagaatctggctggctacaagagacaggaagccctgagaccatacctgagcagcgaggaagatcggaagaagggaaagaaattcgctcggtaccagctgggcgacctgctgctgcacctggaaaagaagcacggcgaggactggggaaaggtgtacgacgaggcctgggagcggattgacaagaaagtggaaggcctgagcaagcacatcaagctggaagaggaacggagaagcgaggacgcccagagcaaggccgccctgaccgactggctgcgggctaaggccagcttcgtgatcgagggcctgaaggaggccgacaaggacgagttctgcagatgcgagctgaagctgcagaagtggtacggggacctgcggggaaagcccttcgccatcgaagccgagaacagcatcctggacatcagcggcttcagcaagcagtacaactgtgccttcatctggcagaaggacggcgtgaagaagctgaacctgtacctgatcatcaactacttcaagggcggcaagctgcggttcaagaagatcaaacctgaagccttcgaagccaacagattctacaccgtgatcaacaaaaagagcggcgagatcgtgcccatggaggtgaacttcaacttcgacgaccccaacctgatcatcctgcctctggcctttggcaagagacagggcagagaattcatctggaacgacctgctgtccctggaaaccggcagcctgaagctggccaacggaagagtgatcgagaagacactgtacaacagaagaacccggcaggatgagcctgccctgttcgtggccctgaccttcgagcggcgggaggtcctggactcctccaatatcaaaccaatgaacctgatcggcgtggcaagaggcgaaaacatccccgccgtgatcgccctgaccgaccccgagggctgcccactgagccggtttaaggatagcctgggaaacccaacccacatcctgagaatcggcgagagctataaggagaagcagcggaccatccaggccaagaaggaggtggagcagcggagagccggcggctacagccggaagtacgccagcaaagccaagaatctggcagacgatatggtgagaaacaccgctagagatctgctgtactacgccgtgacccaggatgccatgctgatcttcgccaacctgagccggggcttcggccggcagggcaagcggaccttcatggccgagagacagtacacacggatggaggactggctgaccgccaagctggcctacgagggcctgagcaagacctacctgtccaagacactggcccagtacacctccaagacatgcagcaactgtgggtttaccatcaccagcgccgactacgacagggtgctggagaagctgaagaagacagcaacaggctggatgaccacaattaacggcaaggagctgaaggtggagggccagattacctactacaacagatacaagagacagaacgtagtcaaggacctgtccgtcgagctggatagactgagcgaagaatctgtgaacaacgacatctcctcctggacaaagggcagaagcggagaagctctgagcctcctgaagaaaagattctcccatagacccgtgcaggagaagttcgtgtgcctgaactgcggcttcgagacacacgcagccgagcaagccgccctgaacatcgccagatcctggctgttcctgcggagccaggagtacaagaaataccagacaaacaagacaaccggcaacaccgataagagagccttcgtcgagacctggcagtccttttaccggaagaagcttaaggaggtgtggaaacctgccgtgcggtctggcggatctggcggaggctccttccagatgcccgtgaccttcgaggaggtggccgtgtacttcacccagggccagggcgccctgctggaccccgcccagagggccctgtacagggacgtgatgcaggagaactacgagatggtgaccagcctgggcttccccatccccaagcccgagctgatcgccaggctggagaggggcgaggagccctgggtgcccgacctgcaggcctgcaaggagaggaggctgcccaggtgcaccaggggcggcccaagcagcggcgcccctcctcccagcggcggcagcccagccggctccccaacctctaccgaggagggcacctctgagtccgccacccccgagagcggccctggcacctccaccgagcccagcgagggcagcgcacccggcagccctgccggcagccccacctccacagaggagggaaccagcaccgagcccagcgaaggcagcgccccaggcaccagcaccgagcctagtgagcaggagattaaacggatcaacaagatcagaagaagacttgtgaaagacagcaacaccaagaaggccggcaagacaggccccatgaaaaccctgctggttagagtgatgacacccgatctgagagagcggctggaaaacctgagaaagaagcctgaaaatatcccccagcccatcagcaatacatctagagccaacctgaataagctgctgaccgattacaccgaaatgaagaaggcgatcctgcatgtgtactgggaagagttccagaaggaccctgtgggcctgatgagccgggtggcccagcctgccagcaagaagatcgatcagaacaagctgaaacctgagatggacgagaagggcaacctgaccaccgccggctttgcctgctctcagtgtggccagcccctgttcgtgtacaagctggagcaggtgtctgagaagggcaaggcttacaccaactacttcggacggtgcaatgtggccgagcacgaaaagctgatcctgctggcccagctgaagcccgagaaggatagcgacgaagccgtgacatatagcctgggaaagtttgggcagagggccctggatttctacagcattcatgtgaccaaggagtccacccaccccgtgaagcccctggcccagatcgccggaaacagatacgcctccggacctgtgggaaaggccctgagcgacgcatgtatgggcacaatcgcctccttcctgtctaagtaccaggacatcatcatcgaacaccagaaggtggtgaagggcaaccagaagagactggagagcctgcgggagctggccggcaaggaaaacctggaataccctagcgtgaccctgccacctcagcctcacaccaaggagggcgttgatgcctacaacgaagtgatcgcccgggtgcgaatgtgggtgaacctgaacctgtggcagaagctgaagctaagcagagatgatgccaagcctctgctgagactgaagggattcccttcctttcctctggtcgagagacaggccaacgaagtggactggtgggacatggtgtgtaacgtgaagaagctgatcaacgagaaaaaggaggatggcaaggtgttttggcagaatctggctggctacaagagacaggaagccctgagaccatacctgagcagcgaggaagatcggaagaagggaaagaaattcgctcggtaccagctgggcgacctgctgctgcacctggaaaagaagcacggcgaggactggggaaaggtgtacgacgaggcctgggagcggattgacaagaaagtggaaggcctgagcaagcacatcaagctggaagaggaacggagaagcgaggacgcccagagcaaggccgccctgaccgactggctgcgggctaaggccagcttcgtgatcgagggcctgaaggaggccgacaaggacgagttctgcagatgcgagctgaagctgcagaagtggtacggggacctgcggggaaagcccttcgccatcgaagccgagaacagcatcctggacatcagcggcttcagcaagcagtacaactgtgccttcatctggcagaaggacggcgtgaagaagctgaacctgtacctgatcatcaactacttcaagggcggcaagctgcggttcaagaagatcaaacctgaagccttcgaagccaacagattctacaccgtgatcaacaaaaagagcggcgagatcgtgcccatggaggtgaacttcaacttcgacgaccccaacctgatcatcctgcctctggcctttggcaagagacagggcagagaattcatctggaacgacctgctgtccctggaaaccggcagcctgaagctggccaacggaagagtgatcgagaagacactgtacaacagaagaacccggcaggatgagcctgccctgttcgtggccctgaccttcgagcggcgggaggtcctggactcctccaatatcaaaccaatgaacctgatcggcgtggcaagaggcgaaaacatccccgccgtgatcgccctgaccgaccccgagggctgcccactgagccggtttaaggatagcctgggaaacccaacccacatcctgagaatcggcgagagctataaggagaagcagcggaccatccaggccaagaaggaggtggagcagcggagagccggcggctacagccggaagtacgccagcaaagccaagaatctggcagacgatatggtgagaaacaccgctagagatctgctgtactacgccgtgacccaggatgccatgctgatcttcgccaacctgagccggggcttcggccggcagggcaagcggaccttcatggccgagagacagtacacacggatggaggactggctgaccgccaagctggcctacgagggcctgagcaagacctacctgtccaagacactggcccagtacacctccaagacatgcagcaactgtgggtttaccatcaccagcgccgactacgacagggtgctggagaagctgaagaagacagcaacaggctggatgaccacaattaacggcaaggagctgaaggtggagggccagattacctactacaacagatacaagagacagaacgtagtcaaggacctgtccgtcgagctggatagactgagcgaagaatctgtgaacaacgacatctcctcctggacaaagggcagaagcggagaagctctgagcctcctgaagaaaagattctcccatagacccgtgcaggagaagttcgtgtgcctgaactgcggcttcgagacacacgcagccgagcaagccgccctgaacatcgccagatcctggctgttcctgcggagccaggagtacaagaaataccagacaaacaagacaaccggcaacaccgataagagagccttcgtcgagacctggcagtccttttaccggaagaagcttaaggaggtgtggaaacctgccgtgcggtctggcggatctggcggaggctcctttccagatgcccgtgaccttcgaggaggtggccgtgtacttcacccagggccagggcgccctgctggaccccgcccagagggccctgtacagggacgtgatgcaggagaactacgagatggtgaccagcctgggcttccccatccccaagcccgagctgatcgccaggctggagaggggcgaggagccctgggtgcccgacctgcaggcctgcaaggagaggaggctgcccaggtgcaccaggggatctggctccggcagcggccccaagaaaaagagaaaagtctaagctgccttctgcggggcttgccttctggccatgcccttcttctctcccttgcacctgtacctcttggtctttgaataaagcctgagtaggaaggctagcaaaaaaaaaaaaaaaaaaaaaaaaaaaaaaaaaaaaaaaaaaaaaaaaaaaaaaaaaaaaaaaaaaaaaaaaaaaaaaaa

SEQ ID NO: 15901 - RNA, 9485 nt, synthetic construct
  source 1..9485: mol_type = other RNA
aggaaataagagagaaaagaagagtaagaagaaatataagagccaccatggcccctaagaagaagcgtaaagtgagccggatggaacgcctcgtctacgaggtgcggcagaagtgcagaaacatcgaggacatctgcatctcctgcggatctctgaacgtgaccctggagcacccactgttcatcggcggcatgtgccagaactgtaaaaactgttttctggagtgtgcctatcaatacgacgatgacggctaccagagctactgcaccatctgttgcggcggaagagaggtgctgatgtgtggaaataacaactgctgccggtgcttctgcgtggaatgcgtggacctgctggtgggccccggcgccgcccaggccgctattaaggaagatccttggaactgctacatgtgcggccacaagggcacatacggcctgctgagacggagagaggactggcctagcagactgcagatgttcttcgccaataaccacgaccaggagttcgacccccctaaggtgtaccctcccgtccccgccgagaagagaaagcccatccgggtcctgagcctgttcgatggcatcgccaccggtctgctggtgctgaaggacctgggcatccaggtggataggtacattgcctccgaggtgtgcgaggactccatcaccgtgggaatggtgcgtcatcagggcaagatcatgtacgtgggcgacgtgcggagcgtgacacagaagcatatccaggagtggggccctttcgacctggtgatcggcggcagcccttgcaatgacctgagcatcgtgaacccagcccggaagggcctgtacgagggaaccggcagactgttcttcgagttttacagactgctgcacgacgcccggcctaaggaaggcgacgaccggcccttcttttggctgttcgagaatgtggtggccatgggagtcagcgacaagcgggatattagccggttcctggagagcaaccccgtgatgatcgatgccaaggaagtgagcgccgcccaccgggccagatacttctggggcaatctgcctggcatgaacagacccctggccagcaccgtgaacgacaagctggagctgcaggagtgcctggagcacggccggatcgccaagttcagcaaggtgagaaccatcaccacccgaagcaacagcatcaaacaaggcaaggaccagcactttcctgtgttcatgaacgagaaggaggacatcctgtggtgtaccgagatggagagagtgttcgggttcccagtccactacacagatgtcagcaacatgtctagactggccagacagagactgctgggaagaagctggtccgtccctgtgatcagacacctgttcgcccctctgaaggagtacttcgcctgcgtgagcagcggcaacagcaacgccaacagccggggccccagcttctctagcggcctggtgccactgtccctgagagggagccacatgggccccatggagatctacaaaaccgtgagcgcctggaagcggcagcctgtgcgcgtgctgagcctgtttcggaatatcgataaagtcctgaaaagcctgggattcctggagagcggctctggctccggcggtggcaccctgaagtacgtggaggatgtgacaaacgtggtcagacgggatgtggagaagtggggccccttcgatctggtgtacggcagcacccaacccctgggcagctcttgtgaccggtgccctggctggtacatgtttcagttccaccggatcctgcagtacgccctgccgagacaggagtcccagcggccattcttttggattttcatggacaacttgctgctgaccgaggatgaccaggaaactaccactcggttcctgcagaccgaagccgtgaccctgcaggacgtgagaggccgggactaccagaacgccatgcgggtgtggtccaacatccctggactgaaaagcaagcacgcacctctgacccctaaagaagaggagtacctgcaggcccaggtgcggagcagaagcaagctggacgcccctaaggtggatctgctggtgaagaattgcctcctgcccctgagagagtacttcaagtatttcagccagaatagtctgcccctgggaggcagcggcggcggcgccctggtgacatttgaggacgtcgccgtgcggttcacccaggaggaatgggctctgctggatccttctcagaaaatcctgtaccgggacgtgatgagagagacataccggaatctgacctccgtgggcatcaactgggaatgttgggaccttgaagcctgcttcagaagcctgggaagaaacctgagagtgcaggtggtgaagagaaagtgcgagctgaccaacagcggcccctgcgccgagggcggcccaagcagcggcgcccctcctcccagcggcggcagcccagccggctccccaacctctaccgaggagggcacctctgagtccgccacccccgagagcggccctggcacctccaccgagcccagcgagggcagcgcacccggcagccctgccggcagccccacctccacagaggagggaaccagcaccgagcccagcgaaggcagcgccccaggcaccagcaccgagcctagtgagcaggagattaaacggatcaacaagatcagaagaagacttgtgaaagacagcaacaccaagaaggccggcaagacaggccccatgaaaaccctgctggttagagtgatgacacccgatctgagagagcggctggaaaacctgagaaagaagcctgaaaatatcccccagcccatcagcaatacatctagagccaacctgaataagctgctgaccgattacaccgaaatgaagaaggcgatcctgcatgtgtactgggaagagttccagaaggaccctgtgggcctgatgagccgggtggcccagcctgccagcaagaagatcgatcagaacaagctgaaacctgagatggacgagaagggcaacctgaccaccgccggctttgcctgctctcagtgtggccagcccctgttcgtgtacaagctggagcaggtgtctgagaagggcaaggcttacaccaactacttcggacggtgcaatgtggccgagcacgaaaagctgatcctgctggcccagctgaagcccgagaaggatagcgacgaagccgtgacatatagcctgggaaagtttgggcagagggccctggatttctacagcattcatgtgaccaaggagtccacccaccccgtgaagcccctggcccagatcgccggaaacagatacgcctccggacctgtgggaaaggccctgagcgacgcatgtatgggcacaatcgcctccttcctgtctaagtaccaggacatcatcatcgaacaccagaaggtggtgaagggcaaccagaagagactggagagcctgcgggagctggccggcaaggaaaacctggaataccctagcgtgaccctgccacctcagcctcacaccaaggagggcgttgatgcctacaacgaagtgatcgcccgggtgcgaatgtgggtgaacctgaacctgtggcagaagctgaagctaagcagagatgatgccaagcctctgctgagactgaagggattcccttcctttcctctggtcgagagacaggccaacgaagtggactggtgggacatggtgtgtaacgtgaagaagctgatcaacgagaaaaaggaggatggcaaggtgttttggcagaatctggctggctacaagagacaggaagccctgagaccatacctgagcagcgaggaagatcggaagaagggaaagaaattcgctcggtaccagctgggcgacctgctgctgcacctggaaaagaagcacggcgaggactggggaaaggtgtacgacgaggcctgggagcggattgacaagaaagtggaaggcctgagcaagcacatcaagctggaagaggaacggagaagcgaggacgcccagagcaaggccgccctgaccgactggctgcgggctaaggccagcttcgtgatcgagggcctgaaggaggccgacaaggacgagttctgcagatgcgagctgaagctgcagaagtggtacggggacctgcggggaaagcccttcgccatcgaagccgagaacagcatcctggacatcagcggcttcagcaagcagtacaactgtgccttcatctggcagaaggacggcgtgaagaagctgaacctgtacctgatcatcaactacttcaagggcggcaagctgcggttcaagaagatcaaacctgaagccttcgaagccaacagattctacaccgtgatcaacaaaaagagcggcgagatcgtgcccatggaggtgaacttcaacttcgacgaccccaacctgatcatcctgcctctggcctttggcaagagacagggcagagaattcatctggaacgacctgctgtccctggaaaccggcagcctgaagctggccaacggaagagtgatcgagaagacactgtacaacagaagaacccggcaggatgagcctgccctgttcgtggccctgaccttcgagcggcgggaggtcctggactcctccaatatcaaaccaatgaacctgatcggcgtggcaagaggcgaaaacatccccgccgtgatcgccctgaccgaccccgagggctgcccactgagccggtttaaggatagcctgggaaacccaacccacatcctgagaatcggcgagagctataaggagaagcagcggaccatccaggccaagaaggaggtggagcagcggagagccggcggctacagccggaagtacgccagcaaagccaagaatctggcagacgatatggtgagaaacaccgctagagatctgctgtactacgccgtgacccaggatgccatgctgatcttcgccaacctgagccggggcttcggccggcagggcaagcggaccttcatggccgagagacagtacacacggatggaggactggctgaccgccaagctggcctacgagggcctgagcaagacctacctgtccaagacactggcccagtacacctccaagacatgcagcaactgtgggtttaccatcaccagcgccgactacgacagggtgctggagaagctgaagaagacagcaacaggctggatgaccacaattaacggcaaggagctgaaggtggagggccagattacctactacaacagatacaagagacagaacgtagtcaaggacctgtccgtcgagctggatagactgagcgaagaatctgtgaacaacgacatctcctcctggacaaagggcagaagcggagaagctctgagcctcctgaagaaaagattctcccatagacccgtgcaggagaagttcgtgtgcctgaactgcggcttcgagacacacgcagccgagcaagccgccctgaacatcgccagatcctggctgttcctgcggagccaggagtacaagaaataccagacaaacaagacaaccggcaacaccgataagagagccttcgtcgagacctggcagtccttttaccggaagaagcttaaggaggtgtggaaacctgccgtgcggtctggcggatctggcggaggctccttccaggagcccgtgaccttcgaggacgtggccgtgtacttcacccagaacgagtgggccagcctgcaccccatgcagagggccctgcacagggaggtgatgctggagaactacgccaacgtgaccagcctgagcgccttccccttccccaagcccgacctgatcttccagctggagcagggcgaggccgcctggggccccgacccctggaccctggccggcggcgagaccctgaggggcatgggcggcccaagcagcggcgcccctcctcccagcggcggcagcccagccggctccccaacctctaccgaggagggcacctctgagtccgccacccccgagagcggccctggcacctccaccgagcccagcgagggcagcgcacccggcagccctgccggcagccccacctccacagaggagggaaccagcaccgagcccagcgaaggcagcgccccaggcaccagcaccgagcctagtgagcaggagattaaacggatcaacaagatcagaagaagacttgtgaaagacagcaacaccaagaaggccggcaagacaggccccatgaaaaccctgctggttagagtgatgacacccgatctgagagagcggctggaaaacctgagaaagaagcctgaaaatatcccccagcccatcagcaatacatctagagccaacctgaataagctgctgaccgattacaccgaaatgaagaaggcgatcctgcatgtgtactgggaagagttccagaaggaccctgtgggcctgatgagccgggtggcccagcctgccagcaagaagatcgatcagaacaagctgaaacctgagatggacgagaagggcaacctgaccaccgccggctttgcctgctctcagtgtggccagcccctgttcgtgtacaagctggagcaggtgtctgagaagggcaaggcttacaccaactacttcggacggtgcaatgtggccgagcacgaaaagctgatcctgctggcccagctgaagcccgagaaggatagcgacgaagccgtgacatatagcctgggaaagtttgggcagagggccctggatttctacagcattcatgtgaccaaggagtccacccaccccgtgaagcccctggcccagatcgccggaaacagatacgcctccggacctgtgggaaaggccctgagcgacgcatgtatgggcacaatcgcctccttcctgtctaagtaccaggacatcatcatcgaacaccagaaggtggtgaagggcaaccagaagagactggagagcctgcgggagctggccggcaaggaaaacctggaataccctagcgtgaccctgccacctcagcctcacaccaaggagggcgttgatgcctacaacgaagtgatcgcccgggtgcgaatgtgggtgaacctgaacctgtggcagaagctgaagctaagcagagatgatgccaagcctctgctgagactgaagggattcccttcctttcctctggtcgagagacaggccaacgaagtggactggtgggacatggtgtgtaacgtgaagaagctgatcaacgagaaaaaggaggatggcaaggtgttttggcagaatctggctggctacaagagacaggaagccctgagaccatacctgagcagcgaggaagatcggaagaagggaaagaaattcgctcggtaccagctgggcgacctgctgctgcacctggaaaagaagcacggcgaggactggggaaaggtgtacgacgaggcctgggagcggattgacaagaaagtggaaggcctgagcaagcacatcaagctggaagaggaacggagaagcgaggacgcccagagcaaggccgccctgaccgactggctgcgggctaaggccagcttcgtgatcgagggcctgaaggaggccgacaaggacgagttctgcagatgcgagctgaagctgcagaagtggtacggggacctgcggggaaagcccttcgccatcgaagccgagaacagcatcctggacatcagcggcttcagcaagcagtacaactgtgccttcatctggcagaaggacggcgtgaagaagctgaacctgtacctgatcatcaactacttcaagggcggcaagctgcggttcaagaagatcaaacctgaagccttcgaagccaacagattctacaccgtgatcaacaaaaagagcggcgagatcgtgcccatggaggtgaacttcaacttcgacgaccccaacctgatcatcctgcctctggcctttggcaagagacagggcagagaattcatctggaacgacctgctgtccctggaaaccggcagcctgaagctggccaacggaagagtgatcgagaagacactgtacaacagaagaacccggcaggatgagcctgccctgttcgtggccctgaccttcgagcggcgggaggtcctggactcctccaatatcaaaccaatgaacctgatcggcgtggcaagaggcgaaaacatccccgccgtgatcgccctgaccgaccccgagggctgcccactgagccggtttaaggatagcctgggaaacccaacccacatcctgagaatcggcgagagctataaggagaagcagcggaccatccaggccaagaaggaggtggagcagcggagagccggcggctacagccggaagtacgccagcaaagccaagaatctggcagacgatatggtgagaaacaccgctagagatctgctgtactacgccgtgacccaggatgccatgctgatcttcgccaacctgagccggggcttcggccggcagggcaagcggaccttcatggccgagagacagtacacacggatggaggactggctgaccgccaagctggcctacgagggcctgagcaagacctacctgtccaagacactggcccagtacacctccaagacatgcagcaactgtgggtttaccatcaccagcgccgactacgacagggtgctggagaagctgaagaagacagcaacaggctggatgaccacaattaacggcaaggagctgaaggtggagggccagattacctactacaacagatacaagagacagaacgtagtcaaggacctgtccgtcgagctggatagactgagcgaagaatctgtgaacaacgacatctcctcctggacaaagggcagaagcggagaagctctgagcctcctgaagaaaagattctcccatagacccgtgcaggagaagttcgtgtgcctgaactgcggcttcgagacacacgcagccgagcaagccgccctgaacatcgccagatcctggctgttcctgcggagccaggagtacaagaaataccagacaaacaagacaaccggcaacaccgataagagagccttcgtcgagacctggcagtccttttaccggaagaagcttaaggaggtgtggaaacctgccgtgcggtctggcggatctggcggaggctcctttccaggagcccgtgaccttcgaggacgtggccgtgtacttcacccagaacgagtgggccagcctgcaccccatgcagagggccctgcacagggaggtgatgctggagaactacgccaacgtgaccagcctgagcgccttccccttccccaagcccgacctgatcttccagctggagcagggcgaggccgcctggggccccgacccctggaccctggccggcggcgagaccctgaggggcatgggatctggctccggcagcggccccaagaaaaagagaaaagtctaagctgccttctgcggggcttgccttctggccatgcccttcttctctcccttgcacctgtacctcttggtctttgaataaagcctgagtaggaaggctagcaaaaaaaaaaaaaaaaaaaaaaaaaaaaaaaaaaaaaaaaaaaaaaaaaaaaaaaaaaaaaaaaaaaaaaaaaaaaaaaa

SEQ ID NO: 15902 - RNA, 9485 nt, synthetic construct
  source 1..9485: mol_type = other RNA
aggaaataagagagaaaagaagagtaagaagaaatataagagccaccatggcccctaagaagaagcgtaaagtgagccggatggaacgcctcgtctacgaggtgcggcagaagtgcagaaacatcgaggacatctgcatctcctgcggatctctgaacgtgaccctggagcacccactgttcatcggcggcatgtgccagaactgtaaaaactgttttctggagtgtgcctatcaatacgacgatgacggctaccagagctactgcaccatctgttgcggcggaagagaggtgctgatgtgtggaaataacaactgctgccggtgcttctgcgtggaatgcgtggacctgctggtgggccccggcgccgcccaggccgctattaaggaagatccttggaactgctacatgtgcggccacaagggcacatacggcctgctgagacggagagaggactggcctagcagactgcagatgttcttcgccaataaccacgaccaggagttcgacccccctaaggtgtaccctcccgtccccgccgagaagagaaagcccatccgggtcctgagcctgttcgatggcatcgccaccggtctgctggtgctgaaggacctgggcatccaggtggataggtacattgcctccgaggtgtgcgaggactccatcaccgtgggaatggtgcgtcatcagggcaagatcatgtacgtgggcgacgtgcggagcgtgacacagaagcatatccaggagtggggccctttcgacctggtgatcggcggcagcccttgcaatgacctgagcatcgtgaacccagcccggaagggcctgtacgagggaaccggcagactgttcttcgagttttacagactgctgcacgacgcccggcctaaggaaggcgacgaccggcccttcttttggctgttcgagaatgtggtggccatgggagtcagcgacaagcgggatattagccggttcctggagagcaaccccgtgatgatcgatgccaaggaagtgagcgccgcccaccgggccagatacttctggggcaatctgcctggcatgaacagacccctggccagcaccgtgaacgacaagctggagctgcaggagtgcctggagcacggccggatcgccaagttcagcaaggtgagaaccatcaccacccgaagcaacagcatcaaacaaggcaaggaccagcactttcctgtgttcatgaacgagaaggaggacatcctgtggtgtaccgagatggagagagtgttcgggttcccagtccactacacagatgtcagcaacatgtctagactggccagacagagactgctgggaagaagctggtccgtccctgtgatcagacacctgttcgcccctctgaaggagtacttcgcctgcgtgagcagcggcaacagcaacgccaacagccggggccccagcttctctagcggcctggtgccactgtccctgagagggagccacatgggccccatggagatctacaaaaccgtgagcgcctggaagcggcagcctgtgcgcgtgctgagcctgtttcggaatatcgataaagtcctgaaaagcctgggattcctggagagcggctctggctccggcggtggcaccctgaagtacgtggaggatgtgacaaacgtggtcagacgggatgtggagaagtggggccccttcgatctggtgtacggcagcacccaacccctgggcagctcttgtgaccggtgccctggctggtacatgtttcagttccaccggatcctgcagtacgccctgccgagacaggagtcccagcggccattcttttggattttcatggacaacttgctgctgaccgaggatgaccaggaaactaccactcggttcctgcagaccgaagccgtgaccctgcaggacgtgagaggccgggactaccagaacgccatgcgggtgtggtccaacatccctggactgaaaagcaagcacgcacctctgacccctaaagaagaggagtacctgcaggcccaggtgcggagcagaagcaagctggacgcccctaaggtggatctgctggtgaagaattgcctcctgcccctgagagagtacttcaagtatttcagccagaatagtctgcccctgggaggcagcggcggcggcgccctggtgacatttgaggacgtcgccgtgcggttcacccaggaggaatgggctctgctggatccttctcagaaaatcctgtaccgggacgtgatgagagagacataccggaatctgacctccgtgggcatcaactgggaatgttgggaccttgaagcctgcttcagaagcctgggaagaaacctgagagtgcaggtggtgaagagaaagtgcgagctgaccaacagcggcccctgcgccgagggcggcccaagcagcggcgcccctcctcccagcggcggcagcccagccggctccccaacctctaccgaggagggcacctctgagtccgccacccccgagagcggccctggcacctccaccgagcccagcgagggcagcgcacccggcagccctgccggcagccccacctccacagaggagggaaccagcaccgagcccagcgaaggcagcgccccaggcaccagcaccgagcctagtgagcaggagattaaacggatcaacaagatcagaagaagacttgtgaaagacagcaacaccaagaaggccggcaagacaggccccatgaaaaccctgctggttagagtgatgacacccgatctgagagagcggctggaaaacctgagaaagaagcctgaaaatatcccccagcccatcagcaatacatctagagccaacctgaataagctgctgaccgattacaccgaaatgaagaaggcgatcctgcatgtgtactgggaagagttccagaaggaccctgtgggcctgatgagccgggtggcccagcctgccagcaagaagatcgatcagaacaagctgaaacctgagatggacgagaagggcaacctgaccaccgccggctttgcctgctctcagtgtggccagcccctgttcgtgtacaagctggagcaggtgtctgagaagggcaaggcttacaccaactacttcggacggtgcaatgtggccgagcacgaaaagctgatcctgctggcccagctgaagcccgagaaggatagcgacgaagccgtgacatatagcctgggaaagtttgggcagagggccctggatttctacagcattcatgtgaccaaggagtccacccaccccgtgaagcccctggcccagatcgccggaaacagatacgcctccggacctgtgggaaaggccctgagcgacgcatgtatgggcacaatcgcctccttcctgtctaagtaccaggacatcatcatcgaacaccagaaggtggtgaagggcaaccagaagagactggagagcctgcgggagctggccggcaaggaaaacctggaataccctagcgtgaccctgccacctcagcctcacaccaaggagggcgttgatgcctacaacgaagtgatcgcccgggtgcgaatgtgggtgaacctgaacctgtggcagaagctgaagctaagcagagatgatgccaagcctctgctgagactgaagggattcccttcctttcctctggtcgagagacaggccaacgaagtggactggtgggacatggtgtgtaacgtgaagaagctgatcaacgagaaaaaggaggatggcaaggtgttttggcagaatctggctggctacaagagacaggaagccctgagaccatacctgagcagcgaggaagatcggaagaagggaaagaaattcgctcggtaccagctgggcgacctgctgctgcacctggaaaagaagcacggcgaggactggggaaaggtgtacgacgaggcctgggagcggattgacaagaaagtggaaggcctgagcaagcacatcaagctggaagaggaacggagaagcgaggacgcccagagcaaggccgccctgaccgactggctgcgggctaaggccagcttcgtgatcgagggcctgaaggaggccgacaaggacgagttctgcagatgcgagctgaagctgcagaagtggtacggggacctgcggggaaagcccttcgccatcgaagccgagaacagcatcctggacatcagcggcttcagcaagcagtacaactgtgccttcatctggcagaaggacggcgtgaagaagctgaacctgtacctgatcatcaactacttcaagggcggcaagctgcggttcaagaagatcaaacctgaagccttcgaagccaacagattctacaccgtgatcaacaaaaagagcggcgagatcgtgcccatggaggtgaacttcaacttcgacgaccccaacctgatcatcctgcctctggcctttggcaagagacagggcagagaattcatctggaacgacctgctgtccctggaaaccggcagcctgaagctggccaacggaagagtgatcgagaagacactgtacaacagaagaacccggcaggatgagcctgccctgttcgtggccctgaccttcgagcggcgggaggtcctggactcctccaatatcaaaccaatgaacctgatcggcgtggcaagaggcgaaaacatccccgccgtgatcgccctgaccgaccccgagggctgcccactgagccggtttaaggatagcctgggaaacccaacccacatcctgagaatcggcgagagctataaggagaagcagcggaccatccaggccaagaaggaggtggagcagcggagagccggcggctacagccggaagtacgccagcaaagccaagaatctggcagacgatatggtgagaaacaccgctagagatctgctgtactacgccgtgacccaggatgccatgctgatcttcgccaacctgagccggggcttcggccggcagggcaagcggaccttcatggccgagagacagtacacacggatggaggactggctgaccgccaagctggcctacgagggcctgagcaagacctacctgtccaagacactggcccagtacacctccaagacatgcagcaactgtgggtttaccatcaccagcgccgactacgacagggtgctggagaagctgaagaagacagcaacaggctggatgaccacaattaacggcaaggagctgaaggtggagggccagattacctactacaacagatacaagagacagaacgtagtcaaggacctgtccgtcgagctggatagactgagcgaagaatctgtgaacaacgacatctcctcctggacaaagggcagaagcggagaagctctgagcctcctgaagaaaagattctcccatagacccgtgcaggagaagttcgtgtgcctgaactgcggcttcgagacacacgcagccgagcaagccgccctgaacatcgccagatcctggctgttcctgcggagccaggagtacaagaaataccagacaaacaagacaaccggcaacaccgataagagagccttcgtcgagacctggcagtccttttaccggaagaagcttaaggaggtgtggaaacctgccgtgcggtctggcggatctggcggaggctccatggccctgacccagggccagctgagcttcagcgacgtggccatcgagttcagccaggaggagtggaagtgcctggaccccggccagaaggccctgtacagggacgtgatgctggagaactacaggaacctgatcagcctgggcatctgcctgcccgacctgagcgtgaccagcatcttcttcaccagcggcctgggcagggccaggctgcagggcggcagcctggccagggtgagcagggtgggcggcccaagcagcggcgcccctcctcccagcggcggcagcccagccggctccccaacctctaccgaggagggcacctctgagtccgccacccccgagagcggccctggcacctccaccgagcccagcgagggcagcgcacccggcagccctgccggcagccccacctccacagaggagggaaccagcaccgagcccagcgaaggcagcgccccaggcaccagcaccgagcctagtgagcaggagattaaacggatcaacaagatcagaagaagacttgtgaaagacagcaacaccaagaaggccggcaagacaggccccatgaaaaccctgctggttagagtgatgacacccgatctgagagagcggctggaaaacctgagaaagaagcctgaaaatatcccccagcccatcagcaatacatctagagccaacctgaataagctgctgaccgattacaccgaaatgaagaaggcgatcctgcatgtgtactgggaagagttccagaaggaccctgtgggcctgatgagccgggtggcccagcctgccagcaagaagatcgatcagaacaagctgaaacctgagatggacgagaagggcaacctgaccaccgccggctttgcctgctctcagtgtggccagcccctgttcgtgtacaagctggagcaggtgtctgagaagggcaaggcttacaccaactacttcggacggtgcaatgtggccgagcacgaaaagctgatcctgctggcccagctgaagcccgagaaggatagcgacgaagccgtgacatatagcctgggaaagtttgggcagagggccctggatttctacagcattcatgtgaccaaggagtccacccaccccgtgaagcccctggcccagatcgccggaaacagatacgcctccggacctgtgggaaaggccctgagcgacgcatgtatgggcacaatcgcctccttcctgtctaagtaccaggacatcatcatcgaacaccagaaggtggtgaagggcaaccagaagagactggagagcctgcgggagctggccggcaaggaaaacctggaataccctagcgtgaccctgccacctcagcctcacaccaaggagggcgttgatgcctacaacgaagtgatcgcccgggtgcgaatgtgggtgaacctgaacctgtggcagaagctgaagctaagcagagatgatgccaagcctctgctgagactgaagggattcccttcctttcctctggtcgagagacaggccaacgaagtggactggtgggacatggtgtgtaacgtgaagaagctgatcaacgagaaaaaggaggatggcaaggtgttttggcagaatctggctggctacaagagacaggaagccctgagaccatacctgagcagcgaggaagatcggaagaagggaaagaaattcgctcggtaccagctgggcgacctgctgctgcacctggaaaagaagcacggcgaggactggggaaaggtgtacgacgaggcctgggagcggattgacaagaaagtggaaggcctgagcaagcacatcaagctggaagaggaacggagaagcgaggacgcccagagcaaggccgccctgaccgactggctgcgggctaaggccagcttcgtgatcgagggcctgaaggaggccgacaaggacgagttctgcagatgcgagctgaagctgcagaagtggtacggggacctgcggggaaagcccttcgccatcgaagccgagaacagcatcctggacatcagcggcttcagcaagcagtacaactgtgccttcatctggcagaaggacggcgtgaagaagctgaacctgtacctgatcatcaactacttcaagggcggcaagctgcggttcaagaagatcaaacctgaagccttcgaagccaacagattctacaccgtgatcaacaaaaagagcggcgagatcgtgcccatggaggtgaacttcaacttcgacgaccccaacctgatcatcctgcctctggcctttggcaagagacagggcagagaattcatctggaacgacctgctgtccctggaaaccggcagcctgaagctggccaacggaagagtgatcgagaagacactgtacaacagaagaacccggcaggatgagcctgccctgttcgtggccctgaccttcgagcggcgggaggtcctggactcctccaatatcaaaccaatgaacctgatcggcgtggcaagaggcgaaaacatccccgccgtgatcgccctgaccgaccccgagggctgcccactgagccggtttaaggatagcctgggaaacccaacccacatcctgagaatcggcgagagctataaggagaagcagcggaccatccaggccaagaaggaggtggagcagcggagagccggcggctacagccggaagtacgccagcaaagccaagaatctggcagacgatatggtgagaaacaccgctagagatctgctgtactacgccgtgacccaggatgccatgctgatcttcgccaacctgagccggggcttcggccggcagggcaagcggaccttcatggccgagagacagtacacacggatggaggactggctgaccgccaagctggcctacgagggcctgagcaagacctacctgtccaagacactggcccagtacacctccaagacatgcagcaactgtgggtttaccatcaccagcgccgactacgacagggtgctggagaagctgaagaagacagcaacaggctggatgaccacaattaacggcaaggagctgaaggtggagggccagattacctactacaacagatacaagagacagaacgtagtcaaggacctgtccgtcgagctggatagactgagcgaagaatctgtgaacaacgacatctcctcctggacaaagggcagaagcggagaagctctgagcctcctgaagaaaagattctcccatagacccgtgcaggagaagttcgtgtgcctgaactgcggcttcgagacacacgcagccgagcaagccgccctgaacatcgccagatcctggctgttcctgcggagccaggagtacaagaaataccagacaaacaagacaaccggcaacaccgataagagagccttcgtcgagacctggcagtccttttaccggaagaagcttaaggaggtgtggaaacctgccgtgcggtctggcggatctggcggaggctcctatggccctgacccagggccagctgagcttcagcgacgtggccatcgagttcagccaggaggagtggaagtgcctggaccccggccagaaggccctgtacagggacgtgatgctggagaactacaggaacctgatcagcctgggcatctgcctgcccgacctgagcgtgaccagcatcttcttcaccagcggcctgggcagggccaggctgcagggcggcagcctggccagggtgagcagggtgggatctggctccggcagcggccccaagaaaaagagaaaagtctaagctgccttctgcggggcttgccttctggccatgcccttcttctctcccttgcacctgtacctcttggtctttgaataaagcctgagtaggaaggctagcaaaaaaaaaaaaaaaaaaaaaaaaaaaaaaaaaaaaaaaaaaaaaaaaaaaaaaaaaaaaaaaaaaaaaaaaaaaaaaaa

SEQ ID NO: 15903 - RNA, 9485 nt, synthetic construct
  source 1..9485: mol_type = other RNA
aggaaataagagagaaaagaagagtaagaagaaatataagagccaccatggcccctaagaagaagcgtaaagtgagccggatggaacgcctcgtctacgaggtgcggcagaagtgcagaaacatcgaggacatctgcatctcctgcggatctctgaacgtgaccctggagcacccactgttcatcggcggcatgtgccagaactgtaaaaactgttttctggagtgtgcctatcaatacgacgatgacggctaccagagctactgcaccatctgttgcggcggaagagaggtgctgatgtgtggaaataacaactgctgccggtgcttctgcgtggaatgcgtggacctgctggtgggccccggcgccgcccaggccgctattaaggaagatccttggaactgctacatgtgcggccacaagggcacatacggcctgctgagacggagagaggactggcctagcagactgcagatgttcttcgccaataaccacgaccaggagttcgacccccctaaggtgtaccctcccgtccccgccgagaagagaaagcccatccgggtcctgagcctgttcgatggcatcgccaccggtctgctggtgctgaaggacctgggcatccaggtggataggtacattgcctccgaggtgtgcgaggactccatcaccgtgggaatggtgcgtcatcagggcaagatcatgtacgtgggcgacgtgcggagcgtgacacagaagcatatccaggagtggggccctttcgacctggtgatcggcggcagcccttgcaatgacctgagcatcgtgaacccagcccggaagggcctgtacgagggaaccggcagactgttcttcgagttttacagactgctgcacgacgcccggcctaaggaaggcgacgaccggcccttcttttggctgttcgagaatgtggtggccatgggagtcagcgacaagcgggatattagccggttcctggagagcaaccccgtgatgatcgatgccaaggaagtgagcgccgcccaccgggccagatacttctggggcaatctgcctggcatgaacagacccctggccagcaccgtgaacgacaagctggagctgcaggagtgcctggagcacggccggatcgccaagttcagcaaggtgagaaccatcaccacccgaagcaacagcatcaaacaaggcaaggaccagcactttcctgtgttcatgaacgagaaggaggacatcctgtggtgtaccgagatggagagagtgttcgggttcccagtccactacacagatgtcagcaacatgtctagactggccagacagagactgctgggaagaagctggtccgtccctgtgatcagacacctgttcgcccctctgaaggagtacttcgcctgcgtgagcagcggcaacagcaacgccaacagccggggccccagcttctctagcggcctggtgccactgtccctgagagggagccacatgggccccatggagatctacaaaaccgtgagcgcctggaagcggcagcctgtgcgcgtgctgagcctgtttcggaatatcgataaagtcctgaaaagcctgggattcctggagagcggctctggctccggcggtggcaccctgaagtacgtggaggatgtgacaaacgtggtcagacgggatgtggagaagtggggccccttcgatctggtgtacggcagcacccaacccctgggcagctcttgtgaccggtgccctggctggtacatgtttcagttccaccggatcctgcagtacgccctgccgagacaggagtcccagcggccattcttttggattttcatggacaacttgctgctgaccgaggatgaccaggaaactaccactcggttcctgcagaccgaagccgtgaccctgcaggacgtgagaggccgggactaccagaacgccatgcgggtgtggtccaacatccctggactgaaaagcaagcacgcacctctgacccctaaagaagaggagtacctgcaggcccaggtgcggagcagaagcaagctggacgcccctaaggtggatctgctggtgaagaattgcctcctgcccctgagagagtacttcaagtatttcagccagaatagtctgcccctgggaggcagcggcggcggcgccctggtgacatttgaggacgtcgccgtgcggttcacccaggaggaatgggctctgctggatccttctcagaaaatcctgtaccgggacgtgatgagagagacataccggaatctgacctccgtgggcatcaactgggaatgttgggaccttgaagcctgcttcagaagcctgggaagaaacctgagagtgcaggtggtgaagagaaagtgcgagctgaccaacagcggcccctgcgccgagggcggcccaagcagcggcgcccctcctcccagcggcggcagcccagccggctccccaacctctaccgaggagggcacctctgagtccgccacccccgagagcggccctggcacctccaccgagcccagcgagggcagcgcacccggcagccctgccggcagccccacctccacagaggagggaaccagcaccgagcccagcgaaggcagcgccccaggcaccagcaccgagcctagtgagcaggagattaaacggatcaacaagatcagaagaagacttgtgaaagacagcaacaccaagaaggccggcaagacaggccccatgaaaaccctgctggttagagtgatgacacccgatctgagagagcggctggaaaacctgagaaagaagcctgaaaatatcccccagcccatcagcaatacatctagagccaacctgaataagctgctgaccgattacaccgaaatgaagaaggcgatcctgcatgtgtactgggaagagttccagaaggaccctgtgggcctgatgagccgggtggcccagcctgccagcaagaagatcgatcagaacaagctgaaacctgagatggacgagaagggcaacctgaccaccgccggctttgcctgctctcagtgtggccagcccctgttcgtgtacaagctggagcaggtgtctgagaagggcaaggcttacaccaactacttcggacggtgcaatgtggccgagcacgaaaagctgatcctgctggcccagctgaagcccgagaaggatagcgacgaagccgtgacatatagcctgggaaagtttgggcagagggccctggatttctacagcattcatgtgaccaaggagtccacccaccccgtgaagcccctggcccagatcgccggaaacagatacgcctccggacctgtgggaaaggccctgagcgacgcatgtatgggcacaatcgcctccttcctgtctaagtaccaggacatcatcatcgaacaccagaaggtggtgaagggcaaccagaagagactggagagcctgcgggagctggccggcaaggaaaacctggaataccctagcgtgaccctgccacctcagcctcacaccaaggagggcgttgatgcctacaacgaagtgatcgcccgggtgcgaatgtgggtgaacctgaacctgtggcagaagctgaagctaagcagagatgatgccaagcctctgctgagactgaagggattcccttcctttcctctggtcgagagacaggccaacgaagtggactggtgggacatggtgtgtaacgtgaagaagctgatcaacgagaaaaaggaggatggcaaggtgttttggcagaatctggctggctacaagagacaggaagccctgagaccatacctgagcagcgaggaagatcggaagaagggaaagaaattcgctcggtaccagctgggcgacctgctgctgcacctggaaaagaagcacggcgaggactggggaaaggtgtacgacgaggcctgggagcggattgacaagaaagtggaaggcctgagcaagcacatcaagctggaagaggaacggagaagcgaggacgcccagagcaaggccgccctgaccgactggctgcgggctaaggccagcttcgtgatcgagggcctgaaggaggccgacaaggacgagttctgcagatgcgagctgaagctgcagaagtggtacggggacctgcggggaaagcccttcgccatcgaagccgagaacagcatcctggacatcagcggcttcagcaagcagtacaactgtgccttcatctggcagaaggacggcgtgaagaagctgaacctgtacctgatcatcaactacttcaagggcggcaagctgcggttcaagaagatcaaacctgaagccttcgaagccaacagattctacaccgtgatcaacaaaaagagcggcgagatcgtgcccatggaggtgaacttcaacttcgacgaccccaacctgatcatcctgcctctggcctttggcaagagacagggcagagaattcatctggaacgacctgctgtccctggaaaccggcagcctgaagctggccaacggaagagtgatcgagaagacactgtacaacagaagaacccggcaggatgagcctgccctgttcgtggccctgaccttcgagcggcgggaggtcctggactcctccaatatcaaaccaatgaacctgatcggcgtggcaagaggcgaaaacatccccgccgtgatcgccctgaccgaccccgagggctgcccactgagccggtttaaggatagcctgggaaacccaacccacatcctgagaatcggcgagagctataaggagaagcagcggaccatccaggccaagaaggaggtggagcagcggagagccggcggctacagccggaagtacgccagcaaagccaagaatctggcagacgatatggtgagaaacaccgctagagatctgctgtactacgccgtgacccaggatgccatgctgatcttcgccaacctgagccggggcttcggccggcagggcaagcggaccttcatggccgagagacagtacacacggatggaggactggctgaccgccaagctggcctacgagggcctgagcaagacctacctgtccaagacactggcccagtacacctccaagacatgcagcaactgtgggtttaccatcaccagcgccgactacgacagggtgctggagaagctgaagaagacagcaacaggctggatgaccacaattaacggcaaggagctgaaggtggagggccagattacctactacaacagatacaagagacagaacgtagtcaaggacctgtccgtcgagctggatagactgagcgaagaatctgtgaacaacgacatctcctcctggacaaagggcagaagcggagaagctctgagcctcctgaagaaaagattctcccatagacccgtgcaggagaagttcgtgtgcctgaactgcggcttcgagacacacgcagccgagcaagccgccctgaacatcgccagatcctggctgttcctgcggagccaggagtacaagaaataccagacaaacaagacaaccggcaacaccgataagagagccttcgtcgagacctggcagtccttttaccggaagaagcttaaggaggtgtggaaacctgccgtgcggtctggcggatctggcggaggctcctaccaggaggccctgaccttccaggacgtgaaggtgaccttcagccaggaggagtggggctgcctggacagcgcccagaggaacctgtacagggacgtgatgctggagaactacggcaacgtggtgagcgtggtgggcagcagccccaagcccgccctgatcagctggctggaggccaggaagcccagcaccgtgaacatctgcaaggtgcagcccaagagggacagcggcaccgcccccgagggcggcccaagcagcggcgcccctcctcccagcggcggcagcccagccggctccccaacctctaccgaggagggcacctctgagtccgccacccccgagagcggccctggcacctccaccgagcccagcgagggcagcgcacccggcagccctgccggcagccccacctccacagaggagggaaccagcaccgagcccagcgaaggcagcgccccaggcaccagcaccgagcctagtgagcaggagattaaacggatcaacaagatcagaagaagacttgtgaaagacagcaacaccaagaaggccggcaagacaggccccatgaaaaccctgctggttagagtgatgacacccgatctgagagagcggctggaaaacctgagaaagaagcctgaaaatatcccccagcccatcagcaatacatctagagccaacctgaataagctgctgaccgattacaccgaaatgaagaaggcgatcctgcatgtgtactgggaagagttccagaaggaccctgtgggcctgatgagccgggtggcccagcctgccagcaagaagatcgatcagaacaagctgaaacctgagatggacgagaagggcaacctgaccaccgccggctttgcctgctctcagtgtggccagcccctgttcgtgtacaagctggagcaggtgtctgagaagggcaaggcttacaccaactacttcggacggtgcaatgtggccgagcacgaaaagctgatcctgctggcccagctgaagcccgagaaggatagcgacgaagccgtgacatatagcctgggaaagtttgggcagagggccctggatttctacagcattcatgtgaccaaggagtccacccaccccgtgaagcccctggcccagatcgccggaaacagatacgcctccggacctgtgggaaaggccctgagcgacgcatgtatgggcacaatcgcctccttcctgtctaagtaccaggacatcatcatcgaacaccagaaggtggtgaagggcaaccagaagagactggagagcctgcgggagctggccggcaaggaaaacctggaataccctagcgtgaccctgccacctcagcctcacaccaaggagggcgttgatgcctacaacgaagtgatcgcccgggtgcgaatgtgggtgaacctgaacctgtggcagaagctgaagctaagcagagatgatgccaagcctctgctgagactgaagggattcccttcctttcctctggtcgagagacaggccaacgaagtggactggtgggacatggtgtgtaacgtgaagaagctgatcaacgagaaaaaggaggatggcaaggtgttttggcagaatctggctggctacaagagacaggaagccctgagaccatacctgagcagcgaggaagatcggaagaagggaaagaaattcgctcggtaccagctgggcgacctgctgctgcacctggaaaagaagcacggcgaggactggggaaaggtgtacgacgaggcctgggagcggattgacaagaaagtggaaggcctgagcaagcacatcaagctggaagaggaacggagaagcgaggacgcccagagcaaggccgccctgaccgactggctgcgggctaaggccagcttcgtgatcgagggcctgaaggaggccgacaaggacgagttctgcagatgcgagctgaagctgcagaagtggtacggggacctgcggggaaagcccttcgccatcgaagccgagaacagcatcctggacatcagcggcttcagcaagcagtacaactgtgccttcatctggcagaaggacggcgtgaagaagctgaacctgtacctgatcatcaactacttcaagggcggcaagctgcggttcaagaagatcaaacctgaagccttcgaagccaacagattctacaccgtgatcaacaaaaagagcggcgagatcgtgcccatggaggtgaacttcaacttcgacgaccccaacctgatcatcctgcctctggcctttggcaagagacagggcagagaattcatctggaacgacctgctgtccctggaaaccggcagcctgaagctggccaacggaagagtgatcgagaagacactgtacaacagaagaacccggcaggatgagcctgccctgttcgtggccctgaccttcgagcggcgggaggtcctggactcctccaatatcaaaccaatgaacctgatcggcgtggcaagaggcgaaaacatccccgccgtgatcgccctgaccgaccccgagggctgcccactgagccggtttaaggatagcctgggaaacccaacccacatcctgagaatcggcgagagctataaggagaagcagcggaccatccaggccaagaaggaggtggagcagcggagagccggcggctacagccggaagtacgccagcaaagccaagaatctggcagacgatatggtgagaaacaccgctagagatctgctgtactacgccgtgacccaggatgccatgctgatcttcgccaacctgagccggggcttcggccggcagggcaagcggaccttcatggccgagagacagtacacacggatggaggactggctgaccgccaagctggcctacgagggcctgagcaagacctacctgtccaagacactggcccagtacacctccaagacatgcagcaactgtgggtttaccatcaccagcgccgactacgacagggtgctggagaagctgaagaagacagcaacaggctggatgaccacaattaacggcaaggagctgaaggtggagggccagattacctactacaacagatacaagagacagaacgtagtcaaggacctgtccgtcgagctggatagactgagcgaagaatctgtgaacaacgacatctcctcctggacaaagggcagaagcggagaagctctgagcctcctgaagaaaagattctcccatagacccgtgcaggagaagttcgtgtgcctgaactgcggcttcgagacacacgcagccgagcaagccgccctgaacatcgccagatcctggctgttcctgcggagccaggagtacaagaaataccagacaaacaagacaaccggcaacaccgataagagagccttcgtcgagacctggcagtccttttaccggaagaagcttaaggaggtgtggaaacctgccgtgcggtctggcggatctggcggaggctccttaccaggaggccctgaccttccaggacgtgaaggtgaccttcagccaggaggagtggggctgcctggacagcgcccagaggaacctgtacagggacgtgatgctggagaactacggcaacgtggtgagcgtggtgggcagcagccccaagcccgccctgatcagctggctggaggccaggaagcccagcaccgtgaacatctgcaaggtgcagcccaagagggacagcggcaccgcccccgagggatctggctccggcagcggccccaagaaaaagagaaaagtctaagctgccttctgcggggcttgccttctggccatgcccttcttctctcccttgcacctgtacctcttggtctttgaataaagcctgagtaggaaggctagcaaaaaaaaaaaaaaaaaaaaaaaaaaaaaaaaaaaaaaaaaaaaaaaaaaaaaaaaaaaaaaaaaaaaaaaaaaaaaaaa

SEQ ID NO: 15904 - RNA, 9485 nt, synthetic construct
  source 1..9485: mol_type = other RNA
aggaaataagagagaaaagaagagtaagaagaaatataagagccaccatggcccctaagaagaagcgtaaagtgagccggatggaacgcctcgtctacgaggtgcggcagaagtgcagaaacatcgaggacatctgcatctcctgcggatctctgaacgtgaccctggagcacccactgttcatcggcggcatgtgccagaactgtaaaaactgttttctggagtgtgcctatcaatacgacgatgacggctaccagagctactgcaccatctgttgcggcggaagagaggtgctgatgtgtggaaataacaactgctgccggtgcttctgcgtggaatgcgtggacctgctggtgggccccggcgccgcccaggccgctattaaggaagatccttggaactgctacatgtgcggccacaagggcacatacggcctgctgagacggagagaggactggcctagcagactgcagatgttcttcgccaataaccacgaccaggagttcgacccccctaaggtgtaccctcccgtccccgccgagaagagaaagcccatccgggtcctgagcctgttcgatggcatcgccaccggtctgctggtgctgaaggacctgggcatccaggtggataggtacattgcctccgaggtgtgcgaggactccatcaccgtgggaatggtgcgtcatcagggcaagatcatgtacgtgggcgacgtgcggagcgtgacacagaagcatatccaggagtggggccctttcgacctggtgatcggcggcagcccttgcaatgacctgagcatcgtgaacccagcccggaagggcctgtacgagggaaccggcagactgttcttcgagttttacagactgctgcacgacgcccggcctaaggaaggcgacgaccggcccttcttttggctgttcgagaatgtggtggccatgggagtcagcgacaagcgggatattagccggttcctggagagcaaccccgtgatgatcgatgccaaggaagtgagcgccgcccaccgggccagatacttctggggcaatctgcctggcatgaacagacccctggccagcaccgtgaacgacaagctggagctgcaggagtgcctggagcacggccggatcgccaagttcagcaaggtgagaaccatcaccacccgaagcaacagcatcaaacaaggcaaggaccagcactttcctgtgttcatgaacgagaaggaggacatcctgtggtgtaccgagatggagagagtgttcgggttcccagtccactacacagatgtcagcaacatgtctagactggccagacagagactgctgggaagaagctggtccgtccctgtgatcagacacctgttcgcccctctgaaggagtacttcgcctgcgtgagcagcggcaacagcaacgccaacagccggggccccagcttctctagcggcctggtgccactgtccctgagagggagccacatgggccccatggagatctacaaaaccgtgagcgcctggaagcggcagcctgtgcgcgtgctgagcctgtttcggaatatcgataaagtcctgaaaagcctgggattcctggagagcggctctggctccggcggtggcaccctgaagtacgtggaggatgtgacaaacgtggtcagacgggatgtggagaagtggggccccttcgatctggtgtacggcagcacccaacccctgggcagctcttgtgaccggtgccctggctggtacatgtttcagttccaccggatcctgcagtacgccctgccgagacaggagtcccagcggccattcttttggattttcatggacaacttgctgctgaccgaggatgaccaggaaactaccactcggttcctgcagaccgaagccgtgaccctgcaggacgtgagaggccgggactaccagaacgccatgcgggtgtggtccaacatccctggactgaaaagcaagcacgcacctctgacccctaaagaagaggagtacctgcaggcccaggtgcggagcagaagcaagctggacgcccctaaggtggatctgctggtgaagaattgcctcctgcccctgagagagtacttcaagtatttcagccagaatagtctgcccctgggaggcagcggcggcggcgccctggtgacatttgaggacgtcgccgtgcggttcacccaggaggaatgggctctgctggatccttctcagaaaatcctgtaccgggacgtgatgagagagacataccggaatctgacctccgtgggcatcaactgggaatgttgggaccttgaagcctgcttcagaagcctgggaagaaacctgagagtgcaggtggtgaagagaaagtgcgagctgaccaacagcggcccctgcgccgagggcggcccaagcagcggcgcccctcctcccagcggcggcagcccagccggctccccaacctctaccgaggagggcacctctgagtccgccacccccgagagcggccctggcacctccaccgagcccagcgagggcagcgcacccggcagccctgccggcagccccacctccacagaggagggaaccagcaccgagcccagcgaaggcagcgccccaggcaccagcaccgagcctagtgagcaggagattaaacggatcaacaagatcagaagaagacttgtgaaagacagcaacaccaagaaggccggcaagacaggccccatgaaaaccctgctggttagagtgatgacacccgatctgagagagcggctggaaaacctgagaaagaagcctgaaaatatcccccagcccatcagcaatacatctagagccaacctgaataagctgctgaccgattacaccgaaatgaagaaggcgatcctgcatgtgtactgggaagagttccagaaggaccctgtgggcctgatgagccgggtggcccagcctgccagcaagaagatcgatcagaacaagctgaaacctgagatggacgagaagggcaacctgaccaccgccggctttgcctgctctcagtgtggccagcccctgttcgtgtacaagctggagcaggtgtctgagaagggcaaggcttacaccaactacttcggacggtgcaatgtggccgagcacgaaaagctgatcctgctggcccagctgaagcccgagaaggatagcgacgaagccgtgacatatagcctgggaaagtttgggcagagggccctggatttctacagcattcatgtgaccaaggagtccacccaccccgtgaagcccctggcccagatcgccggaaacagatacgcctccggacctgtgggaaaggccctgagcgacgcatgtatgggcacaatcgcctccttcctgtctaagtaccaggacatcatcatcgaacaccagaaggtggtgaagggcaaccagaagagactggagagcctgcgggagctggccggcaaggaaaacctggaataccctagcgtgaccctgccacctcagcctcacaccaaggagggcgttgatgcctacaacgaagtgatcgcccgggtgcgaatgtgggtgaacctgaacctgtggcagaagctgaagctaagcagagatgatgccaagcctctgctgagactgaagggattcccttcctttcctctggtcgagagacaggccaacgaagtggactggtgggacatggtgtgtaacgtgaagaagctgatcaacgagaaaaaggaggatggcaaggtgttttggcagaatctggctggctacaagagacaggaagccctgagaccatacctgagcagcgaggaagatcggaagaagggaaagaaattcgctcggtaccagctgggcgacctgctgctgcacctggaaaagaagcacggcgaggactggggaaaggtgtacgacgaggcctgggagcggattgacaagaaagtggaaggcctgagcaagcacatcaagctggaagaggaacggagaagcgaggacgcccagagcaaggccgccctgaccgactggctgcgggctaaggccagcttcgtgatcgagggcctgaaggaggccgacaaggacgagttctgcagatgcgagctgaagctgcagaagtggtacggggacctgcggggaaagcccttcgccatcgaagccgagaacagcatcctggacatcagcggcttcagcaagcagtacaactgtgccttcatctggcagaaggacggcgtgaagaagctgaacctgtacctgatcatcaactacttcaagggcggcaagctgcggttcaagaagatcaaacctgaagccttcgaagccaacagattctacaccgtgatcaacaaaaagagcggcgagatcgtgcccatggaggtgaacttcaacttcgacgaccccaacctgatcatcctgcctctggcctttggcaagagacagggcagagaattcatctggaacgacctgctgtccctggaaaccggcagcctgaagctggccaacggaagagtgatcgagaagacactgtacaacagaagaacccggcaggatgagcctgccctgttcgtggccctgaccttcgagcggcgggaggtcctggactcctccaatatcaaaccaatgaacctgatcggcgtggcaagaggcgaaaacatccccgccgtgatcgccctgaccgaccccgagggctgcccactgagccggtttaaggatagcctgggaaacccaacccacatcctgagaatcggcgagagctataaggagaagcagcggaccatccaggccaagaaggaggtggagcagcggagagccggcggctacagccggaagtacgccagcaaagccaagaatctggcagacgatatggtgagaaacaccgctagagatctgctgtactacgccgtgacccaggatgccatgctgatcttcgccaacctgagccggggcttcggccggcagggcaagcggaccttcatggccgagagacagtacacacggatggaggactggctgaccgccaagctggcctacgagggcctgagcaagacctacctgtccaagacactggcccagtacacctccaagacatgcagcaactgtgggtttaccatcaccagcgccgactacgacagggtgctggagaagctgaagaagacagcaacaggctggatgaccacaattaacggcaaggagctgaaggtggagggccagattacctactacaacagatacaagagacagaacgtagtcaaggacctgtccgtcgagctggatagactgagcgaagaatctgtgaacaacgacatctcctcctggacaaagggcagaagcggagaagctctgagcctcctgaagaaaagattctcccatagacccgtgcaggagaagttcgtgtgcctgaactgcggcttcgagacacacgcagccgagcaagccgccctgaacatcgccagatcctggctgttcctgcggagccaggagtacaagaaataccagacaaacaagacaaccggcaacaccgataagagagccttcgtcgagacctggcagtccttttaccggaagaagcttaaggaggtgtggaaacctgccgtgcggtctggcggatctggcggaggctcccagggcagcgtgagcttcgaggacgtggccgtgtacttcaccgaggaggagtgggccctgctggacagcagccagagggccctgcacagggaggtgatgctggagaacagcaggaacctggccgccgtgggctacggccaggagcacaagaactaccaggagcccagcctggccctgttccagagcgaggagaggatgctgggcatccagagggtgctgcagaagaccaggaggagctgcctgggcggcccaagcagcggcgcccctcctcccagcggcggcagcccagccggctccccaacctctaccgaggagggcacctctgagtccgccacccccgagagcggccctggcacctccaccgagcccagcgagggcagcgcacccggcagccctgccggcagccccacctccacagaggagggaaccagcaccgagcccagcgaaggcagcgccccaggcaccagcaccgagcctagtgagcaggagattaaacggatcaacaagatcagaagaagacttgtgaaagacagcaacaccaagaaggccggcaagacaggccccatgaaaaccctgctggttagagtgatgacacccgatctgagagagcggctggaaaacctgagaaagaagcctgaaaatatcccccagcccatcagcaatacatctagagccaacctgaataagctgctgaccgattacaccgaaatgaagaaggcgatcctgcatgtgtactgggaagagttccagaaggaccctgtgggcctgatgagccgggtggcccagcctgccagcaagaagatcgatcagaacaagctgaaacctgagatggacgagaagggcaacctgaccaccgccggctttgcctgctctcagtgtggccagcccctgttcgtgtacaagctggagcaggtgtctgagaagggcaaggcttacaccaactacttcggacggtgcaatgtggccgagcacgaaaagctgatcctgctggcccagctgaagcccgagaaggatagcgacgaagccgtgacatatagcctgggaaagtttgggcagagggccctggatttctacagcattcatgtgaccaaggagtccacccaccccgtgaagcccctggcccagatcgccggaaacagatacgcctccggacctgtgggaaaggccctgagcgacgcatgtatgggcacaatcgcctccttcctgtctaagtaccaggacatcatcatcgaacaccagaaggtggtgaagggcaaccagaagagactggagagcctgcgggagctggccggcaaggaaaacctggaataccctagcgtgaccctgccacctcagcctcacaccaaggagggcgttgatgcctacaacgaagtgatcgcccgggtgcgaatgtgggtgaacctgaacctgtggcagaagctgaagctaagcagagatgatgccaagcctctgctgagactgaagggattcccttcctttcctctggtcgagagacaggccaacgaagtggactggtgggacatggtgtgtaacgtgaagaagctgatcaacgagaaaaaggaggatggcaaggtgttttggcagaatctggctggctacaagagacaggaagccctgagaccatacctgagcagcgaggaagatcggaagaagggaaagaaattcgctcggtaccagctgggcgacctgctgctgcacctggaaaagaagcacggcgaggactggggaaaggtgtacgacgaggcctgggagcggattgacaagaaagtggaaggcctgagcaagcacatcaagctggaagaggaacggagaagcgaggacgcccagagcaaggccgccctgaccgactggctgcgggctaaggccagcttcgtgatcgagggcctgaaggaggccgacaaggacgagttctgcagatgcgagctgaagctgcagaagtggtacggggacctgcggggaaagcccttcgccatcgaagccgagaacagcatcctggacatcagcggcttcagcaagcagtacaactgtgccttcatctggcagaaggacggcgtgaagaagctgaacctgtacctgatcatcaactacttcaagggcggcaagctgcggttcaagaagatcaaacctgaagccttcgaagccaacagattctacaccgtgatcaacaaaaagagcggcgagatcgtgcccatggaggtgaacttcaacttcgacgaccccaacctgatcatcctgcctctggcctttggcaagagacagggcagagaattcatctggaacgacctgctgtccctggaaaccggcagcctgaagctggccaacggaagagtgatcgagaagacactgtacaacagaagaacccggcaggatgagcctgccctgttcgtggccctgaccttcgagcggcgggaggtcctggactcctccaatatcaaaccaatgaacctgatcggcgtggcaagaggcgaaaacatccccgccgtgatcgccctgaccgaccccgagggctgcccactgagccggtttaaggatagcctgggaaacccaacccacatcctgagaatcggcgagagctataaggagaagcagcggaccatccaggccaagaaggaggtggagcagcggagagccggcggctacagccggaagtacgccagcaaagccaagaatctggcagacgatatggtgagaaacaccgctagagatctgctgtactacgccgtgacccaggatgccatgctgatcttcgccaacctgagccggggcttcggccggcagggcaagcggaccttcatggccgagagacagtacacacggatggaggactggctgaccgccaagctggcctacgagggcctgagcaagacctacctgtccaagacactggcccagtacacctccaagacatgcagcaactgtgggtttaccatcaccagcgccgactacgacagggtgctggagaagctgaagaagacagcaacaggctggatgaccacaattaacggcaaggagctgaaggtggagggccagattacctactacaacagatacaagagacagaacgtagtcaaggacctgtccgtcgagctggatagactgagcgaagaatctgtgaacaacgacatctcctcctggacaaagggcagaagcggagaagctctgagcctcctgaagaaaagattctcccatagacccgtgcaggagaagttcgtgtgcctgaactgcggcttcgagacacacgcagccgagcaagccgccctgaacatcgccagatcctggctgttcctgcggagccaggagtacaagaaataccagacaaacaagacaaccggcaacaccgataagagagccttcgtcgagacctggcagtccttttaccggaagaagcttaaggaggtgtggaaacctgccgtgcggtctggcggatctggcggaggctcctcagggcagcgtgagcttcgaggacgtggccgtgtacttcaccgaggaggagtgggccctgctggacagcagccagagggccctgcacagggaggtgatgctggagaacagcaggaacctggccgccgtgggctacggccaggagcacaagaactaccaggagcccagcctggccctgttccagagcgaggagaggatgctgggcatccagagggtgctgcagaagaccaggaggagctgcctgggatctggctccggcagcggccccaagaaaaagagaaaagtctaagctgccttctgcggggcttgccttctggccatgcccttcttctctcccttgcacctgtacctcttggtctttgaataaagcctgagtaggaaggctagcaaaaaaaaaaaaaaaaaaaaaaaaaaaaaaaaaaaaaaaaaaaaaaaaaaaaaaaaaaaaaaaaaaaaaaaaaaaaaaaa

SEQ ID NO: 15905 - RNA, 9485 nt, synthetic construct
  source 1..9485: mol_type = other RNA
aggaaataagagagaaaagaagagtaagaagaaatataagagccaccatggcccctaagaagaagcgtaaagtgagccggatggaacgcctcgtctacgaggtgcggcagaagtgcagaaacatcgaggacatctgcatctcctgcggatctctgaacgtgaccctggagcacccactgttcatcggcggcatgtgccagaactgtaaaaactgttttctggagtgtgcctatcaatacgacgatgacggctaccagagctactgcaccatctgttgcggcggaagagaggtgctgatgtgtggaaataacaactgctgccggtgcttctgcgtggaatgcgtggacctgctggtgggccccggcgccgcccaggccgctattaaggaagatccttggaactgctacatgtgcggccacaagggcacatacggcctgctgagacggagagaggactggcctagcagactgcagatgttcttcgccaataaccacgaccaggagttcgacccccctaaggtgtaccctcccgtccccgccgagaagagaaagcccatccgggtcctgagcctgttcgatggcatcgccaccggtctgctggtgctgaaggacctgggcatccaggtggataggtacattgcctccgaggtgtgcgaggactccatcaccgtgggaatggtgcgtcatcagggcaagatcatgtacgtgggcgacgtgcggagcgtgacacagaagcatatccaggagtggggccctttcgacctggtgatcggcggcagcccttgcaatgacctgagcatcgtgaacccagcccggaagggcctgtacgagggaaccggcagactgttcttcgagttttacagactgctgcacgacgcccggcctaaggaaggcgacgaccggcccttcttttggctgttcgagaatgtggtggccatgggagtcagcgacaagcgggatattagccggttcctggagagcaaccccgtgatgatcgatgccaaggaagtgagcgccgcccaccgggccagatacttctggggcaatctgcctggcatgaacagacccctggccagcaccgtgaacgacaagctggagctgcaggagtgcctggagcacggccggatcgccaagttcagcaaggtgagaaccatcaccacccgaagcaacagcatcaaacaaggcaaggaccagcactttcctgtgttcatgaacgagaaggaggacatcctgtggtgtaccgagatggagagagtgttcgggttcccagtccactacacagatgtcagcaacatgtctagactggccagacagagactgctgggaagaagctggtccgtccctgtgatcagacacctgttcgcccctctgaaggagtacttcgcctgcgtgagcagcggcaacagcaacgccaacagccggggccccagcttctctagcggcctggtgccactgtccctgagagggagccacatgggccccatggagatctacaaaaccgtgagcgcctggaagcggcagcctgtgcgcgtgctgagcctgtttcggaatatcgataaagtcctgaaaagcctgggattcctggagagcggctctggctccggcggtggcaccctgaagtacgtggaggatgtgacaaacgtggtcagacgggatgtggagaagtggggccccttcgatctggtgtacggcagcacccaacccctgggcagctcttgtgaccggtgccctggctggtacatgtttcagttccaccggatcctgcagtacgccctgccgagacaggagtcccagcggccattcttttggattttcatggacaacttgctgctgaccgaggatgaccaggaaactaccactcggttcctgcagaccgaagccgtgaccctgcaggacgtgagaggccgggactaccagaacgccatgcgggtgtggtccaacatccctggactgaaaagcaagcacgcacctctgacccctaaagaagaggagtacctgcaggcccaggtgcggagcagaagcaagctggacgcccctaaggtggatctgctggtgaagaattgcctcctgcccctgagagagtacttcaagtatttcagccagaatagtctgcccctgggaggcagcggcggcggcgccctggtgacatttgaggacgtcgccgtgcggttcacccaggaggaatgggctctgctggatccttctcagaaaatcctgtaccgggacgtgatgagagagacataccggaatctgacctccgtgggcatcaactgggaatgttgggaccttgaagcctgcttcagaagcctgggaagaaacctgagagtgcaggtggtgaagagaaagtgcgagctgaccaacagcggcccctgcgccgagggcggcccaagcagcggcgcccctcctcccagcggcggcagcccagccggctccccaacctctaccgaggagggcacctctgagtccgccacccccgagagcggccctggcacctccaccgagcccagcgagggcagcgcacccggcagccctgccggcagccccacctccacagaggagggaaccagcaccgagcccagcgaaggcagcgccccaggcaccagcaccgagcctagtgagcaggagattaaacggatcaacaagatcagaagaagacttgtgaaagacagcaacaccaagaaggccggcaagacaggccccatgaaaaccctgctggttagagtgatgacacccgatctgagagagcggctggaaaacctgagaaagaagcctgaaaatatcccccagcccatcagcaatacatctagagccaacctgaataagctgctgaccgattacaccgaaatgaagaaggcgatcctgcatgtgtactgggaagagttccagaaggaccctgtgggcctgatgagccgggtggcccagcctgccagcaagaagatcgatcagaacaagctgaaacctgagatggacgagaagggcaacctgaccaccgccggctttgcctgctctcagtgtggccagcccctgttcgtgtacaagctggagcaggtgtctgagaagggcaaggcttacaccaactacttcggacggtgcaatgtggccgagcacgaaaagctgatcctgctggcccagctgaagcccgagaaggatagcgacgaagccgtgacatatagcctgggaaagtttgggcagagggccctggatttctacagcattcatgtgaccaaggagtccacccaccccgtgaagcccctggcccagatcgccggaaacagatacgcctccggacctgtgggaaaggccctgagcgacgcatgtatgggcacaatcgcctccttcctgtctaagtaccaggacatcatcatcgaacaccagaaggtggtgaagggcaaccagaagagactggagagcctgcgggagctggccggcaaggaaaacctggaataccctagcgtgaccctgccacctcagcctcacaccaaggagggcgttgatgcctacaacgaagtgatcgcccgggtgcgaatgtgggtgaacctgaacctgtggcagaagctgaagctaagcagagatgatgccaagcctctgctgagactgaagggattcccttcctttcctctggtcgagagacaggccaacgaagtggactggtgggacatggtgtgtaacgtgaagaagctgatcaacgagaaaaaggaggatggcaaggtgttttggcagaatctggctggctacaagagacaggaagccctgagaccatacctgagcagcgaggaagatcggaagaagggaaagaaattcgctcggtaccagctgggcgacctgctgctgcacctggaaaagaagcacggcgaggactggggaaaggtgtacgacgaggcctgggagcggattgacaagaaagtggaaggcctgagcaagcacatcaagctggaagaggaacggagaagcgaggacgcccagagcaaggccgccctgaccgactggctgcgggctaaggccagcttcgtgatcgagggcctgaaggaggccgacaaggacgagttctgcagatgcgagctgaagctgcagaagtggtacggggacctgcggggaaagcccttcgccatcgaagccgagaacagcatcctggacatcagcggcttcagcaagcagtacaactgtgccttcatctggcagaaggacggcgtgaagaagctgaacctgtacctgatcatcaactacttcaagggcggcaagctgcggttcaagaagatcaaacctgaagccttcgaagccaacagattctacaccgtgatcaacaaaaagagcggcgagatcgtgcccatggaggtgaacttcaacttcgacgaccccaacctgatcatcctgcctctggcctttggcaagagacagggcagagaattcatctggaacgacctgctgtccctggaaaccggcagcctgaagctggccaacggaagagtgatcgagaagacactgtacaacagaagaacccggcaggatgagcctgccctgttcgtggccctgaccttcgagcggcgggaggtcctggactcctccaatatcaaaccaatgaacctgatcggcgtggcaagaggcgaaaacatccccgccgtgatcgccctgaccgaccccgagggctgcccactgagccggtttaaggatagcctgggaaacccaacccacatcctgagaatcggcgagagctataaggagaagcagcggaccatccaggccaagaaggaggtggagcagcggagagccggcggctacagccggaagtacgccagcaaagccaagaatctggcagacgatatggtgagaaacaccgctagagatctgctgtactacgccgtgacccaggatgccatgctgatcttcgccaacctgagccggggcttcggccggcagggcaagcggaccttcatggccgagagacagtacacacggatggaggactggctgaccgccaagctggcctacgagggcctgagcaagacctacctgtccaagacactggcccagtacacctccaagacatgcagcaactgtgggtttaccatcaccagcgccgactacgacagggtgctggagaagctgaagaagacagcaacaggctggatgaccacaattaacggcaaggagctgaaggtggagggccagattacctactacaacagatacaagagacagaacgtagtcaaggacctgtccgtcgagctggatagactgagcgaagaatctgtgaacaacgacatctcctcctggacaaagggcagaagcggagaagctctgagcctcctgaagaaaagattctcccatagacccgtgcaggagaagttcgtgtgcctgaactgcggcttcgagacacacgcagccgagcaagccgccctgaacatcgccagatcctggctgttcctgcggagccaggagtacaagaaataccagacaaacaagacaaccggcaacaccgataagagagccttcgtcgagacctggcagtccttttaccggaagaagcttaaggaggtgtggaaacctgccgtgcggtctggcggatctggcggaggctccggccaggaggaggtgaccttcaaggacgtggccgtggacttcaccagggaggagtggaggctgctgagccccccccagaaggagctgtacaaggaggtgatggtggagaacgccaggaacctgctgagcgtgggcctgcccgcccccaccaaggacgtgctgagctacctgaagaagaggggcgcccccgtgatgctggagcaggagggcctgaggaactacttccccgagggcgagatcaggggcggcccaagcagcggcgcccctcctcccagcggcggcagcccagccggctccccaacctctaccgaggagggcacctctgagtccgccacccccgagagcggccctggcacctccaccgagcccagcgagggcagcgcacccggcagccctgccggcagccccacctccacagaggagggaaccagcaccgagcccagcgaaggcagcgccccaggcaccagcaccgagcctagtgagcaggagattaaacggatcaacaagatcagaagaagacttgtgaaagacagcaacaccaagaaggccggcaagacaggccccatgaaaaccctgctggttagagtgatgacacccgatctgagagagcggctggaaaacctgagaaagaagcctgaaaatatcccccagcccatcagcaatacatctagagccaacctgaataagctgctgaccgattacaccgaaatgaagaaggcgatcctgcatgtgtactgggaagagttccagaaggaccctgtgggcctgatgagccgggtggcccagcctgccagcaagaagatcgatcagaacaagctgaaacctgagatggacgagaagggcaacctgaccaccgccggctttgcctgctctcagtgtggccagcccctgttcgtgtacaagctggagcaggtgtctgagaagggcaaggcttacaccaactacttcggacggtgcaatgtggccgagcacgaaaagctgatcctgctggcccagctgaagcccgagaaggatagcgacgaagccgtgacatatagcctgggaaagtttgggcagagggccctggatttctacagcattcatgtgaccaaggagtccacccaccccgtgaagcccctggcccagatcgccggaaacagatacgcctccggacctgtgggaaaggccctgagcgacgcatgtatgggcacaatcgcctccttcctgtctaagtaccaggacatcatcatcgaacaccagaaggtggtgaagggcaaccagaagagactggagagcctgcgggagctggccggcaaggaaaacctggaataccctagcgtgaccctgccacctcagcctcacaccaaggagggcgttgatgcctacaacgaagtgatcgcccgggtgcgaatgtgggtgaacctgaacctgtggcagaagctgaagctaagcagagatgatgccaagcctctgctgagactgaagggattcccttcctttcctctggtcgagagacaggccaacgaagtggactggtgggacatggtgtgtaacgtgaagaagctgatcaacgagaaaaaggaggatggcaaggtgttttggcagaatctggctggctacaagagacaggaagccctgagaccatacctgagcagcgaggaagatcggaagaagggaaagaaattcgctcggtaccagctgggcgacctgctgctgcacctggaaaagaagcacggcgaggactggggaaaggtgtacgacgaggcctgggagcggattgacaagaaagtggaaggcctgagcaagcacatcaagctggaagaggaacggagaagcgaggacgcccagagcaaggccgccctgaccgactggctgcgggctaaggccagcttcgtgatcgagggcctgaaggaggccgacaaggacgagttctgcagatgcgagctgaagctgcagaagtggtacggggacctgcggggaaagcccttcgccatcgaagccgagaacagcatcctggacatcagcggcttcagcaagcagtacaactgtgccttcatctggcagaaggacggcgtgaagaagctgaacctgtacctgatcatcaactacttcaagggcggcaagctgcggttcaagaagatcaaacctgaagccttcgaagccaacagattctacaccgtgatcaacaaaaagagcggcgagatcgtgcccatggaggtgaacttcaacttcgacgaccccaacctgatcatcctgcctctggcctttggcaagagacagggcagagaattcatctggaacgacctgctgtccctggaaaccggcagcctgaagctggccaacggaagagtgatcgagaagacactgtacaacagaagaacccggcaggatgagcctgccctgttcgtggccctgaccttcgagcggcgggaggtcctggactcctccaatatcaaaccaatgaacctgatcggcgtggcaagaggcgaaaacatccccgccgtgatcgccctgaccgaccccgagggctgcccactgagccggtttaaggatagcctgggaaacccaacccacatcctgagaatcggcgagagctataaggagaagcagcggaccatccaggccaagaaggaggtggagcagcggagagccggcggctacagccggaagtacgccagcaaagccaagaatctggcagacgatatggtgagaaacaccgctagagatctgctgtactacgccgtgacccaggatgccatgctgatcttcgccaacctgagccggggcttcggccggcagggcaagcggaccttcatggccgagagacagtacacacggatggaggactggctgaccgccaagctggcctacgagggcctgagcaagacctacctgtccaagacactggcccagtacacctccaagacatgcagcaactgtgggtttaccatcaccagcgccgactacgacagggtgctggagaagctgaagaagacagcaacaggctggatgaccacaattaacggcaaggagctgaaggtggagggccagattacctactacaacagatacaagagacagaacgtagtcaaggacctgtccgtcgagctggatagactgagcgaagaatctgtgaacaacgacatctcctcctggacaaagggcagaagcggagaagctctgagcctcctgaagaaaagattctcccatagacccgtgcaggagaagttcgtgtgcctgaactgcggcttcgagacacacgcagccgagcaagccgccctgaacatcgccagatcctggctgttcctgcggagccaggagtacaagaaataccagacaaacaagacaaccggcaacaccgataagagagccttcgtcgagacctggcagtccttttaccggaagaagcttaaggaggtgtggaaacctgccgtgcggtctggcggatctggcggaggctcctggccaggaggaggtgaccttcaaggacgtggccgtggacttcaccagggaggagtggaggctgctgagccccccccagaaggagctgtacaaggaggtgatggtggagaacgccaggaacctgctgagcgtgggcctgcccgcccccaccaaggacgtgctgagctacctgaagaagaggggcgcccccgtgatgctggagcaggagggcctgaggaactacttccccgagggcgagatcaggggatctggctccggcagcggccccaagaaaaagagaaaagtctaagctgccttctgcggggcttgccttctggccatgcccttcttctctcccttgcacctgtacctcttggtctttgaataaagcctgagtaggaaggctagcaaaaaaaaaaaaaaaaaaaaaaaaaaaaaaaaaaaaaaaaaaaaaaaaaaaaaaaaaaaaaaaaaaaaaaaaaaaaaaaa

SEQ ID NO: 15906 - RNA, 9485 nt, synthetic construct
  source 1..9485: mol_type = other RNA
aggaaataagagagaaaagaagagtaagaagaaatataagagccaccatggcccctaagaagaagcgtaaagtgagccggatggaacgcctcgtctacgaggtgcggcagaagtgcagaaacatcgaggacatctgcatctcctgcggatctctgaacgtgaccctggagcacccactgttcatcggcggcatgtgccagaactgtaaaaactgttttctggagtgtgcctatcaatacgacgatgacggctaccagagctactgcaccatctgttgcggcggaagagaggtgctgatgtgtggaaataacaactgctgccggtgcttctgcgtggaatgcgtggacctgctggtgggccccggcgccgcccaggccgctattaaggaagatccttggaactgctacatgtgcggccacaagggcacatacggcctgctgagacggagagaggactggcctagcagactgcagatgttcttcgccaataaccacgaccaggagttcgacccccctaaggtgtaccctcccgtccccgccgagaagagaaagcccatccgggtcctgagcctgttcgatggcatcgccaccggtctgctggtgctgaaggacctgggcatccaggtggataggtacattgcctccgaggtgtgcgaggactccatcaccgtgggaatggtgcgtcatcagggcaagatcatgtacgtgggcgacgtgcggagcgtgacacagaagcatatccaggagtggggccctttcgacctggtgatcggcggcagcccttgcaatgacctgagcatcgtgaacccagcccggaagggcctgtacgagggaaccggcagactgttcttcgagttttacagactgctgcacgacgcccggcctaaggaaggcgacgaccggcccttcttttggctgttcgagaatgtggtggccatgggagtcagcgacaagcgggatattagccggttcctggagagcaaccccgtgatgatcgatgccaaggaagtgagcgccgcccaccgggccagatacttctggggcaatctgcctggcatgaacagacccctggccagcaccgtgaacgacaagctggagctgcaggagtgcctggagcacggccggatcgccaagttcagcaaggtgagaaccatcaccacccgaagcaacagcatcaaacaaggcaaggaccagcactttcctgtgttcatgaacgagaaggaggacatcctgtggtgtaccgagatggagagagtgttcgggttcccagtccactacacagatgtcagcaacatgtctagactggccagacagagactgctgggaagaagctggtccgtccctgtgatcagacacctgttcgcccctctgaaggagtacttcgcctgcgtgagcagcggcaacagcaacgccaacagccggggccccagcttctctagcggcctggtgccactgtccctgagagggagccacatgggccccatggagatctacaaaaccgtgagcgcctggaagcggcagcctgtgcgcgtgctgagcctgtttcggaatatcgataaagtcctgaaaagcctgggattcctggagagcggctctggctccggcggtggcaccctgaagtacgtggaggatgtgacaaacgtggtcagacgggatgtggagaagtggggccccttcgatctggtgtacggcagcacccaacccctgggcagctcttgtgaccggtgccctggctggtacatgtttcagttccaccggatcctgcagtacgccctgccgagacaggagtcccagcggccattcttttggattttcatggacaacttgctgctgaccgaggatgaccaggaaactaccactcggttcctgcagaccgaagccgtgaccctgcaggacgtgagaggccgggactaccagaacgccatgcgggtgtggtccaacatccctggactgaaaagcaagcacgcacctctgacccctaaagaagaggagtacctgcaggcccaggtgcggagcagaagcaagctggacgcccctaaggtggatctgctggtgaagaattgcctcctgcccctgagagagtacttcaagtatttcagccagaatagtctgcccctgggaggcagcggcggcggcgccctggtgacatttgaggacgtcgccgtgcggttcacccaggaggaatgggctctgctggatccttctcagaaaatcctgtaccgggacgtgatgagagagacataccggaatctgacctccgtgggcatcaactgggaatgttgggaccttgaagcctgcttcagaagcctgggaagaaacctgagagtgcaggtggtgaagagaaagtgcgagctgaccaacagcggcccctgcgccgagggcggcccaagcagcggcgcccctcctcccagcggcggcagcccagccggctccccaacctctaccgaggagggcacctctgagtccgccacccccgagagcggccctggcacctccaccgagcccagcgagggcagcgcacccggcagccctgccggcagccccacctccacagaggagggaaccagcaccgagcccagcgaaggcagcgccccaggcaccagcaccgagcctagtgagcaggagattaaacggatcaacaagatcagaagaagacttgtgaaagacagcaacaccaagaaggccggcaagacaggccccatgaaaaccctgctggttagagtgatgacacccgatctgagagagcggctggaaaacctgagaaagaagcctgaaaatatcccccagcccatcagcaatacatctagagccaacctgaataagctgctgaccgattacaccgaaatgaagaaggcgatcctgcatgtgtactgggaagagttccagaaggaccctgtgggcctgatgagccgggtggcccagcctgccagcaagaagatcgatcagaacaagctgaaacctgagatggacgagaagggcaacctgaccaccgccggctttgcctgctctcagtgtggccagcccctgttcgtgtacaagctggagcaggtgtctgagaagggcaaggcttacaccaactacttcggacggtgcaatgtggccgagcacgaaaagctgatcctgctggcccagctgaagcccgagaaggatagcgacgaagccgtgacatatagcctgggaaagtttgggcagagggccctggatttctacagcattcatgtgaccaaggagtccacccaccccgtgaagcccctggcccagatcgccggaaacagatacgcctccggacctgtgggaaaggccctgagcgacgcatgtatgggcacaatcgcctccttcctgtctaagtaccaggacatcatcatcgaacaccagaaggtggtgaagggcaaccagaagagactggagagcctgcgggagctggccggcaaggaaaacctggaataccctagcgtgaccctgccacctcagcctcacaccaaggagggcgttgatgcctacaacgaagtgatcgcccgggtgcgaatgtgggtgaacctgaacctgtggcagaagctgaagctaagcagagatgatgccaagcctctgctgagactgaagggattcccttcctttcctctggtcgagagacaggccaacgaagtggactggtgggacatggtgtgtaacgtgaagaagctgatcaacgagaaaaaggaggatggcaaggtgttttggcagaatctggctggctacaagagacaggaagccctgagaccatacctgagcagcgaggaagatcggaagaagggaaagaaattcgctcggtaccagctgggcgacctgctgctgcacctggaaaagaagcacggcgaggactggggaaaggtgtacgacgaggcctgggagcggattgacaagaaagtggaaggcctgagcaagcacatcaagctggaagaggaacggagaagcgaggacgcccagagcaaggccgccctgaccgactggctgcgggctaaggccagcttcgtgatcgagggcctgaaggaggccgacaaggacgagttctgcagatgcgagctgaagctgcagaagtggtacggggacctgcggggaaagcccttcgccatcgaagccgagaacagcatcctggacatcagcggcttcagcaagcagtacaactgtgccttcatctggcagaaggacggcgtgaagaagctgaacctgtacctgatcatcaactacttcaagggcggcaagctgcggttcaagaagatcaaacctgaagccttcgaagccaacagattctacaccgtgatcaacaaaaagagcggcgagatcgtgcccatggaggtgaacttcaacttcgacgaccccaacctgatcatcctgcctctggcctttggcaagagacagggcagagaattcatctggaacgacctgctgtccctggaaaccggcagcctgaagctggccaacggaagagtgatcgagaagacactgtacaacagaagaacccggcaggatgagcctgccctgttcgtggccctgaccttcgagcggcgggaggtcctggactcctccaatatcaaaccaatgaacctgatcggcgtggcaagaggcgaaaacatccccgccgtgatcgccctgaccgaccccgagggctgcccactgagccggtttaaggatagcctgggaaacccaacccacatcctgagaatcggcgagagctataaggagaagcagcggaccatccaggccaagaaggaggtggagcagcggagagccggcggctacagccggaagtacgccagcaaagccaagaatctggcagacgatatggtgagaaacaccgctagagatctgctgtactacgccgtgacccaggatgccatgctgatcttcgccaacctgagccggggcttcggccggcagggcaagcggaccttcatggccgagagacagtacacacggatggaggactggctgaccgccaagctggcctacgagggcctgagcaagacctacctgtccaagacactggcccagtacacctccaagacatgcagcaactgtgggtttaccatcaccagcgccgactacgacagggtgctggagaagctgaagaagacagcaacaggctggatgaccacaattaacggcaaggagctgaaggtggagggccagattacctactacaacagatacaagagacagaacgtagtcaaggacctgtccgtcgagctggatagactgagcgaagaatctgtgaacaacgacatctcctcctggacaaagggcagaagcggagaagctctgagcctcctgaagaaaagattctcccatagacccgtgcaggagaagttcgtgtgcctgaactgcggcttcgagacacacgcagccgagcaagccgccctgaacatcgccagatcctggctgttcctgcggagccaggagtacaagaaataccagacaaacaagacaaccggcaacaccgataagagagccttcgtcgagacctggcagtccttttaccggaagaagcttaaggaggtgtggaaacctgccgtgcggtctggcggatctggcggaggctccgagccctgggccgtgaccttcgccgacgtggccgtgtacttcagcagcgaggagtggaggtgcctgaggcccgcccagagggccctgtacagggacgtgatgagggacacctacggcctgctgagcgccctgggcggcggcggcaccaagcccgccctgatcagctgggtggagggcgaggccgagctgtgggaccccgacgcccaggaccccgaggtggtgaggtggcccgccgaggccgacggcggcccaagcagcggcgcccctcctcccagcggcggcagcccagccggctccccaacctctaccgaggagggcacctctgagtccgccacccccgagagcggccctggcacctccaccgagcccagcgagggcagcgcacccggcagccctgccggcagccccacctccacagaggagggaaccagcaccgagcccagcgaaggcagcgccccaggcaccagcaccgagcctagtgagcaggagattaaacggatcaacaagatcagaagaagacttgtgaaagacagcaacaccaagaaggccggcaagacaggccccatgaaaaccctgctggttagagtgatgacacccgatctgagagagcggctggaaaacctgagaaagaagcctgaaaatatcccccagcccatcagcaatacatctagagccaacctgaataagctgctgaccgattacaccgaaatgaagaaggcgatcctgcatgtgtactgggaagagttccagaaggaccctgtgggcctgatgagccgggtggcccagcctgccagcaagaagatcgatcagaacaagctgaaacctgagatggacgagaagggcaacctgaccaccgccggctttgcctgctctcagtgtggccagcccctgttcgtgtacaagctggagcaggtgtctgagaagggcaaggcttacaccaactacttcggacggtgcaatgtggccgagcacgaaaagctgatcctgctggcccagctgaagcccgagaaggatagcgacgaagccgtgacatatagcctgggaaagtttgggcagagggccctggatttctacagcattcatgtgaccaaggagtccacccaccccgtgaagcccctggcccagatcgccggaaacagatacgcctccggacctgtgggaaaggccctgagcgacgcatgtatgggcacaatcgcctccttcctgtctaagtaccaggacatcatcatcgaacaccagaaggtggtgaagggcaaccagaagagactggagagcctgcgggagctggccggcaaggaaaacctggaataccctagcgtgaccctgccacctcagcctcacaccaaggagggcgttgatgcctacaacgaagtgatcgcccgggtgcgaatgtgggtgaacctgaacctgtggcagaagctgaagctaagcagagatgatgccaagcctctgctgagactgaagggattcccttcctttcctctggtcgagagacaggccaacgaagtggactggtgggacatggtgtgtaacgtgaagaagctgatcaacgagaaaaaggaggatggcaaggtgttttggcagaatctggctggctacaagagacaggaagccctgagaccatacctgagcagcgaggaagatcggaagaagggaaagaaattcgctcggtaccagctgggcgacctgctgctgcacctggaaaagaagcacggcgaggactggggaaaggtgtacgacgaggcctgggagcggattgacaagaaagtggaaggcctgagcaagcacatcaagctggaagaggaacggagaagcgaggacgcccagagcaaggccgccctgaccgactggctgcgggctaaggccagcttcgtgatcgagggcctgaaggaggccgacaaggacgagttctgcagatgcgagctgaagctgcagaagtggtacggggacctgcggggaaagcccttcgccatcgaagccgagaacagcatcctggacatcagcggcttcagcaagcagtacaactgtgccttcatctggcagaaggacggcgtgaagaagctgaacctgtacctgatcatcaactacttcaagggcggcaagctgcggttcaagaagatcaaacctgaagccttcgaagccaacagattctacaccgtgatcaacaaaaagagcggcgagatcgtgcccatggaggtgaacttcaacttcgacgaccccaacctgatcatcctgcctctggcctttggcaagagacagggcagagaattcatctggaacgacctgctgtccctggaaaccggcagcctgaagctggccaacggaagagtgatcgagaagacactgtacaacagaagaacccggcaggatgagcctgccctgttcgtggccctgaccttcgagcggcgggaggtcctggactcctccaatatcaaaccaatgaacctgatcggcgtggcaagaggcgaaaacatccccgccgtgatcgccctgaccgaccccgagggctgcccactgagccggtttaaggatagcctgggaaacccaacccacatcctgagaatcggcgagagctataaggagaagcagcggaccatccaggccaagaaggaggtggagcagcggagagccggcggctacagccggaagtacgccagcaaagccaagaatctggcagacgatatggtgagaaacaccgctagagatctgctgtactacgccgtgacccaggatgccatgctgatcttcgccaacctgagccggggcttcggccggcagggcaagcggaccttcatggccgagagacagtacacacggatggaggactggctgaccgccaagctggcctacgagggcctgagcaagacctacctgtccaagacactggcccagtacacctccaagacatgcagcaactgtgggtttaccatcaccagcgccgactacgacagggtgctggagaagctgaagaagacagcaacaggctggatgaccacaattaacggcaaggagctgaaggtggagggccagattacctactacaacagatacaagagacagaacgtagtcaaggacctgtccgtcgagctggatagactgagcgaagaatctgtgaacaacgacatctcctcctggacaaagggcagaagcggagaagctctgagcctcctgaagaaaagattctcccatagacccgtgcaggagaagttcgtgtgcctgaactgcggcttcgagacacacgcagccgagcaagccgccctgaacatcgccagatcctggctgttcctgcggagccaggagtacaagaaataccagacaaacaagacaaccggcaacaccgataagagagccttcgtcgagacctggcagtccttttaccggaagaagcttaaggaggtgtggaaacctgccgtgcggtctggcggatctggcggaggctcctgagccctgggccgtgaccttcgccgacgtggccgtgtacttcagcagcgaggagtggaggtgcctgaggcccgcccagagggccctgtacagggacgtgatgagggacacctacggcctgctgagcgccctgggcggcggcggcaccaagcccgccctgatcagctgggtggagggcgaggccgagctgtgggaccccgacgcccaggaccccgaggtggtgaggtggcccgccgaggccgacggatctggctccggcagcggccccaagaaaaagagaaaagtctaagctgccttctgcggggcttgccttctggccatgcccttcttctctcccttgcacctgtacctcttggtctttgaataaagcctgagtaggaaggctagcaaaaaaaaaaaaaaaaaaaaaaaaaaaaaaaaaaaaaaaaaaaaaaaaaaaaaaaaaaaaaaaaaaaaaaaaaaaaaaaa

SEQ ID NO: 15907 - RNA, 9485 nt, synthetic construct
  source 1..9485: mol_type = other RNA
aggaaataagagagaaaagaagagtaagaagaaatataagagccaccatggcccctaagaagaagcgtaaagtgagccggatggaacgcctcgtctacgaggtgcggcagaagtgcagaaacatcgaggacatctgcatctcctgcggatctctgaacgtgaccctggagcacccactgttcatcggcggcatgtgccagaactgtaaaaactgttttctggagtgtgcctatcaatacgacgatgacggctaccagagctactgcaccatctgttgcggcggaagagaggtgctgatgtgtggaaataacaactgctgccggtgcttctgcgtggaatgcgtggacctgctggtgggccccggcgccgcccaggccgctattaaggaagatccttggaactgctacatgtgcggccacaagggcacatacggcctgctgagacggagagaggactggcctagcagactgcagatgttcttcgccaataaccacgaccaggagttcgacccccctaaggtgtaccctcccgtccccgccgagaagagaaagcccatccgggtcctgagcctgttcgatggcatcgccaccggtctgctggtgctgaaggacctgggcatccaggtggataggtacattgcctccgaggtgtgcgaggactccatcaccgtgggaatggtgcgtcatcagggcaagatcatgtacgtgggcgacgtgcggagcgtgacacagaagcatatccaggagtggggccctttcgacctggtgatcggcggcagcccttgcaatgacctgagcatcgtgaacccagcccggaagggcctgtacgagggaaccggcagactgttcttcgagttttacagactgctgcacgacgcccggcctaaggaaggcgacgaccggcccttcttttggctgttcgagaatgtggtggccatgggagtcagcgacaagcgggatattagccggttcctggagagcaaccccgtgatgatcgatgccaaggaagtgagcgccgcccaccgggccagatacttctggggcaatctgcctggcatgaacagacccctggccagcaccgtgaacgacaagctggagctgcaggagtgcctggagcacggccggatcgccaagttcagcaaggtgagaaccatcaccacccgaagcaacagcatcaaacaaggcaaggaccagcactttcctgtgttcatgaacgagaaggaggacatcctgtggtgtaccgagatggagagagtgttcgggttcccagtccactacacagatgtcagcaacatgtctagactggccagacagagactgctgggaagaagctggtccgtccctgtgatcagacacctgttcgcccctctgaaggagtacttcgcctgcgtgagcagcggcaacagcaacgccaacagccggggccccagcttctctagcggcctggtgccactgtccctgagagggagccacatgggccccatggagatctacaaaaccgtgagcgcctggaagcggcagcctgtgcgcgtgctgagcctgtttcggaatatcgataaagtcctgaaaagcctgggattcctggagagcggctctggctccggcggtggcaccctgaagtacgtggaggatgtgacaaacgtggtcagacgggatgtggagaagtggggccccttcgatctggtgtacggcagcacccaacccctgggcagctcttgtgaccggtgccctggctggtacatgtttcagttccaccggatcctgcagtacgccctgccgagacaggagtcccagcggccattcttttggattttcatggacaacttgctgctgaccgaggatgaccaggaaactaccactcggttcctgcagaccgaagccgtgaccctgcaggacgtgagaggccgggactaccagaacgccatgcgggtgtggtccaacatccctggactgaaaagcaagcacgcacctctgacccctaaagaagaggagtacctgcaggcccaggtgcggagcagaagcaagctggacgcccctaaggtggatctgctggtgaagaattgcctcctgcccctgagagagtacttcaagtatttcagccagaatagtctgcccctgggaggcagcggcggcggcgccctggtgacatttgaggacgtcgccgtgcggttcacccaggaggaatgggctctgctggatccttctcagaaaatcctgtaccgggacgtgatgagagagacataccggaatctgacctccgtgggcatcaactgggaatgttgggaccttgaagcctgcttcagaagcctgggaagaaacctgagagtgcaggtggtgaagagaaagtgcgagctgaccaacagcggcccctgcgccgagggcggcccaagcagcggcgcccctcctcccagcggcggcagcccagccggctccccaacctctaccgaggagggcacctctgagtccgccacccccgagagcggccctggcacctccaccgagcccagcgagggcagcgcacccggcagccctgccggcagccccacctccacagaggagggaaccagcaccgagcccagcgaaggcagcgccccaggcaccagcaccgagcctagtgagcaggagattaaacggatcaacaagatcagaagaagacttgtgaaagacagcaacaccaagaaggccggcaagacaggccccatgaaaaccctgctggttagagtgatgacacccgatctgagagagcggctggaaaacctgagaaagaagcctgaaaatatcccccagcccatcagcaatacatctagagccaacctgaataagctgctgaccgattacaccgaaatgaagaaggcgatcctgcatgtgtactgggaagagttccagaaggaccctgtgggcctgatgagccgggtggcccagcctgccagcaagaagatcgatcagaacaagctgaaacctgagatggacgagaagggcaacctgaccaccgccggctttgcctgctctcagtgtggccagcccctgttcgtgtacaagctggagcaggtgtctgagaagggcaaggcttacaccaactacttcggacggtgcaatgtggccgagcacgaaaagctgatcctgctggcccagctgaagcccgagaaggatagcgacgaagccgtgacatatagcctgggaaagtttgggcagagggccctggatttctacagcattcatgtgaccaaggagtccacccaccccgtgaagcccctggcccagatcgccggaaacagatacgcctccggacctgtgggaaaggccctgagcgacgcatgtatgggcacaatcgcctccttcctgtctaagtaccaggacatcatcatcgaacaccagaaggtggtgaagggcaaccagaagagactggagagcctgcgggagctggccggcaaggaaaacctggaataccctagcgtgaccctgccacctcagcctcacaccaaggagggcgttgatgcctacaacgaagtgatcgcccgggtgcgaatgtgggtgaacctgaacctgtggcagaagctgaagctaagcagagatgatgccaagcctctgctgagactgaagggattcccttcctttcctctggtcgagagacaggccaacgaagtggactggtgggacatggtgtgtaacgtgaagaagctgatcaacgagaaaaaggaggatggcaaggtgttttggcagaatctggctggctacaagagacaggaagccctgagaccatacctgagcagcgaggaagatcggaagaagggaaagaaattcgctcggtaccagctgggcgacctgctgctgcacctggaaaagaagcacggcgaggactggggaaaggtgtacgacgaggcctgggagcggattgacaagaaagtggaaggcctgagcaagcacatcaagctggaagaggaacggagaagcgaggacgcccagagcaaggccgccctgaccgactggctgcgggctaaggccagcttcgtgatcgagggcctgaaggaggccgacaaggacgagttctgcagatgcgagctgaagctgcagaagtggtacggggacctgcggggaaagcccttcgccatcgaagccgagaacagcatcctggacatcagcggcttcagcaagcagtacaactgtgccttcatctggcagaaggacggcgtgaagaagctgaacctgtacctgatcatcaactacttcaagggcggcaagctgcggttcaagaagatcaaacctgaagccttcgaagccaacagattctacaccgtgatcaacaaaaagagcggcgagatcgtgcccatggaggtgaacttcaacttcgacgaccccaacctgatcatcctgcctctggcctttggcaagagacagggcagagaattcatctggaacgacctgctgtccctggaaaccggcagcctgaagctggccaacggaagagtgatcgagaagacactgtacaacagaagaacccggcaggatgagcctgccctgttcgtggccctgaccttcgagcggcgggaggtcctggactcctccaatatcaaaccaatgaacctgatcggcgtggcaagaggcgaaaacatccccgccgtgatcgccctgaccgaccccgagggctgcccactgagccggtttaaggatagcctgggaaacccaacccacatcctgagaatcggcgagagctataaggagaagcagcggaccatccaggccaagaaggaggtggagcagcggagagccggcggctacagccggaagtacgccagcaaagccaagaatctggcagacgatatggtgagaaacaccgctagagatctgctgtactacgccgtgacccaggatgccatgctgatcttcgccaacctgagccggggcttcggccggcagggcaagcggaccttcatggccgagagacagtacacacggatggaggactggctgaccgccaagctggcctacgagggcctgagcaagacctacctgtccaagacactggcccagtacacctccaagacatgcagcaactgtgggtttaccatcaccagcgccgactacgacagggtgctggagaagctgaagaagacagcaacaggctggatgaccacaattaacggcaaggagctgaaggtggagggccagattacctactacaacagatacaagagacagaacgtagtcaaggacctgtccgtcgagctggatagactgagcgaagaatctgtgaacaacgacatctcctcctggacaaagggcagaagcggagaagctctgagcctcctgaagaaaagattctcccatagacccgtgcaggagaagttcgtgtgcctgaactgcggcttcgagacacacgcagccgagcaagccgccctgaacatcgccagatcctggctgttcctgcggagccaggagtacaagaaataccagacaaacaagacaaccggcaacaccgataagagagccttcgtcgagacctggcagtccttttaccggaagaagcttaaggaggtgtggaaacctgccgtgcggtctggcggatctggcggaggctccgtgcagagccacgtggtgttcgaggacgtggccatctacttcagccaggaggagtggggcctgctggacgaggcccagaggttcctgtaccacgccgtgatgctggagaacttcgccctgctgagcagcctgggctgctggcacggcgcccaggacgagcaggccctgagcgagcagggcgtgagcgtgggcggcagccaggtgaggacccccaagcccgcccccagcatccagaagagccagggcggcccaagcagcggcgcccctcctcccagcggcggcagcccagccggctccccaacctctaccgaggagggcacctctgagtccgccacccccgagagcggccctggcacctccaccgagcccagcgagggcagcgcacccggcagccctgccggcagccccacctccacagaggagggaaccagcaccgagcccagcgaaggcagcgccccaggcaccagcaccgagcctagtgagcaggagattaaacggatcaacaagatcagaagaagacttgtgaaagacagcaacaccaagaaggccggcaagacaggccccatgaaaaccctgctggttagagtgatgacacccgatctgagagagcggctggaaaacctgagaaagaagcctgaaaatatcccccagcccatcagcaatacatctagagccaacctgaataagctgctgaccgattacaccgaaatgaagaaggcgatcctgcatgtgtactgggaagagttccagaaggaccctgtgggcctgatgagccgggtggcccagcctgccagcaagaagatcgatcagaacaagctgaaacctgagatggacgagaagggcaacctgaccaccgccggctttgcctgctctcagtgtggccagcccctgttcgtgtacaagctggagcaggtgtctgagaagggcaaggcttacaccaactacttcggacggtgcaatgtggccgagcacgaaaagctgatcctgctggcccagctgaagcccgagaaggatagcgacgaagccgtgacatatagcctgggaaagtttgggcagagggccctggatttctacagcattcatgtgaccaaggagtccacccaccccgtgaagcccctggcccagatcgccggaaacagatacgcctccggacctgtgggaaaggccctgagcgacgcatgtatgggcacaatcgcctccttcctgtctaagtaccaggacatcatcatcgaacaccagaaggtggtgaagggcaaccagaagagactggagagcctgcgggagctggccggcaaggaaaacctggaataccctagcgtgaccctgccacctcagcctcacaccaaggagggcgttgatgcctacaacgaagtgatcgcccgggtgcgaatgtgggtgaacctgaacctgtggcagaagctgaagctaagcagagatgatgccaagcctctgctgagactgaagggattcccttcctttcctctggtcgagagacaggccaacgaagtggactggtgggacatggtgtgtaacgtgaagaagctgatcaacgagaaaaaggaggatggcaaggtgttttggcagaatctggctggctacaagagacaggaagccctgagaccatacctgagcagcgaggaagatcggaagaagggaaagaaattcgctcggtaccagctgggcgacctgctgctgcacctggaaaagaagcacggcgaggactggggaaaggtgtacgacgaggcctgggagcggattgacaagaaagtggaaggcctgagcaagcacatcaagctggaagaggaacggagaagcgaggacgcccagagcaaggccgccctgaccgactggctgcgggctaaggccagcttcgtgatcgagggcctgaaggaggccgacaaggacgagttctgcagatgcgagctgaagctgcagaagtggtacggggacctgcggggaaagcccttcgccatcgaagccgagaacagcatcctggacatcagcggcttcagcaagcagtacaactgtgccttcatctggcagaaggacggcgtgaagaagctgaacctgtacctgatcatcaactacttcaagggcggcaagctgcggttcaagaagatcaaacctgaagccttcgaagccaacagattctacaccgtgatcaacaaaaagagcggcgagatcgtgcccatggaggtgaacttcaacttcgacgaccccaacctgatcatcctgcctctggcctttggcaagagacagggcagagaattcatctggaacgacctgctgtccctggaaaccggcagcctgaagctggccaacggaagagtgatcgagaagacactgtacaacagaagaacccggcaggatgagcctgccctgttcgtggccctgaccttcgagcggcgggaggtcctggactcctccaatatcaaaccaatgaacctgatcggcgtggcaagaggcgaaaacatccccgccgtgatcgccctgaccgaccccgagggctgcccactgagccggtttaaggatagcctgggaaacccaacccacatcctgagaatcggcgagagctataaggagaagcagcggaccatccaggccaagaaggaggtggagcagcggagagccggcggctacagccggaagtacgccagcaaagccaagaatctggcagacgatatggtgagaaacaccgctagagatctgctgtactacgccgtgacccaggatgccatgctgatcttcgccaacctgagccggggcttcggccggcagggcaagcggaccttcatggccgagagacagtacacacggatggaggactggctgaccgccaagctggcctacgagggcctgagcaagacctacctgtccaagacactggcccagtacacctccaagacatgcagcaactgtgggtttaccatcaccagcgccgactacgacagggtgctggagaagctgaagaagacagcaacaggctggatgaccacaattaacggcaaggagctgaaggtggagggccagattacctactacaacagatacaagagacagaacgtagtcaaggacctgtccgtcgagctggatagactgagcgaagaatctgtgaacaacgacatctcctcctggacaaagggcagaagcggagaagctctgagcctcctgaagaaaagattctcccatagacccgtgcaggagaagttcgtgtgcctgaactgcggcttcgagacacacgcagccgagcaagccgccctgaacatcgccagatcctggctgttcctgcggagccaggagtacaagaaataccagacaaacaagacaaccggcaacaccgataagagagccttcgtcgagacctggcagtccttttaccggaagaagcttaaggaggtgtggaaacctgccgtgcggtctggcggatctggcggaggctcctgtgcagagccacgtggtgttcgaggacgtggccatctacttcagccaggaggagtggggcctgctggacgaggcccagaggttcctgtaccacgccgtgatgctggagaacttcgccctgctgagcagcctgggctgctggcacggcgcccaggacgagcaggccctgagcgagcagggcgtgagcgtgggcggcagccaggtgaggacccccaagcccgcccccagcatccagaagagccagggatctggctccggcagcggccccaagaaaaagagaaaagtctaagctgccttctgcggggcttgccttctggccatgcccttcttctctcccttgcacctgtacctcttggtctttgaataaagcctgagtaggaaggctagcaaaaaaaaaaaaaaaaaaaaaaaaaaaaaaaaaaaaaaaaaaaaaaaaaaaaaaaaaaaaaaaaaaaaaaaaaaaaaaaa

SEQ ID NO: 15908 - RNA, 9485 nt, synthetic construct
  source 1..9485: mol_type = other RNA
aggaaataagagagaaaagaagagtaagaagaaatataagagccaccatggcccctaagaagaagcgtaaagtgagccggatggaacgcctcgtctacgaggtgcggcagaagtgcagaaacatcgaggacatctgcatctcctgcggatctctgaacgtgaccctggagcacccactgttcatcggcggcatgtgccagaactgtaaaaactgttttctggagtgtgcctatcaatacgacgatgacggctaccagagctactgcaccatctgttgcggcggaagagaggtgctgatgtgtggaaataacaactgctgccggtgcttctgcgtggaatgcgtggacctgctggtgggccccggcgccgcccaggccgctattaaggaagatccttggaactgctacatgtgcggccacaagggcacatacggcctgctgagacggagagaggactggcctagcagactgcagatgttcttcgccaataaccacgaccaggagttcgacccccctaaggtgtaccctcccgtccccgccgagaagagaaagcccatccgggtcctgagcctgttcgatggcatcgccaccggtctgctggtgctgaaggacctgggcatccaggtggataggtacattgcctccgaggtgtgcgaggactccatcaccgtgggaatggtgcgtcatcagggcaagatcatgtacgtgggcgacgtgcggagcgtgacacagaagcatatccaggagtggggccctttcgacctggtgatcggcggcagcccttgcaatgacctgagcatcgtgaacccagcccggaagggcctgtacgagggaaccggcagactgttcttcgagttttacagactgctgcacgacgcccggcctaaggaaggcgacgaccggcccttcttttggctgttcgagaatgtggtggccatgggagtcagcgacaagcgggatattagccggttcctggagagcaaccccgtgatgatcgatgccaaggaagtgagcgccgcccaccgggccagatacttctggggcaatctgcctggcatgaacagacccctggccagcaccgtgaacgacaagctggagctgcaggagtgcctggagcacggccggatcgccaagttcagcaaggtgagaaccatcaccacccgaagcaacagcatcaaacaaggcaaggaccagcactttcctgtgttcatgaacgagaaggaggacatcctgtggtgtaccgagatggagagagtgttcgggttcccagtccactacacagatgtcagcaacatgtctagactggccagacagagactgctgggaagaagctggtccgtccctgtgatcagacacctgttcgcccctctgaaggagtacttcgcctgcgtgagcagcggcaacagcaacgccaacagccggggccccagcttctctagcggcctggtgccactgtccctgagagggagccacatgggccccatggagatctacaaaaccgtgagcgcctggaagcggcagcctgtgcgcgtgctgagcctgtttcggaatatcgataaagtcctgaaaagcctgggattcctggagagcggctctggctccggcggtggcaccctgaagtacgtggaggatgtgacaaacgtggtcagacgggatgtggagaagtggggccccttcgatctggtgtacggcagcacccaacccctgggcagctcttgtgaccggtgccctggctggtacatgtttcagttccaccggatcctgcagtacgccctgccgagacaggagtcccagcggccattcttttggattttcatggacaacttgctgctgaccgaggatgaccaggaaactaccactcggttcctgcagaccgaagccgtgaccctgcaggacgtgagaggccgggactaccagaacgccatgcgggtgtggtccaacatccctggactgaaaagcaagcacgcacctctgacccctaaagaagaggagtacctgcaggcccaggtgcggagcagaagcaagctggacgcccctaaggtggatctgctggtgaagaattgcctcctgcccctgagagagtacttcaagtatttcagccagaatagtctgcccctgggaggcagcggcggcggcgccctggtgacatttgaggacgtcgccgtgcggttcacccaggaggaatgggctctgctggatccttctcagaaaatcctgtaccgggacgtgatgagagagacataccggaatctgacctccgtgggcatcaactgggaatgttgggaccttgaagcctgcttcagaagcctgggaagaaacctgagagtgcaggtggtgaagagaaagtgcgagctgaccaacagcggcccctgcgccgagggcggcccaagcagcggcgcccctcctcccagcggcggcagcccagccggctccccaacctctaccgaggagggcacctctgagtccgccacccccgagagcggccctggcacctccaccgagcccagcgagggcagcgcacccggcagccctgccggcagccccacctccacagaggagggaaccagcaccgagcccagcgaaggcagcgccccaggcaccagcaccgagcctagtgagcaggagattaaacggatcaacaagatcagaagaagacttgtgaaagacagcaacaccaagaaggccggcaagacaggccccatgaaaaccctgctggttagagtgatgacacccgatctgagagagcggctggaaaacctgagaaagaagcctgaaaatatcccccagcccatcagcaatacatctagagccaacctgaataagctgctgaccgattacaccgaaatgaagaaggcgatcctgcatgtgtactgggaagagttccagaaggaccctgtgggcctgatgagccgggtggcccagcctgccagcaagaagatcgatcagaacaagctgaaacctgagatggacgagaagggcaacctgaccaccgccggctttgcctgctctcagtgtggccagcccctgttcgtgtacaagctggagcaggtgtctgagaagggcaaggcttacaccaactacttcggacggtgcaatgtggccgagcacgaaaagctgatcctgctggcccagctgaagcccgagaaggatagcgacgaagccgtgacatatagcctgggaaagtttgggcagagggccctggatttctacagcattcatgtgaccaaggagtccacccaccccgtgaagcccctggcccagatcgccggaaacagatacgcctccggacctgtgggaaaggccctgagcgacgcatgtatgggcacaatcgcctccttcctgtctaagtaccaggacatcatcatcgaacaccagaaggtggtgaagggcaaccagaagagactggagagcctgcgggagctggccggcaaggaaaacctggaataccctagcgtgaccctgccacctcagcctcacaccaaggagggcgttgatgcctacaacgaagtgatcgcccgggtgcgaatgtgggtgaacctgaacctgtggcagaagctgaagctaagcagagatgatgccaagcctctgctgagactgaagggattcccttcctttcctctggtcgagagacaggccaacgaagtggactggtgggacatggtgtgtaacgtgaagaagctgatcaacgagaaaaaggaggatggcaaggtgttttggcagaatctggctggctacaagagacaggaagccctgagaccatacctgagcagcgaggaagatcggaagaagggaaagaaattcgctcggtaccagctgggcgacctgctgctgcacctggaaaagaagcacggcgaggactggggaaaggtgtacgacgaggcctgggagcggattgacaagaaagtggaaggcctgagcaagcacatcaagctggaagaggaacggagaagcgaggacgcccagagcaaggccgccctgaccgactggctgcgggctaaggccagcttcgtgatcgagggcctgaaggaggccgacaaggacgagttctgcagatgcgagctgaagctgcagaagtggtacggggacctgcggggaaagcccttcgccatcgaagccgagaacagcatcctggacatcagcggcttcagcaagcagtacaactgtgccttcatctggcagaaggacggcgtgaagaagctgaacctgtacctgatcatcaactacttcaagggcggcaagctgcggttcaagaagatcaaacctgaagccttcgaagccaacagattctacaccgtgatcaacaaaaagagcggcgagatcgtgcccatggaggtgaacttcaacttcgacgaccccaacctgatcatcctgcctctggcctttggcaagagacagggcagagaattcatctggaacgacctgctgtccctggaaaccggcagcctgaagctggccaacggaagagtgatcgagaagacactgtacaacagaagaacccggcaggatgagcctgccctgttcgtggccctgaccttcgagcggcgggaggtcctggactcctccaatatcaaaccaatgaacctgatcggcgtggcaagaggcgaaaacatccccgccgtgatcgccctgaccgaccccgagggctgcccactgagccggtttaaggatagcctgggaaacccaacccacatcctgagaatcggcgagagctataaggagaagcagcggaccatccaggccaagaaggaggtggagcagcggagagccggcggctacagccggaagtacgccagcaaagccaagaatctggcagacgatatggtgagaaacaccgctagagatctgctgtactacgccgtgacccaggatgccatgctgatcttcgccaacctgagccggggcttcggccggcagggcaagcggaccttcatggccgagagacagtacacacggatggaggactggctgaccgccaagctggcctacgagggcctgagcaagacctacctgtccaagacactggcccagtacacctccaagacatgcagcaactgtgggtttaccatcaccagcgccgactacgacagggtgctggagaagctgaagaagacagcaacaggctggatgaccacaattaacggcaaggagctgaaggtggagggccagattacctactacaacagatacaagagacagaacgtagtcaaggacctgtccgtcgagctggatagactgagcgaagaatctgtgaacaacgacatctcctcctggacaaagggcagaagcggagaagctctgagcctcctgaagaaaagattctcccatagacccgtgcaggagaagttcgtgtgcctgaactgcggcttcgagacacacgcagccgagcaagccgccctgaacatcgccagatcctggctgttcctgcggagccaggagtacaagaaataccagacaaacaagacaaccggcaacaccgataagagagccttcgtcgagacctggcagtccttttaccggaagaagcttaaggaggtgtggaaacctgccgtgcggtctggcggatctggcggaggctccctgcaggagctgctgagcttcgaggacctgagcgtggacttcacccagaaggagtggcagctgctgaacccctaccagaagaacctgtacaaggacgtgatgctggagaactacagcagcctggtgagcctgggctacgaggtgatcaagcccgacgtgatcttcaagctggagcagggcgaggagccctggatcagggacgccgagatgcccagcagccccagcctggaggtgtggcaggtgggcggcccaagcagcggcgcccctcctcccagcggcggcagcccagccggctccccaacctctaccgaggagggcacctctgagtccgccacccccgagagcggccctggcacctccaccgagcccagcgagggcagcgcacccggcagccctgccggcagccccacctccacagaggagggaaccagcaccgagcccagcgaaggcagcgccccaggcaccagcaccgagcctagtgagcaggagattaaacggatcaacaagatcagaagaagacttgtgaaagacagcaacaccaagaaggccggcaagacaggccccatgaaaaccctgctggttagagtgatgacacccgatctgagagagcggctggaaaacctgagaaagaagcctgaaaatatcccccagcccatcagcaatacatctagagccaacctgaataagctgctgaccgattacaccgaaatgaagaaggcgatcctgcatgtgtactgggaagagttccagaaggaccctgtgggcctgatgagccgggtggcccagcctgccagcaagaagatcgatcagaacaagctgaaacctgagatggacgagaagggcaacctgaccaccgccggctttgcctgctctcagtgtggccagcccctgttcgtgtacaagctggagcaggtgtctgagaagggcaaggcttacaccaactacttcggacggtgcaatgtggccgagcacgaaaagctgatcctgctggcccagctgaagcccgagaaggatagcgacgaagccgtgacatatagcctgggaaagtttgggcagagggccctggatttctacagcattcatgtgaccaaggagtccacccaccccgtgaagcccctggcccagatcgccggaaacagatacgcctccggacctgtgggaaaggccctgagcgacgcatgtatgggcacaatcgcctccttcctgtctaagtaccaggacatcatcatcgaacaccagaaggtggtgaagggcaaccagaagagactggagagcctgcgggagctggccggcaaggaaaacctggaataccctagcgtgaccctgccacctcagcctcacaccaaggagggcgttgatgcctacaacgaagtgatcgcccgggtgcgaatgtgggtgaacctgaacctgtggcagaagctgaagctaagcagagatgatgccaagcctctgctgagactgaagggattcccttcctttcctctggtcgagagacaggccaacgaagtggactggtgggacatggtgtgtaacgtgaagaagctgatcaacgagaaaaaggaggatggcaaggtgttttggcagaatctggctggctacaagagacaggaagccctgagaccatacctgagcagcgaggaagatcggaagaagggaaagaaattcgctcggtaccagctgggcgacctgctgctgcacctggaaaagaagcacggcgaggactggggaaaggtgtacgacgaggcctgggagcggattgacaagaaagtggaaggcctgagcaagcacatcaagctggaagaggaacggagaagcgaggacgcccagagcaaggccgccctgaccgactggctgcgggctaaggccagcttcgtgatcgagggcctgaaggaggccgacaaggacgagttctgcagatgcgagctgaagctgcagaagtggtacggggacctgcggggaaagcccttcgccatcgaagccgagaacagcatcctggacatcagcggcttcagcaagcagtacaactgtgccttcatctggcagaaggacggcgtgaagaagctgaacctgtacctgatcatcaactacttcaagggcggcaagctgcggttcaagaagatcaaacctgaagccttcgaagccaacagattctacaccgtgatcaacaaaaagagcggcgagatcgtgcccatggaggtgaacttcaacttcgacgaccccaacctgatcatcctgcctctggcctttggcaagagacagggcagagaattcatctggaacgacctgctgtccctggaaaccggcagcctgaagctggccaacggaagagtgatcgagaagacactgtacaacagaagaacccggcaggatgagcctgccctgttcgtggccctgaccttcgagcggcgggaggtcctggactcctccaatatcaaaccaatgaacctgatcggcgtggcaagaggcgaaaacatccccgccgtgatcgccctgaccgaccccgagggctgcccactgagccggtttaaggatagcctgggaaacccaacccacatcctgagaatcggcgagagctataaggagaagcagcggaccatccaggccaagaaggaggtggagcagcggagagccggcggctacagccggaagtacgccagcaaagccaagaatctggcagacgatatggtgagaaacaccgctagagatctgctgtactacgccgtgacccaggatgccatgctgatcttcgccaacctgagccggggcttcggccggcagggcaagcggaccttcatggccgagagacagtacacacggatggaggactggctgaccgccaagctggcctacgagggcctgagcaagacctacctgtccaagacactggcccagtacacctccaagacatgcagcaactgtgggtttaccatcaccagcgccgactacgacagggtgctggagaagctgaagaagacagcaacaggctggatgaccacaattaacggcaaggagctgaaggtggagggccagattacctactacaacagatacaagagacagaacgtagtcaaggacctgtccgtcgagctggatagactgagcgaagaatctgtgaacaacgacatctcctcctggacaaagggcagaagcggagaagctctgagcctcctgaagaaaagattctcccatagacccgtgcaggagaagttcgtgtgcctgaactgcggcttcgagacacacgcagccgagcaagccgccctgaacatcgccagatcctggctgttcctgcggagccaggagtacaagaaataccagacaaacaagacaaccggcaacaccgataagagagccttcgtcgagacctggcagtccttttaccggaagaagcttaaggaggtgtggaaacctgccgtgcggtctggcggatctggcggaggctcctctgcaggagctgctgagcttcgaggacctgagcgtggacttcacccagaaggagtggcagctgctgaacccctaccagaagaacctgtacaaggacgtgatgctggagaactacagcagcctggtgagcctgggctacgaggtgatcaagcccgacgtgatcttcaagctggagcagggcgaggagccctggatcagggacgccgagatgcccagcagccccagcctggaggtgtggcaggtgggatctggctccggcagcggccccaagaaaaagagaaaagtctaagctgccttctgcggggcttgccttctggccatgcccttcttctctcccttgcacctgtacctcttggtctttgaataaagcctgagtaggaaggctagcaaaaaaaaaaaaaaaaaaaaaaaaaaaaaaaaaaaaaaaaaaaaaaaaaaaaaaaaaaaaaaaaaaaaaaaaaaaaaaaa

SEQ ID NO: 15909 - RNA, 9485 nt, synthetic construct
  source 1..9485: mol_type = other RNA
aggaaataagagagaaaagaagagtaagaagaaatataagagccaccatggcccctaagaagaagcgtaaagtgagccggatggaacgcctcgtctacgaggtgcggcagaagtgcagaaacatcgaggacatctgcatctcctgcggatctctgaacgtgaccctggagcacccactgttcatcggcggcatgtgccagaactgtaaaaactgttttctggagtgtgcctatcaatacgacgatgacggctaccagagctactgcaccatctgttgcggcggaagagaggtgctgatgtgtggaaataacaactgctgccggtgcttctgcgtggaatgcgtggacctgctggtgggccccggcgccgcccaggccgctattaaggaagatccttggaactgctacatgtgcggccacaagggcacatacggcctgctgagacggagagaggactggcctagcagactgcagatgttcttcgccaataaccacgaccaggagttcgacccccctaaggtgtaccctcccgtccccgccgagaagagaaagcccatccgggtcctgagcctgttcgatggcatcgccaccggtctgctggtgctgaaggacctgggcatccaggtggataggtacattgcctccgaggtgtgcgaggactccatcaccgtgggaatggtgcgtcatcagggcaagatcatgtacgtgggcgacgtgcggagcgtgacacagaagcatatccaggagtggggccctttcgacctggtgatcggcggcagcccttgcaatgacctgagcatcgtgaacccagcccggaagggcctgtacgagggaaccggcagactgttcttcgagttttacagactgctgcacgacgcccggcctaaggaaggcgacgaccggcccttcttttggctgttcgagaatgtggtggccatgggagtcagcgacaagcgggatattagccggttcctggagagcaaccccgtgatgatcgatgccaaggaagtgagcgccgcccaccgggccagatacttctggggcaatctgcctggcatgaacagacccctggccagcaccgtgaacgacaagctggagctgcaggagtgcctggagcacggccggatcgccaagttcagcaaggtgagaaccatcaccacccgaagcaacagcatcaaacaaggcaaggaccagcactttcctgtgttcatgaacgagaaggaggacatcctgtggtgtaccgagatggagagagtgttcgggttcccagtccactacacagatgtcagcaacatgtctagactggccagacagagactgctgggaagaagctggtccgtccctgtgatcagacacctgttcgcccctctgaaggagtacttcgcctgcgtgagcagcggcaacagcaacgccaacagccggggccccagcttctctagcggcctggtgccactgtccctgagagggagccacatgggccccatggagatctacaaaaccgtgagcgcctggaagcggcagcctgtgcgcgtgctgagcctgtttcggaatatcgataaagtcctgaaaagcctgggattcctggagagcggctctggctccggcggtggcaccctgaagtacgtggaggatgtgacaaacgtggtcagacgggatgtggagaagtggggccccttcgatctggtgtacggcagcacccaacccctgggcagctcttgtgaccggtgccctggctggtacatgtttcagttccaccggatcctgcagtacgccctgccgagacaggagtcccagcggccattcttttggattttcatggacaacttgctgctgaccgaggatgaccaggaaactaccactcggttcctgcagaccgaagccgtgaccctgcaggacgtgagaggccgggactaccagaacgccatgcgggtgtggtccaacatccctggactgaaaagcaagcacgcacctctgacccctaaagaagaggagtacctgcaggcccaggtgcggagcagaagcaagctggacgcccctaaggtggatctgctggtgaagaattgcctcctgcccctgagagagtacttcaagtatttcagccagaatagtctgcccctgggaggcagcggcggcggcgccctggtgacatttgaggacgtcgccgtgcggttcacccaggaggaatgggctctgctggatccttctcagaaaatcctgtaccgggacgtgatgagagagacataccggaatctgacctccgtgggcatcaactgggaatgttgggaccttgaagcctgcttcagaagcctgggaagaaacctgagagtgcaggtggtgaagagaaagtgcgagctgaccaacagcggcccctgcgccgagggcggcccaagcagcggcgcccctcctcccagcggcggcagcccagccggctccccaacctctaccgaggagggcacctctgagtccgccacccccgagagcggccctggcacctccaccgagcccagcgagggcagcgcacccggcagccctgccggcagccccacctccacagaggagggaaccagcaccgagcccagcgaaggcagcgccccaggcaccagcaccgagcctagtgagcaggagattaaacggatcaacaagatcagaagaagacttgtgaaagacagcaacaccaagaaggccggcaagacaggccccatgaaaaccctgctggttagagtgatgacacccgatctgagagagcggctggaaaacctgagaaagaagcctgaaaatatcccccagcccatcagcaatacatctagagccaacctgaataagctgctgaccgattacaccgaaatgaagaaggcgatcctgcatgtgtactgggaagagttccagaaggaccctgtgggcctgatgagccgggtggcccagcctgccagcaagaagatcgatcagaacaagctgaaacctgagatggacgagaagggcaacctgaccaccgccggctttgcctgctctcagtgtggccagcccctgttcgtgtacaagctggagcaggtgtctgagaagggcaaggcttacaccaactacttcggacggtgcaatgtggccgagcacgaaaagctgatcctgctggcccagctgaagcccgagaaggatagcgacgaagccgtgacatatagcctgggaaagtttgggcagagggccctggatttctacagcattcatgtgaccaaggagtccacccaccccgtgaagcccctggcccagatcgccggaaacagatacgcctccggacctgtgggaaaggccctgagcgacgcatgtatgggcacaatcgcctccttcctgtctaagtaccaggacatcatcatcgaacaccagaaggtggtgaagggcaaccagaagagactggagagcctgcgggagctggccggcaaggaaaacctggaataccctagcgtgaccctgccacctcagcctcacaccaaggagggcgttgatgcctacaacgaagtgatcgcccgggtgcgaatgtgggtgaacctgaacctgtggcagaagctgaagctaagcagagatgatgccaagcctctgctgagactgaagggattcccttcctttcctctggtcgagagacaggccaacgaagtggactggtgggacatggtgtgtaacgtgaagaagctgatcaacgagaaaaaggaggatggcaaggtgttttggcagaatctggctggctacaagagacaggaagccctgagaccatacctgagcagcgaggaagatcggaagaagggaaagaaattcgctcggtaccagctgggcgacctgctgctgcacctggaaaagaagcacggcgaggactggggaaaggtgtacgacgaggcctgggagcggattgacaagaaagtggaaggcctgagcaagcacatcaagctggaagaggaacggagaagcgaggacgcccagagcaaggccgccctgaccgactggctgcgggctaaggccagcttcgtgatcgagggcctgaaggaggccgacaaggacgagttctgcagatgcgagctgaagctgcagaagtggtacggggacctgcggggaaagcccttcgccatcgaagccgagaacagcatcctggacatcagcggcttcagcaagcagtacaactgtgccttcatctggcagaaggacggcgtgaagaagctgaacctgtacctgatcatcaactacttcaagggcggcaagctgcggttcaagaagatcaaacctgaagccttcgaagccaacagattctacaccgtgatcaacaaaaagagcggcgagatcgtgcccatggaggtgaacttcaacttcgacgaccccaacctgatcatcctgcctctggcctttggcaagagacagggcagagaattcatctggaacgacctgctgtccctggaaaccggcagcctgaagctggccaacggaagagtgatcgagaagacactgtacaacagaagaacccggcaggatgagcctgccctgttcgtggccctgaccttcgagcggcgggaggtcctggactcctccaatatcaaaccaatgaacctgatcggcgtggcaagaggcgaaaacatccccgccgtgatcgccctgaccgaccccgagggctgcccactgagccggtttaaggatagcctgggaaacccaacccacatcctgagaatcggcgagagctataaggagaagcagcggaccatccaggccaagaaggaggtggagcagcggagagccggcggctacagccggaagtacgccagcaaagccaagaatctggcagacgatatggtgagaaacaccgctagagatctgctgtactacgccgtgacccaggatgccatgctgatcttcgccaacctgagccggggcttcggccggcagggcaagcggaccttcatggccgagagacagtacacacggatggaggactggctgaccgccaagctggcctacgagggcctgagcaagacctacctgtccaagacactggcccagtacacctccaagacatgcagcaactgtgggtttaccatcaccagcgccgactacgacagggtgctggagaagctgaagaagacagcaacaggctggatgaccacaattaacggcaaggagctgaaggtggagggccagattacctactacaacagatacaagagacagaacgtagtcaaggacctgtccgtcgagctggatagactgagcgaagaatctgtgaacaacgacatctcctcctggacaaagggcagaagcggagaagctctgagcctcctgaagaaaagattctcccatagacccgtgcaggagaagttcgtgtgcctgaactgcggcttcgagacacacgcagccgagcaagccgccctgaacatcgccagatcctggctgttcctgcggagccaggagtacaagaaataccagacaaacaagacaaccggcaacaccgataagagagccttcgtcgagacctggcagtccttttaccggaagaagcttaaggaggtgtggaaacctgccgtgcggtctggcggatctggcggaggctcccaggccgccgtgaccttcgaggacgtggccgtgctgctgagcagggaggagtggtgcaggctggcccccgcccagagggacctgtacagggacgtgatgctggagacctacaggaacctgatcagcctgggcaccggcctgaccggccccaagcccggcgtgatcagccagctggagaggggccacgagccctgggtgctggacgtgcagagcaccaagggcagggtggacggcagcgactgcggcggcccaagcagcggcgcccctcctcccagcggcggcagcccagccggctccccaacctctaccgaggagggcacctctgagtccgccacccccgagagcggccctggcacctccaccgagcccagcgagggcagcgcacccggcagccctgccggcagccccacctccacagaggagggaaccagcaccgagcccagcgaaggcagcgccccaggcaccagcaccgagcctagtgagcaggagattaaacggatcaacaagatcagaagaagacttgtgaaagacagcaacaccaagaaggccggcaagacaggccccatgaaaaccctgctggttagagtgatgacacccgatctgagagagcggctggaaaacctgagaaagaagcctgaaaatatcccccagcccatcagcaatacatctagagccaacctgaataagctgctgaccgattacaccgaaatgaagaaggcgatcctgcatgtgtactgggaagagttccagaaggaccctgtgggcctgatgagccgggtggcccagcctgccagcaagaagatcgatcagaacaagctgaaacctgagatggacgagaagggcaacctgaccaccgccggctttgcctgctctcagtgtggccagcccctgttcgtgtacaagctggagcaggtgtctgagaagggcaaggcttacaccaactacttcggacggtgcaatgtggccgagcacgaaaagctgatcctgctggcccagctgaagcccgagaaggatagcgacgaagccgtgacatatagcctgggaaagtttgggcagagggccctggatttctacagcattcatgtgaccaaggagtccacccaccccgtgaagcccctggcccagatcgccggaaacagatacgcctccggacctgtgggaaaggccctgagcgacgcatgtatgggcacaatcgcctccttcctgtctaagtaccaggacatcatcatcgaacaccagaaggtggtgaagggcaaccagaagagactggagagcctgcgggagctggccggcaaggaaaacctggaataccctagcgtgaccctgccacctcagcctcacaccaaggagggcgttgatgcctacaacgaagtgatcgcccgggtgcgaatgtgggtgaacctgaacctgtggcagaagctgaagctaagcagagatgatgccaagcctctgctgagactgaagggattcccttcctttcctctggtcgagagacaggccaacgaagtggactggtgggacatggtgtgtaacgtgaagaagctgatcaacgagaaaaaggaggatggcaaggtgttttggcagaatctggctggctacaagagacaggaagccctgagaccatacctgagcagcgaggaagatcggaagaagggaaagaaattcgctcggtaccagctgggcgacctgctgctgcacctggaaaagaagcacggcgaggactggggaaaggtgtacgacgaggcctgggagcggattgacaagaaagtggaaggcctgagcaagcacatcaagctggaagaggaacggagaagcgaggacgcccagagcaaggccgccctgaccgactggctgcgggctaaggccagcttcgtgatcgagggcctgaaggaggccgacaaggacgagttctgcagatgcgagctgaagctgcagaagtggtacggggacctgcggggaaagcccttcgccatcgaagccgagaacagcatcctggacatcagcggcttcagcaagcagtacaactgtgccttcatctggcagaaggacggcgtgaagaagctgaacctgtacctgatcatcaactacttcaagggcggcaagctgcggttcaagaagatcaaacctgaagccttcgaagccaacagattctacaccgtgatcaacaaaaagagcggcgagatcgtgcccatggaggtgaacttcaacttcgacgaccccaacctgatcatcctgcctctggcctttggcaagagacagggcagagaattcatctggaacgacctgctgtccctggaaaccggcagcctgaagctggccaacggaagagtgatcgagaagacactgtacaacagaagaacccggcaggatgagcctgccctgttcgtggccctgaccttcgagcggcgggaggtcctggactcctccaatatcaaaccaatgaacctgatcggcgtggcaagaggcgaaaacatccccgccgtgatcgccctgaccgaccccgagggctgcccactgagccggtttaaggatagcctgggaaacccaacccacatcctgagaatcggcgagagctataaggagaagcagcggaccatccaggccaagaaggaggtggagcagcggagagccggcggctacagccggaagtacgccagcaaagccaagaatctggcagacgatatggtgagaaacaccgctagagatctgctgtactacgccgtgacccaggatgccatgctgatcttcgccaacctgagccggggcttcggccggcagggcaagcggaccttcatggccgagagacagtacacacggatggaggactggctgaccgccaagctggcctacgagggcctgagcaagacctacctgtccaagacactggcccagtacacctccaagacatgcagcaactgtgggtttaccatcaccagcgccgactacgacagggtgctggagaagctgaagaagacagcaacaggctggatgaccacaattaacggcaaggagctgaaggtggagggccagattacctactacaacagatacaagagacagaacgtagtcaaggacctgtccgtcgagctggatagactgagcgaagaatctgtgaacaacgacatctcctcctggacaaagggcagaagcggagaagctctgagcctcctgaagaaaagattctcccatagacccgtgcaggagaagttcgtgtgcctgaactgcggcttcgagacacacgcagccgagcaagccgccctgaacatcgccagatcctggctgttcctgcggagccaggagtacaagaaataccagacaaacaagacaaccggcaacaccgataagagagccttcgtcgagacctggcagtccttttaccggaagaagcttaaggaggtgtggaaacctgccgtgcggtctggcggatctggcggaggctcctcaggccgccgtgaccttcgaggacgtggccgtgctgctgagcagggaggagtggtgcaggctggcccccgcccagagggacctgtacagggacgtgatgctggagacctacaggaacctgatcagcctgggcaccggcctgaccggccccaagcccggcgtgatcagccagctggagaggggccacgagccctgggtgctggacgtgcagagcaccaagggcagggtggacggcagcgactgcggatctggctccggcagcggccccaagaaaaagagaaaagtctaagctgccttctgcggggcttgccttctggccatgcccttcttctctcccttgcacctgtacctcttggtctttgaataaagcctgagtaggaaggctagcaaaaaaaaaaaaaaaaaaaaaaaaaaaaaaaaaaaaaaaaaaaaaaaaaaaaaaaaaaaaaaaaaaaaaaaaaaaaaaaa

SEQ ID NO: 15910 - RNA, 9485 nt, synthetic construct
  source 1..9485: mol_type = other RNA
aggaaataagagagaaaagaagagtaagaagaaatataagagccaccatggcccctaagaagaagcgtaaagtgagccggatggaacgcctcgtctacgaggtgcggcagaagtgcagaaacatcgaggacatctgcatctcctgcggatctctgaacgtgaccctggagcacccactgttcatcggcggcatgtgccagaactgtaaaaactgttttctggagtgtgcctatcaatacgacgatgacggctaccagagctactgcaccatctgttgcggcggaagagaggtgctgatgtgtggaaataacaactgctgccggtgcttctgcgtggaatgcgtggacctgctggtgggccccggcgccgcccaggccgctattaaggaagatccttggaactgctacatgtgcggccacaagggcacatacggcctgctgagacggagagaggactggcctagcagactgcagatgttcttcgccaataaccacgaccaggagttcgacccccctaaggtgtaccctcccgtccccgccgagaagagaaagcccatccgggtcctgagcctgttcgatggcatcgccaccggtctgctggtgctgaaggacctgggcatccaggtggataggtacattgcctccgaggtgtgcgaggactccatcaccgtgggaatggtgcgtcatcagggcaagatcatgtacgtgggcgacgtgcggagcgtgacacagaagcatatccaggagtggggccctttcgacctggtgatcggcggcagcccttgcaatgacctgagcatcgtgaacccagcccggaagggcctgtacgagggaaccggcagactgttcttcgagttttacagactgctgcacgacgcccggcctaaggaaggcgacgaccggcccttcttttggctgttcgagaatgtggtggccatgggagtcagcgacaagcgggatattagccggttcctggagagcaaccccgtgatgatcgatgccaaggaagtgagcgccgcccaccgggccagatacttctggggcaatctgcctggcatgaacagacccctggccagcaccgtgaacgacaagctggagctgcaggagtgcctggagcacggccggatcgccaagttcagcaaggtgagaaccatcaccacccgaagcaacagcatcaaacaaggcaaggaccagcactttcctgtgttcatgaacgagaaggaggacatcctgtggtgtaccgagatggagagagtgttcgggttcccagtccactacacagatgtcagcaacatgtctagactggccagacagagactgctgggaagaagctggtccgtccctgtgatcagacacctgttcgcccctctgaaggagtacttcgcctgcgtgagcagcggcaacagcaacgccaacagccggggccccagcttctctagcggcctggtgccactgtccctgagagggagccacatgggccccatggagatctacaaaaccgtgagcgcctggaagcggcagcctgtgcgcgtgctgagcctgtttcggaatatcgataaagtcctgaaaagcctgggattcctggagagcggctctggctccggcggtggcaccctgaagtacgtggaggatgtgacaaacgtggtcagacgggatgtggagaagtggggccccttcgatctggtgtacggcagcacccaacccctgggcagctcttgtgaccggtgccctggctggtacatgtttcagttccaccggatcctgcagtacgccctgccgagacaggagtcccagcggccattcttttggattttcatggacaacttgctgctgaccgaggatgaccaggaaactaccactcggttcctgcagaccgaagccgtgaccctgcaggacgtgagaggccgggactaccagaacgccatgcgggtgtggtccaacatccctggactgaaaagcaagcacgcacctctgacccctaaagaagaggagtacctgcaggcccaggtgcggagcagaagcaagctggacgcccctaaggtggatctgctggtgaagaattgcctcctgcccctgagagagtacttcaagtatttcagccagaatagtctgcccctgggaggcagcggcggcggcgccctggtgacatttgaggacgtcgccgtgcggttcacccaggaggaatgggctctgctggatccttctcagaaaatcctgtaccgggacgtgatgagagagacataccggaatctgacctccgtgggcatcaactgggaatgttgggaccttgaagcctgcttcagaagcctgggaagaaacctgagagtgcaggtggtgaagagaaagtgcgagctgaccaacagcggcccctgcgccgagggcggcccaagcagcggcgcccctcctcccagcggcggcagcccagccggctccccaacctctaccgaggagggcacctctgagtccgccacccccgagagcggccctggcacctccaccgagcccagcgagggcagcgcacccggcagccctgccggcagccccacctccacagaggagggaaccagcaccgagcccagcgaaggcagcgccccaggcaccagcaccgagcctagtgagcaggagattaaacggatcaacaagatcagaagaagacttgtgaaagacagcaacaccaagaaggccggcaagacaggccccatgaaaaccctgctggttagagtgatgacacccgatctgagagagcggctggaaaacctgagaaagaagcctgaaaatatcccccagcccatcagcaatacatctagagccaacctgaataagctgctgaccgattacaccgaaatgaagaaggcgatcctgcatgtgtactgggaagagttccagaaggaccctgtgggcctgatgagccgggtggcccagcctgccagcaagaagatcgatcagaacaagctgaaacctgagatggacgagaagggcaacctgaccaccgccggctttgcctgctctcagtgtggccagcccctgttcgtgtacaagctggagcaggtgtctgagaagggcaaggcttacaccaactacttcggacggtgcaatgtggccgagcacgaaaagctgatcctgctggcccagctgaagcccgagaaggatagcgacgaagccgtgacatatagcctgggaaagtttgggcagagggccctggatttctacagcattcatgtgaccaaggagtccacccaccccgtgaagcccctggcccagatcgccggaaacagatacgcctccggacctgtgggaaaggccctgagcgacgcatgtatgggcacaatcgcctccttcctgtctaagtaccaggacatcatcatcgaacaccagaaggtggtgaagggcaaccagaagagactggagagcctgcgggagctggccggcaaggaaaacctggaataccctagcgtgaccctgccacctcagcctcacaccaaggagggcgttgatgcctacaacgaagtgatcgcccgggtgcgaatgtgggtgaacctgaacctgtggcagaagctgaagctaagcagagatgatgccaagcctctgctgagactgaagggattcccttcctttcctctggtcgagagacaggccaacgaagtggactggtgggacatggtgtgtaacgtgaagaagctgatcaacgagaaaaaggaggatggcaaggtgttttggcagaatctggctggctacaagagacaggaagccctgagaccatacctgagcagcgaggaagatcggaagaagggaaagaaattcgctcggtaccagctgggcgacctgctgctgcacctggaaaagaagcacggcgaggactggggaaaggtgtacgacgaggcctgggagcggattgacaagaaagtggaaggcctgagcaagcacatcaagctggaagaggaacggagaagcgaggacgcccagagcaaggccgccctgaccgactggctgcgggctaaggccagcttcgtgatcgagggcctgaaggaggccgacaaggacgagttctgcagatgcgagctgaagctgcagaagtggtacggggacctgcggggaaagcccttcgccatcgaagccgagaacagcatcctggacatcagcggcttcagcaagcagtacaactgtgccttcatctggcagaaggacggcgtgaagaagctgaacctgtacctgatcatcaactacttcaagggcggcaagctgcggttcaagaagatcaaacctgaagccttcgaagccaacagattctacaccgtgatcaacaaaaagagcggcgagatcgtgcccatggaggtgaacttcaacttcgacgaccccaacctgatcatcctgcctctggcctttggcaagagacagggcagagaattcatctggaacgacctgctgtccctggaaaccggcagcctgaagctggccaacggaagagtgatcgagaagacactgtacaacagaagaacccggcaggatgagcctgccctgttcgtggccctgaccttcgagcggcgggaggtcctggactcctccaatatcaaaccaatgaacctgatcggcgtggcaagaggcgaaaacatccccgccgtgatcgccctgaccgaccccgagggctgcccactgagccggtttaaggatagcctgggaaacccaacccacatcctgagaatcggcgagagctataaggagaagcagcggaccatccaggccaagaaggaggtggagcagcggagagccggcggctacagccggaagtacgccagcaaagccaagaatctggcagacgatatggtgagaaacaccgctagagatctgctgtactacgccgtgacccaggatgccatgctgatcttcgccaacctgagccggggcttcggccggcagggcaagcggaccttcatggccgagagacagtacacacggatggaggactggctgaccgccaagctggcctacgagggcctgagcaagacctacctgtccaagacactggcccagtacacctccaagacatgcagcaactgtgggtttaccatcaccagcgccgactacgacagggtgctggagaagctgaagaagacagcaacaggctggatgaccacaattaacggcaaggagctgaaggtggagggccagattacctactacaacagatacaagagacagaacgtagtcaaggacctgtccgtcgagctggatagactgagcgaagaatctgtgaacaacgacatctcctcctggacaaagggcagaagcggagaagctctgagcctcctgaagaaaagattctcccatagacccgtgcaggagaagttcgtgtgcctgaactgcggcttcgagacacacgcagccgagcaagccgccctgaacatcgccagatcctggctgttcctgcggagccaggagtacaagaaataccagacaaacaagacaaccggcaacaccgataagagagccttcgtcgagacctggcagtccttttaccggaagaagcttaaggaggtgtggaaacctgccgtgcggtctggcggatctggcggaggctccagccaggaggccgtgaccttcgaggacgtggccgtgaacttcagcaacgaggagtggcagtgcctgacccacgcccagaggcacctgtacaaggacgtgatgctggagaactacggcaacgtggtgagcctgggcttccccttccccaagccccccctgatcagccacctggagcaggaggccgagctgtgcgtgcaggacggccaggacagggagttcctgagctgcagccaccccgtgagcggcggcccaagcagcggcgcccctcctcccagcggcggcagcccagccggctccccaacctctaccgaggagggcacctctgagtccgccacccccgagagcggccctggcacctccaccgagcccagcgagggcagcgcacccggcagccctgccggcagccccacctccacagaggagggaaccagcaccgagcccagcgaaggcagcgccccaggcaccagcaccgagcctagtgagcaggagattaaacggatcaacaagatcagaagaagacttgtgaaagacagcaacaccaagaaggccggcaagacaggccccatgaaaaccctgctggttagagtgatgacacccgatctgagagagcggctggaaaacctgagaaagaagcctgaaaatatcccccagcccatcagcaatacatctagagccaacctgaataagctgctgaccgattacaccgaaatgaagaaggcgatcctgcatgtgtactgggaagagttccagaaggaccctgtgggcctgatgagccgggtggcccagcctgccagcaagaagatcgatcagaacaagctgaaacctgagatggacgagaagggcaacctgaccaccgccggctttgcctgctctcagtgtggccagcccctgttcgtgtacaagctggagcaggtgtctgagaagggcaaggcttacaccaactacttcggacggtgcaatgtggccgagcacgaaaagctgatcctgctggcccagctgaagcccgagaaggatagcgacgaagccgtgacatatagcctgggaaagtttgggcagagggccctggatttctacagcattcatgtgaccaaggagtccacccaccccgtgaagcccctggcccagatcgccggaaacagatacgcctccggacctgtgggaaaggccctgagcgacgcatgtatgggcacaatcgcctccttcctgtctaagtaccaggacatcatcatcgaacaccagaaggtggtgaagggcaaccagaagagactggagagcctgcgggagctggccggcaaggaaaacctggaataccctagcgtgaccctgccacctcagcctcacaccaaggagggcgttgatgcctacaacgaagtgatcgcccgggtgcgaatgtgggtgaacctgaacctgtggcagaagctgaagctaagcagagatgatgccaagcctctgctgagactgaagggattcccttcctttcctctggtcgagagacaggccaacgaagtggactggtgggacatggtgtgtaacgtgaagaagctgatcaacgagaaaaaggaggatggcaaggtgttttggcagaatctggctggctacaagagacaggaagccctgagaccatacctgagcagcgaggaagatcggaagaagggaaagaaattcgctcggtaccagctgggcgacctgctgctgcacctggaaaagaagcacggcgaggactggggaaaggtgtacgacgaggcctgggagcggattgacaagaaagtggaaggcctgagcaagcacatcaagctggaagaggaacggagaagcgaggacgcccagagcaaggccgccctgaccgactggctgcgggctaaggccagcttcgtgatcgagggcctgaaggaggccgacaaggacgagttctgcagatgcgagctgaagctgcagaagtggtacggggacctgcggggaaagcccttcgccatcgaagccgagaacagcatcctggacatcagcggcttcagcaagcagtacaactgtgccttcatctggcagaaggacggcgtgaagaagctgaacctgtacctgatcatcaactacttcaagggcggcaagctgcggttcaagaagatcaaacctgaagccttcgaagccaacagattctacaccgtgatcaacaaaaagagcggcgagatcgtgcccatggaggtgaacttcaacttcgacgaccccaacctgatcatcctgcctctggcctttggcaagagacagggcagagaattcatctggaacgacctgctgtccctggaaaccggcagcctgaagctggccaacggaagagtgatcgagaagacactgtacaacagaagaacccggcaggatgagcctgccctgttcgtggccctgaccttcgagcggcgggaggtcctggactcctccaatatcaaaccaatgaacctgatcggcgtggcaagaggcgaaaacatccccgccgtgatcgccctgaccgaccccgagggctgcccactgagccggtttaaggatagcctgggaaacccaacccacatcctgagaatcggcgagagctataaggagaagcagcggaccatccaggccaagaaggaggtggagcagcggagagccggcggctacagccggaagtacgccagcaaagccaagaatctggcagacgatatggtgagaaacaccgctagagatctgctgtactacgccgtgacccaggatgccatgctgatcttcgccaacctgagccggggcttcggccggcagggcaagcggaccttcatggccgagagacagtacacacggatggaggactggctgaccgccaagctggcctacgagggcctgagcaagacctacctgtccaagacactggcccagtacacctccaagacatgcagcaactgtgggtttaccatcaccagcgccgactacgacagggtgctggagaagctgaagaagacagcaacaggctggatgaccacaattaacggcaaggagctgaaggtggagggccagattacctactacaacagatacaagagacagaacgtagtcaaggacctgtccgtcgagctggatagactgagcgaagaatctgtgaacaacgacatctcctcctggacaaagggcagaagcggagaagctctgagcctcctgaagaaaagattctcccatagacccgtgcaggagaagttcgtgtgcctgaactgcggcttcgagacacacgcagccgagcaagccgccctgaacatcgccagatcctggctgttcctgcggagccaggagtacaagaaataccagacaaacaagacaaccggcaacaccgataagagagccttcgtcgagacctggcagtccttttaccggaagaagcttaaggaggtgtggaaacctgccgtgcggtctggcggatctggcggaggctcctagccaggaggccgtgaccttcgaggacgtggccgtgaacttcagcaacgaggagtggcagtgcctgacccacgcccagaggcacctgtacaaggacgtgatgctggagaactacggcaacgtggtgagcctgggcttccccttccccaagccccccctgatcagccacctggagcaggaggccgagctgtgcgtgcaggacggccaggacagggagttcctgagctgcagccaccccgtgagcggatctggctccggcagcggccccaagaaaaagagaaaagtctaagctgccttctgcggggcttgccttctggccatgcccttcttctctcccttgcacctgtacctcttggtctttgaataaagcctgagtaggaaggctagcaaaaaaaaaaaaaaaaaaaaaaaaaaaaaaaaaaaaaaaaaaaaaaaaaaaaaaaaaaaaaaaaaaaaaaaaaaaaaaaa

SEQ ID NO: 15911 - RNA, 9485 nt, synthetic construct
  source 1..9485: mol_type = other RNA
aggaaataagagagaaaagaagagtaagaagaaatataagagccaccatggcccctaagaagaagcgtaaagtgagccggatggaacgcctcgtctacgaggtgcggcagaagtgcagaaacatcgaggacatctgcatctcctgcggatctctgaacgtgaccctggagcacccactgttcatcggcggcatgtgccagaactgtaaaaactgttttctggagtgtgcctatcaatacgacgatgacggctaccagagctactgcaccatctgttgcggcggaagagaggtgctgatgtgtggaaataacaactgctgccggtgcttctgcgtggaatgcgtggacctgctggtgggccccggcgccgcccaggccgctattaaggaagatccttggaactgctacatgtgcggccacaagggcacatacggcctgctgagacggagagaggactggcctagcagactgcagatgttcttcgccaataaccacgaccaggagttcgacccccctaaggtgtaccctcccgtccccgccgagaagagaaagcccatccgggtcctgagcctgttcgatggcatcgccaccggtctgctggtgctgaaggacctgggcatccaggtggataggtacattgcctccgaggtgtgcgaggactccatcaccgtgggaatggtgcgtcatcagggcaagatcatgtacgtgggcgacgtgcggagcgtgacacagaagcatatccaggagtggggccctttcgacctggtgatcggcggcagcccttgcaatgacctgagcatcgtgaacccagcccggaagggcctgtacgagggaaccggcagactgttcttcgagttttacagactgctgcacgacgcccggcctaaggaaggcgacgaccggcccttcttttggctgttcgagaatgtggtggccatgggagtcagcgacaagcgggatattagccggttcctggagagcaaccccgtgatgatcgatgccaaggaagtgagcgccgcccaccgggccagatacttctggggcaatctgcctggcatgaacagacccctggccagcaccgtgaacgacaagctggagctgcaggagtgcctggagcacggccggatcgccaagttcagcaaggtgagaaccatcaccacccgaagcaacagcatcaaacaaggcaaggaccagcactttcctgtgttcatgaacgagaaggaggacatcctgtggtgtaccgagatggagagagtgttcgggttcccagtccactacacagatgtcagcaacatgtctagactggccagacagagactgctgggaagaagctggtccgtccctgtgatcagacacctgttcgcccctctgaaggagtacttcgcctgcgtgagcagcggcaacagcaacgccaacagccggggccccagcttctctagcggcctggtgccactgtccctgagagggagccacatgggccccatggagatctacaaaaccgtgagcgcctggaagcggcagcctgtgcgcgtgctgagcctgtttcggaatatcgataaagtcctgaaaagcctgggattcctggagagcggctctggctccggcggtggcaccctgaagtacgtggaggatgtgacaaacgtggtcagacgggatgtggagaagtggggccccttcgatctggtgtacggcagcacccaacccctgggcagctcttgtgaccggtgccctggctggtacatgtttcagttccaccggatcctgcagtacgccctgccgagacaggagtcccagcggccattcttttggattttcatggacaacttgctgctgaccgaggatgaccaggaaactaccactcggttcctgcagaccgaagccgtgaccctgcaggacgtgagaggccgggactaccagaacgccatgcgggtgtggtccaacatccctggactgaaaagcaagcacgcacctctgacccctaaagaagaggagtacctgcaggcccaggtgcggagcagaagcaagctggacgcccctaaggtggatctgctggtgaagaattgcctcctgcccctgagagagtacttcaagtatttcagccagaatagtctgcccctgggaggcagcggcggcggcgccctggtgacatttgaggacgtcgccgtgcggttcacccaggaggaatgggctctgctggatccttctcagaaaatcctgtaccgggacgtgatgagagagacataccggaatctgacctccgtgggcatcaactgggaatgttgggaccttgaagcctgcttcagaagcctgggaagaaacctgagagtgcaggtggtgaagagaaagtgcgagctgaccaacagcggcccctgcgccgagggcggcccaagcagcggcgcccctcctcccagcggcggcagcccagccggctccccaacctctaccgaggagggcacctctgagtccgccacccccgagagcggccctggcacctccaccgagcccagcgagggcagcgcacccggcagccctgccggcagccccacctccacagaggagggaaccagcaccgagcccagcgaaggcagcgccccaggcaccagcaccgagcctagtgagcaggagattaaacggatcaacaagatcagaagaagacttgtgaaagacagcaacaccaagaaggccggcaagacaggccccatgaaaaccctgctggttagagtgatgacacccgatctgagagagcggctggaaaacctgagaaagaagcctgaaaatatcccccagcccatcagcaatacatctagagccaacctgaataagctgctgaccgattacaccgaaatgaagaaggcgatcctgcatgtgtactgggaagagttccagaaggaccctgtgggcctgatgagccgggtggcccagcctgccagcaagaagatcgatcagaacaagctgaaacctgagatggacgagaagggcaacctgaccaccgccggctttgcctgctctcagtgtggccagcccctgttcgtgtacaagctggagcaggtgtctgagaagggcaaggcttacaccaactacttcggacggtgcaatgtggccgagcacgaaaagctgatcctgctggcccagctgaagcccgagaaggatagcgacgaagccgtgacatatagcctgggaaagtttgggcagagggccctggatttctacagcattcatgtgaccaaggagtccacccaccccgtgaagcccctggcccagatcgccggaaacagatacgcctccggacctgtgggaaaggccctgagcgacgcatgtatgggcacaatcgcctccttcctgtctaagtaccaggacatcatcatcgaacaccagaaggtggtgaagggcaaccagaagagactggagagcctgcgggagctggccggcaaggaaaacctggaataccctagcgtgaccctgccacctcagcctcacaccaaggagggcgttgatgcctacaacgaagtgatcgcccgggtgcgaatgtgggtgaacctgaacctgtggcagaagctgaagctaagcagagatgatgccaagcctctgctgagactgaagggattcccttcctttcctctggtcgagagacaggccaacgaagtggactggtgggacatggtgtgtaacgtgaagaagctgatcaacgagaaaaaggaggatggcaaggtgttttggcagaatctggctggctacaagagacaggaagccctgagaccatacctgagcagcgaggaagatcggaagaagggaaagaaattcgctcggtaccagctgggcgacctgctgctgcacctggaaaagaagcacggcgaggactggggaaaggtgtacgacgaggcctgggagcggattgacaagaaagtggaaggcctgagcaagcacatcaagctggaagaggaacggagaagcgaggacgcccagagcaaggccgccctgaccgactggctgcgggctaaggccagcttcgtgatcgagggcctgaaggaggccgacaaggacgagttctgcagatgcgagctgaagctgcagaagtggtacggggacctgcggggaaagcccttcgccatcgaagccgagaacagcatcctggacatcagcggcttcagcaagcagtacaactgtgccttcatctggcagaaggacggcgtgaagaagctgaacctgtacctgatcatcaactacttcaagggcggcaagctgcggttcaagaagatcaaacctgaagccttcgaagccaacagattctacaccgtgatcaacaaaaagagcggcgagatcgtgcccatggaggtgaacttcaacttcgacgaccccaacctgatcatcctgcctctggcctttggcaagagacagggcagagaattcatctggaacgacctgctgtccctggaaaccggcagcctgaagctggccaacggaagagtgatcgagaagacactgtacaacagaagaacccggcaggatgagcctgccctgttcgtggccctgaccttcgagcggcgggaggtcctggactcctccaatatcaaaccaatgaacctgatcggcgtggcaagaggcgaaaacatccccgccgtgatcgccctgaccgaccccgagggctgcccactgagccggtttaaggatagcctgggaaacccaacccacatcctgagaatcggcgagagctataaggagaagcagcggaccatccaggccaagaaggaggtggagcagcggagagccggcggctacagccggaagtacgccagcaaagccaagaatctggcagacgatatggtgagaaacaccgctagagatctgctgtactacgccgtgacccaggatgccatgctgatcttcgccaacctgagccggggcttcggccggcagggcaagcggaccttcatggccgagagacagtacacacggatggaggactggctgaccgccaagctggcctacgagggcctgagcaagacctacctgtccaagacactggcccagtacacctccaagacatgcagcaactgtgggtttaccatcaccagcgccgactacgacagggtgctggagaagctgaagaagacagcaacaggctggatgaccacaattaacggcaaggagctgaaggtggagggccagattacctactacaacagatacaagagacagaacgtagtcaaggacctgtccgtcgagctggatagactgagcgaagaatctgtgaacaacgacatctcctcctggacaaagggcagaagcggagaagctctgagcctcctgaagaaaagattctcccatagacccgtgcaggagaagttcgtgtgcctgaactgcggcttcgagacacacgcagccgagcaagccgccctgaacatcgccagatcctggctgttcctgcggagccaggagtacaagaaataccagacaaacaagacaaccggcaacaccgataagagagccttcgtcgagacctggcagtccttttaccggaagaagcttaaggaggtgtggaaacctgccgtgcggtctggcggatctggcggaggctccaagcccctggccgtgaggttcgccgacgtggccgtgtacttcagccccgaggagtggggctgcctgctgcccgcccagagggccctgtacagggacgtgatgagggagacctacggccacctgggcgccctgggcttccccggccccaagcccgccctgatcagctggatggagcaggagagcgaggcctggagccccgacgcccaggaccccgaggagggcgagagcctgggcggcgccctgggcggcccaagcagcggcgcccctcctcccagcggcggcagcccagccggctccccaacctctaccgaggagggcacctctgagtccgccacccccgagagcggccctggcacctccaccgagcccagcgagggcagcgcacccggcagccctgccggcagccccacctccacagaggagggaaccagcaccgagcccagcgaaggcagcgccccaggcaccagcaccgagcctagtgagcaggagattaaacggatcaacaagatcagaagaagacttgtgaaagacagcaacaccaagaaggccggcaagacaggccccatgaaaaccctgctggttagagtgatgacacccgatctgagagagcggctggaaaacctgagaaagaagcctgaaaatatcccccagcccatcagcaatacatctagagccaacctgaataagctgctgaccgattacaccgaaatgaagaaggcgatcctgcatgtgtactgggaagagttccagaaggaccctgtgggcctgatgagccgggtggcccagcctgccagcaagaagatcgatcagaacaagctgaaacctgagatggacgagaagggcaacctgaccaccgccggctttgcctgctctcagtgtggccagcccctgttcgtgtacaagctggagcaggtgtctgagaagggcaaggcttacaccaactacttcggacggtgcaatgtggccgagcacgaaaagctgatcctgctggcccagctgaagcccgagaaggatagcgacgaagccgtgacatatagcctgggaaagtttgggcagagggccctggatttctacagcattcatgtgaccaaggagtccacccaccccgtgaagcccctggcccagatcgccggaaacagatacgcctccggacctgtgggaaaggccctgagcgacgcatgtatgggcacaatcgcctccttcctgtctaagtaccaggacatcatcatcgaacaccagaaggtggtgaagggcaaccagaagagactggagagcctgcgggagctggccggcaaggaaaacctggaataccctagcgtgaccctgccacctcagcctcacaccaaggagggcgttgatgcctacaacgaagtgatcgcccgggtgcgaatgtgggtgaacctgaacctgtggcagaagctgaagctaagcagagatgatgccaagcctctgctgagactgaagggattcccttcctttcctctggtcgagagacaggccaacgaagtggactggtgggacatggtgtgtaacgtgaagaagctgatcaacgagaaaaaggaggatggcaaggtgttttggcagaatctggctggctacaagagacaggaagccctgagaccatacctgagcagcgaggaagatcggaagaagggaaagaaattcgctcggtaccagctgggcgacctgctgctgcacctggaaaagaagcacggcgaggactggggaaaggtgtacgacgaggcctgggagcggattgacaagaaagtggaaggcctgagcaagcacatcaagctggaagaggaacggagaagcgaggacgcccagagcaaggccgccctgaccgactggctgcgggctaaggccagcttcgtgatcgagggcctgaaggaggccgacaaggacgagttctgcagatgcgagctgaagctgcagaagtggtacggggacctgcggggaaagcccttcgccatcgaagccgagaacagcatcctggacatcagcggcttcagcaagcagtacaactgtgccttcatctggcagaaggacggcgtgaagaagctgaacctgtacctgatcatcaactacttcaagggcggcaagctgcggttcaagaagatcaaacctgaagccttcgaagccaacagattctacaccgtgatcaacaaaaagagcggcgagatcgtgcccatggaggtgaacttcaacttcgacgaccccaacctgatcatcctgcctctggcctttggcaagagacagggcagagaattcatctggaacgacctgctgtccctggaaaccggcagcctgaagctggccaacggaagagtgatcgagaagacactgtacaacagaagaacccggcaggatgagcctgccctgttcgtggccctgaccttcgagcggcgggaggtcctggactcctccaatatcaaaccaatgaacctgatcggcgtggcaagaggcgaaaacatccccgccgtgatcgccctgaccgaccccgagggctgcccactgagccggtttaaggatagcctgggaaacccaacccacatcctgagaatcggcgagagctataaggagaagcagcggaccatccaggccaagaaggaggtggagcagcggagagccggcggctacagccggaagtacgccagcaaagccaagaatctggcagacgatatggtgagaaacaccgctagagatctgctgtactacgccgtgacccaggatgccatgctgatcttcgccaacctgagccggggcttcggccggcagggcaagcggaccttcatggccgagagacagtacacacggatggaggactggctgaccgccaagctggcctacgagggcctgagcaagacctacctgtccaagacactggcccagtacacctccaagacatgcagcaactgtgggtttaccatcaccagcgccgactacgacagggtgctggagaagctgaagaagacagcaacaggctggatgaccacaattaacggcaaggagctgaaggtggagggccagattacctactacaacagatacaagagacagaacgtagtcaaggacctgtccgtcgagctggatagactgagcgaagaatctgtgaacaacgacatctcctcctggacaaagggcagaagcggagaagctctgagcctcctgaagaaaagattctcccatagacccgtgcaggagaagttcgtgtgcctgaactgcggcttcgagacacacgcagccgagcaagccgccctgaacatcgccagatcctggctgttcctgcggagccaggagtacaagaaataccagacaaacaagacaaccggcaacaccgataagagagccttcgtcgagacctggcagtccttttaccggaagaagcttaaggaggtgtggaaacctgccgtgcggtctggcggatctggcggaggctcctaagcccctggccgtgaggttcgccgacgtggccgtgtacttcagccccgaggagtggggctgcctgctgcccgcccagagggccctgtacagggacgtgatgagggagacctacggccacctgggcgccctgggcttccccggccccaagcccgccctgatcagctggatggagcaggagagcgaggcctggagccccgacgcccaggaccccgaggagggcgagagcctgggcggcgccctgggatctggctccggcagcggccccaagaaaaagagaaaagtctaagctgccttctgcggggcttgccttctggccatgcccttcttctctcccttgcacctgtacctcttggtctttgaataaagcctgagtaggaaggctagcaaaaaaaaaaaaaaaaaaaaaaaaaaaaaaaaaaaaaaaaaaaaaaaaaaaaaaaaaaaaaaaaaaaaaaaaaaaaaaaa

SEQ ID NO: 15912 - RNA, 9485 nt, synthetic construct
  source 1..9485: mol_type = other RNA
aggaaataagagagaaaagaagagtaagaagaaatataagagccaccatggcccctaagaagaagcgtaaagtgagccggatggaacgcctcgtctacgaggtgcggcagaagtgcagaaacatcgaggacatctgcatctcctgcggatctctgaacgtgaccctggagcacccactgttcatcggcggcatgtgccagaactgtaaaaactgttttctggagtgtgcctatcaatacgacgatgacggctaccagagctactgcaccatctgttgcggcggaagagaggtgctgatgtgtggaaataacaactgctgccggtgcttctgcgtggaatgcgtggacctgctggtgggccccggcgccgcccaggccgctattaaggaagatccttggaactgctacatgtgcggccacaagggcacatacggcctgctgagacggagagaggactggcctagcagactgcagatgttcttcgccaataaccacgaccaggagttcgacccccctaaggtgtaccctcccgtccccgccgagaagagaaagcccatccgggtcctgagcctgttcgatggcatcgccaccggtctgctggtgctgaaggacctgggcatccaggtggataggtacattgcctccgaggtgtgcgaggactccatcaccgtgggaatggtgcgtcatcagggcaagatcatgtacgtgggcgacgtgcggagcgtgacacagaagcatatccaggagtggggccctttcgacctggtgatcggcggcagcccttgcaatgacctgagcatcgtgaacccagcccggaagggcctgtacgagggaaccggcagactgttcttcgagttttacagactgctgcacgacgcccggcctaaggaaggcgacgaccggcccttcttttggctgttcgagaatgtggtggccatgggagtcagcgacaagcgggatattagccggttcctggagagcaaccccgtgatgatcgatgccaaggaagtgagcgccgcccaccgggccagatacttctggggcaatctgcctggcatgaacagacccctggccagcaccgtgaacgacaagctggagctgcaggagtgcctggagcacggccggatcgccaagttcagcaaggtgagaaccatcaccacccgaagcaacagcatcaaacaaggcaaggaccagcactttcctgtgttcatgaacgagaaggaggacatcctgtggtgtaccgagatggagagagtgttcgggttcccagtccactacacagatgtcagcaacatgtctagactggccagacagagactgctgggaagaagctggtccgtccctgtgatcagacacctgttcgcccctctgaaggagtacttcgcctgcgtgagcagcggcaacagcaacgccaacagccggggccccagcttctctagcggcctggtgccactgtccctgagagggagccacatgggccccatggagatctacaaaaccgtgagcgcctggaagcggcagcctgtgcgcgtgctgagcctgtttcggaatatcgataaagtcctgaaaagcctgggattcctggagagcggctctggctccggcggtggcaccctgaagtacgtggaggatgtgacaaacgtggtcagacgggatgtggagaagtggggccccttcgatctggtgtacggcagcacccaacccctgggcagctcttgtgaccggtgccctggctggtacatgtttcagttccaccggatcctgcagtacgccctgccgagacaggagtcccagcggccattcttttggattttcatggacaacttgctgctgaccgaggatgaccaggaaactaccactcggttcctgcagaccgaagccgtgaccctgcaggacgtgagaggccgggactaccagaacgccatgcgggtgtggtccaacatccctggactgaaaagcaagcacgcacctctgacccctaaagaagaggagtacctgcaggcccaggtgcggagcagaagcaagctggacgcccctaaggtggatctgctggtgaagaattgcctcctgcccctgagagagtacttcaagtatttcagccagaatagtctgcccctgggaggcagcggcggcggcgccctggtgacatttgaggacgtcgccgtgcggttcacccaggaggaatgggctctgctggatccttctcagaaaatcctgtaccgggacgtgatgagagagacataccggaatctgacctccgtgggcatcaactgggaatgttgggaccttgaagcctgcttcagaagcctgggaagaaacctgagagtgcaggtggtgaagagaaagtgcgagctgaccaacagcggcccctgcgccgagggcggcccaagcagcggcgcccctcctcccagcggcggcagcccagccggctccccaacctctaccgaggagggcacctctgagtccgccacccccgagagcggccctggcacctccaccgagcccagcgagggcagcgcacccggcagccctgccggcagccccacctccacagaggagggaaccagcaccgagcccagcgaaggcagcgccccaggcaccagcaccgagcctagtgagcaggagattaaacggatcaacaagatcagaagaagacttgtgaaagacagcaacaccaagaaggccggcaagacaggccccatgaaaaccctgctggttagagtgatgacacccgatctgagagagcggctggaaaacctgagaaagaagcctgaaaatatcccccagcccatcagcaatacatctagagccaacctgaataagctgctgaccgattacaccgaaatgaagaaggcgatcctgcatgtgtactgggaagagttccagaaggaccctgtgggcctgatgagccgggtggcccagcctgccagcaagaagatcgatcagaacaagctgaaacctgagatggacgagaagggcaacctgaccaccgccggctttgcctgctctcagtgtggccagcccctgttcgtgtacaagctggagcaggtgtctgagaagggcaaggcttacaccaactacttcggacggtgcaatgtggccgagcacgaaaagctgatcctgctggcccagctgaagcccgagaaggatagcgacgaagccgtgacatatagcctgggaaagtttgggcagagggccctggatttctacagcattcatgtgaccaaggagtccacccaccccgtgaagcccctggcccagatcgccggaaacagatacgcctccggacctgtgggaaaggccctgagcgacgcatgtatgggcacaatcgcctccttcctgtctaagtaccaggacatcatcatcgaacaccagaaggtggtgaagggcaaccagaagagactggagagcctgcgggagctggccggcaaggaaaacctggaataccctagcgtgaccctgccacctcagcctcacaccaaggagggcgttgatgcctacaacgaagtgatcgcccgggtgcgaatgtgggtgaacctgaacctgtggcagaagctgaagctaagcagagatgatgccaagcctctgctgagactgaagggattcccttcctttcctctggtcgagagacaggccaacgaagtggactggtgggacatggtgtgtaacgtgaagaagctgatcaacgagaaaaaggaggatggcaaggtgttttggcagaatctggctggctacaagagacaggaagccctgagaccatacctgagcagcgaggaagatcggaagaagggaaagaaattcgctcggtaccagctgggcgacctgctgctgcacctggaaaagaagcacggcgaggactggggaaaggtgtacgacgaggcctgggagcggattgacaagaaagtggaaggcctgagcaagcacatcaagctggaagaggaacggagaagcgaggacgcccagagcaaggccgccctgaccgactggctgcgggctaaggccagcttcgtgatcgagggcctgaaggaggccgacaaggacgagttctgcagatgcgagctgaagctgcagaagtggtacggggacctgcggggaaagcccttcgccatcgaagccgagaacagcatcctggacatcagcggcttcagcaagcagtacaactgtgccttcatctggcagaaggacggcgtgaagaagctgaacctgtacctgatcatcaactacttcaagggcggcaagctgcggttcaagaagatcaaacctgaagccttcgaagccaacagattctacaccgtgatcaacaaaaagagcggcgagatcgtgcccatggaggtgaacttcaacttcgacgaccccaacctgatcatcctgcctctggcctttggcaagagacagggcagagaattcatctggaacgacctgctgtccctggaaaccggcagcctgaagctggccaacggaagagtgatcgagaagacactgtacaacagaagaacccggcaggatgagcctgccctgttcgtggccctgaccttcgagcggcgggaggtcctggactcctccaatatcaaaccaatgaacctgatcggcgtggcaagaggcgaaaacatccccgccgtgatcgccctgaccgaccccgagggctgcccactgagccggtttaaggatagcctgggaaacccaacccacatcctgagaatcggcgagagctataaggagaagcagcggaccatccaggccaagaaggaggtggagcagcggagagccggcggctacagccggaagtacgccagcaaagccaagaatctggcagacgatatggtgagaaacaccgctagagatctgctgtactacgccgtgacccaggatgccatgctgatcttcgccaacctgagccggggcttcggccggcagggcaagcggaccttcatggccgagagacagtacacacggatggaggactggctgaccgccaagctggcctacgagggcctgagcaagacctacctgtccaagacactggcccagtacacctccaagacatgcagcaactgtgggtttaccatcaccagcgccgactacgacagggtgctggagaagctgaagaagacagcaacaggctggatgaccacaattaacggcaaggagctgaaggtggagggccagattacctactacaacagatacaagagacagaacgtagtcaaggacctgtccgtcgagctggatagactgagcgaagaatctgtgaacaacgacatctcctcctggacaaagggcagaagcggagaagctctgagcctcctgaagaaaagattctcccatagacccgtgcaggagaagttcgtgtgcctgaactgcggcttcgagacacacgcagccgagcaagccgccctgaacatcgccagatcctggctgttcctgcggagccaggagtacaagaaataccagacaaacaagacaaccggcaacaccgataagagagccttcgtcgagacctggcagtccttttaccggaagaagcttaaggaggtgtggaaacctgccgtgcggtctggcggatctggcggaggctccctgaagggcctggtgaccttcgaggacgtggccgtggagttcacccaggaggagtgggccctgctggaccccgcccagaggaccctgtacagggacgtgatgctggagaacttcaggaacctggccagcctgggcgaccaggtggacaagcccggcctgatcgcccagctggagcaggaggacaaggtgatgaccgaggagaggggcatcctgcccggcacctgccccgacgtggagaaccccggcggcccaagcagcggcgcccctcctcccagcggcggcagcccagccggctccccaacctctaccgaggagggcacctctgagtccgccacccccgagagcggccctggcacctccaccgagcccagcgagggcagcgcacccggcagccctgccggcagccccacctccacagaggagggaaccagcaccgagcccagcgaaggcagcgccccaggcaccagcaccgagcctagtgagcaggagattaaacggatcaacaagatcagaagaagacttgtgaaagacagcaacaccaagaaggccggcaagacaggccccatgaaaaccctgctggttagagtgatgacacccgatctgagagagcggctggaaaacctgagaaagaagcctgaaaatatcccccagcccatcagcaatacatctagagccaacctgaataagctgctgaccgattacaccgaaatgaagaaggcgatcctgcatgtgtactgggaagagttccagaaggaccctgtgggcctgatgagccgggtggcccagcctgccagcaagaagatcgatcagaacaagctgaaacctgagatggacgagaagggcaacctgaccaccgccggctttgcctgctctcagtgtggccagcccctgttcgtgtacaagctggagcaggtgtctgagaagggcaaggcttacaccaactacttcggacggtgcaatgtggccgagcacgaaaagctgatcctgctggcccagctgaagcccgagaaggatagcgacgaagccgtgacatatagcctgggaaagtttgggcagagggccctggatttctacagcattcatgtgaccaaggagtccacccaccccgtgaagcccctggcccagatcgccggaaacagatacgcctccggacctgtgggaaaggccctgagcgacgcatgtatgggcacaatcgcctccttcctgtctaagtaccaggacatcatcatcgaacaccagaaggtggtgaagggcaaccagaagagactggagagcctgcgggagctggccggcaaggaaaacctggaataccctagcgtgaccctgccacctcagcctcacaccaaggagggcgttgatgcctacaacgaagtgatcgcccgggtgcgaatgtgggtgaacctgaacctgtggcagaagctgaagctaagcagagatgatgccaagcctctgctgagactgaagggattcccttcctttcctctggtcgagagacaggccaacgaagtggactggtgggacatggtgtgtaacgtgaagaagctgatcaacgagaaaaaggaggatggcaaggtgttttggcagaatctggctggctacaagagacaggaagccctgagaccatacctgagcagcgaggaagatcggaagaagggaaagaaattcgctcggtaccagctgggcgacctgctgctgcacctggaaaagaagcacggcgaggactggggaaaggtgtacgacgaggcctgggagcggattgacaagaaagtggaaggcctgagcaagcacatcaagctggaagaggaacggagaagcgaggacgcccagagcaaggccgccctgaccgactggctgcgggctaaggccagcttcgtgatcgagggcctgaaggaggccgacaaggacgagttctgcagatgcgagctgaagctgcagaagtggtacggggacctgcggggaaagcccttcgccatcgaagccgagaacagcatcctggacatcagcggcttcagcaagcagtacaactgtgccttcatctggcagaaggacggcgtgaagaagctgaacctgtacctgatcatcaactacttcaagggcggcaagctgcggttcaagaagatcaaacctgaagccttcgaagccaacagattctacaccgtgatcaacaaaaagagcggcgagatcgtgcccatggaggtgaacttcaacttcgacgaccccaacctgatcatcctgcctctggcctttggcaagagacagggcagagaattcatctggaacgacctgctgtccctggaaaccggcagcctgaagctggccaacggaagagtgatcgagaagacactgtacaacagaagaacccggcaggatgagcctgccctgttcgtggccctgaccttcgagcggcgggaggtcctggactcctccaatatcaaaccaatgaacctgatcggcgtggcaagaggcgaaaacatccccgccgtgatcgccctgaccgaccccgagggctgcccactgagccggtttaaggatagcctgggaaacccaacccacatcctgagaatcggcgagagctataaggagaagcagcggaccatccaggccaagaaggaggtggagcagcggagagccggcggctacagccggaagtacgccagcaaagccaagaatctggcagacgatatggtgagaaacaccgctagagatctgctgtactacgccgtgacccaggatgccatgctgatcttcgccaacctgagccggggcttcggccggcagggcaagcggaccttcatggccgagagacagtacacacggatggaggactggctgaccgccaagctggcctacgagggcctgagcaagacctacctgtccaagacactggcccagtacacctccaagacatgcagcaactgtgggtttaccatcaccagcgccgactacgacagggtgctggagaagctgaagaagacagcaacaggctggatgaccacaattaacggcaaggagctgaaggtggagggccagattacctactacaacagatacaagagacagaacgtagtcaaggacctgtccgtcgagctggatagactgagcgaagaatctgtgaacaacgacatctcctcctggacaaagggcagaagcggagaagctctgagcctcctgaagaaaagattctcccatagacccgtgcaggagaagttcgtgtgcctgaactgcggcttcgagacacacgcagccgagcaagccgccctgaacatcgccagatcctggctgttcctgcggagccaggagtacaagaaataccagacaaacaagacaaccggcaacaccgataagagagccttcgtcgagacctggcagtccttttaccggaagaagcttaaggaggtgtggaaacctgccgtgcggtctggcggatctggcggaggctcctctgaagggcctggtgaccttcgaggacgtggccgtggagttcacccaggaggagtgggccctgctggaccccgcccagaggaccctgtacagggacgtgatgctggagaacttcaggaacctggccagcctgggcgaccaggtggacaagcccggcctgatcgcccagctggagcaggaggacaaggtgatgaccgaggagaggggcatcctgcccggcacctgccccgacgtggagaaccccggatctggctccggcagcggccccaagaaaaagagaaaagtctaagctgccttctgcggggcttgccttctggccatgcccttcttctctcccttgcacctgtacctcttggtctttgaataaagcctgagtaggaaggctagcaaaaaaaaaaaaaaaaaaaaaaaaaaaaaaaaaaaaaaaaaaaaaaaaaaaaaaaaaaaaaaaaaaaaaaaaaaaaaaaa

SEQ ID NO: 15913 - RNA, 9485 nt, synthetic construct
  source 1..9485: mol_type = other RNA
aggaaataagagagaaaagaagagtaagaagaaatataagagccaccatggcccctaagaagaagcgtaaagtgagccggatggaacgcctcgtctacgaggtgcggcagaagtgcagaaacatcgaggacatctgcatctcctgcggatctctgaacgtgaccctggagcacccactgttcatcggcggcatgtgccagaactgtaaaaactgttttctggagtgtgcctatcaatacgacgatgacggctaccagagctactgcaccatctgttgcggcggaagagaggtgctgatgtgtggaaataacaactgctgccggtgcttctgcgtggaatgcgtggacctgctggtgggccccggcgccgcccaggccgctattaaggaagatccttggaactgctacatgtgcggccacaagggcacatacggcctgctgagacggagagaggactggcctagcagactgcagatgttcttcgccaataaccacgaccaggagttcgacccccctaaggtgtaccctcccgtccccgccgagaagagaaagcccatccgggtcctgagcctgttcgatggcatcgccaccggtctgctggtgctgaaggacctgggcatccaggtggataggtacattgcctccgaggtgtgcgaggactccatcaccgtgggaatggtgcgtcatcagggcaagatcatgtacgtgggcgacgtgcggagcgtgacacagaagcatatccaggagtggggccctttcgacctggtgatcggcggcagcccttgcaatgacctgagcatcgtgaacccagcccggaagggcctgtacgagggaaccggcagactgttcttcgagttttacagactgctgcacgacgcccggcctaaggaaggcgacgaccggcccttcttttggctgttcgagaatgtggtggccatgggagtcagcgacaagcgggatattagccggttcctggagagcaaccccgtgatgatcgatgccaaggaagtgagcgccgcccaccgggccagatacttctggggcaatctgcctggcatgaacagacccctggccagcaccgtgaacgacaagctggagctgcaggagtgcctggagcacggccggatcgccaagttcagcaaggtgagaaccatcaccacccgaagcaacagcatcaaacaaggcaaggaccagcactttcctgtgttcatgaacgagaaggaggacatcctgtggtgtaccgagatggagagagtgttcgggttcccagtccactacacagatgtcagcaacatgtctagactggccagacagagactgctgggaagaagctggtccgtccctgtgatcagacacctgttcgcccctctgaaggagtacttcgcctgcgtgagcagcggcaacagcaacgccaacagccggggccccagcttctctagcggcctggtgccactgtccctgagagggagccacatgggccccatggagatctacaaaaccgtgagcgcctggaagcggcagcctgtgcgcgtgctgagcctgtttcggaatatcgataaagtcctgaaaagcctgggattcctggagagcggctctggctccggcggtggcaccctgaagtacgtggaggatgtgacaaacgtggtcagacgggatgtggagaagtggggccccttcgatctggtgtacggcagcacccaacccctgggcagctcttgtgaccggtgccctggctggtacatgtttcagttccaccggatcctgcagtacgccctgccgagacaggagtcccagcggccattcttttggattttcatggacaacttgctgctgaccgaggatgaccaggaaactaccactcggttcctgcagaccgaagccgtgaccctgcaggacgtgagaggccgggactaccagaacgccatgcgggtgtggtccaacatccctggactgaaaagcaagcacgcacctctgacccctaaagaagaggagtacctgcaggcccaggtgcggagcagaagcaagctggacgcccctaaggtggatctgctggtgaagaattgcctcctgcccctgagagagtacttcaagtatttcagccagaatagtctgcccctgggaggcagcggcggcggcgccctggtgacatttgaggacgtcgccgtgcggttcacccaggaggaatgggctctgctggatccttctcagaaaatcctgtaccgggacgtgatgagagagacataccggaatctgacctccgtgggcatcaactgggaatgttgggaccttgaagcctgcttcagaagcctgggaagaaacctgagagtgcaggtggtgaagagaaagtgcgagctgaccaacagcggcccctgcgccgagggcggcccaagcagcggcgcccctcctcccagcggcggcagcccagccggctccccaacctctaccgaggagggcacctctgagtccgccacccccgagagcggccctggcacctccaccgagcccagcgagggcagcgcacccggcagccctgccggcagccccacctccacagaggagggaaccagcaccgagcccagcgaaggcagcgccccaggcaccagcaccgagcctagtgagcaggagattaaacggatcaacaagatcagaagaagacttgtgaaagacagcaacaccaagaaggccggcaagacaggccccatgaaaaccctgctggttagagtgatgacacccgatctgagagagcggctggaaaacctgagaaagaagcctgaaaatatcccccagcccatcagcaatacatctagagccaacctgaataagctgctgaccgattacaccgaaatgaagaaggcgatcctgcatgtgtactgggaagagttccagaaggaccctgtgggcctgatgagccgggtggcccagcctgccagcaagaagatcgatcagaacaagctgaaacctgagatggacgagaagggcaacctgaccaccgccggctttgcctgctctcagtgtggccagcccctgttcgtgtacaagctggagcaggtgtctgagaagggcaaggcttacaccaactacttcggacggtgcaatgtggccgagcacgaaaagctgatcctgctggcccagctgaagcccgagaaggatagcgacgaagccgtgacatatagcctgggaaagtttgggcagagggccctggatttctacagcattcatgtgaccaaggagtccacccaccccgtgaagcccctggcccagatcgccggaaacagatacgcctccggacctgtgggaaaggccctgagcgacgcatgtatgggcacaatcgcctccttcctgtctaagtaccaggacatcatcatcgaacaccagaaggtggtgaagggcaaccagaagagactggagagcctgcgggagctggccggcaaggaaaacctggaataccctagcgtgaccctgccacctcagcctcacaccaaggagggcgttgatgcctacaacgaagtgatcgcccgggtgcgaatgtgggtgaacctgaacctgtggcagaagctgaagctaagcagagatgatgccaagcctctgctgagactgaagggattcccttcctttcctctggtcgagagacaggccaacgaagtggactggtgggacatggtgtgtaacgtgaagaagctgatcaacgagaaaaaggaggatggcaaggtgttttggcagaatctggctggctacaagagacaggaagccctgagaccatacctgagcagcgaggaagatcggaagaagggaaagaaattcgctcggtaccagctgggcgacctgctgctgcacctggaaaagaagcacggcgaggactggggaaaggtgtacgacgaggcctgggagcggattgacaagaaagtggaaggcctgagcaagcacatcaagctggaagaggaacggagaagcgaggacgcccagagcaaggccgccctgaccgactggctgcgggctaaggccagcttcgtgatcgagggcctgaaggaggccgacaaggacgagttctgcagatgcgagctgaagctgcagaagtggtacggggacctgcggggaaagcccttcgccatcgaagccgagaacagcatcctggacatcagcggcttcagcaagcagtacaactgtgccttcatctggcagaaggacggcgtgaagaagctgaacctgtacctgatcatcaactacttcaagggcggcaagctgcggttcaagaagatcaaacctgaagccttcgaagccaacagattctacaccgtgatcaacaaaaagagcggcgagatcgtgcccatggaggtgaacttcaacttcgacgaccccaacctgatcatcctgcctctggcctttggcaagagacagggcagagaattcatctggaacgacctgctgtccctggaaaccggcagcctgaagctggccaacggaagagtgatcgagaagacactgtacaacagaagaacccggcaggatgagcctgccctgttcgtggccctgaccttcgagcggcgggaggtcctggactcctccaatatcaaaccaatgaacctgatcggcgtggcaagaggcgaaaacatccccgccgtgatcgccctgaccgaccccgagggctgcccactgagccggtttaaggatagcctgggaaacccaacccacatcctgagaatcggcgagagctataaggagaagcagcggaccatccaggccaagaaggaggtggagcagcggagagccggcggctacagccggaagtacgccagcaaagccaagaatctggcagacgatatggtgagaaacaccgctagagatctgctgtactacgccgtgacccaggatgccatgctgatcttcgccaacctgagccggggcttcggccggcagggcaagcggaccttcatggccgagagacagtacacacggatggaggactggctgaccgccaagctggcctacgagggcctgagcaagacctacctgtccaagacactggcccagtacacctccaagacatgcagcaactgtgggtttaccatcaccagcgccgactacgacagggtgctggagaagctgaagaagacagcaacaggctggatgaccacaattaacggcaaggagctgaaggtggagggccagattacctactacaacagatacaagagacagaacgtagtcaaggacctgtccgtcgagctggatagactgagcgaagaatctgtgaacaacgacatctcctcctggacaaagggcagaagcggagaagctctgagcctcctgaagaaaagattctcccatagacccgtgcaggagaagttcgtgtgcctgaactgcggcttcgagacacacgcagccgagcaagccgccctgaacatcgccagatcctggctgttcctgcggagccaggagtacaagaaataccagacaaacaagacaaccggcaacaccgataagagagccttcgtcgagacctggcagtccttttaccggaagaagcttaaggaggtgtggaaacctgccgtgcggtctggcggatctggcggaggctccatgatcaacgcccaggagctgctgaccctggaggacgtgaccgtggagttcacctgggaggagtggcagctgctggaccccttccagaaggacctgtacagggacgtgatgctggagatctacagcaacctggtgagcatcggctaccaggtgagcaagcccgacgccctgagcaagctggagaggggcgaggagccctggaccgtggaggacgagaggcacagccagatctgccccgagaacggcggcccaagcagcggcgcccctcctcccagcggcggcagcccagccggctccccaacctctaccgaggagggcacctctgagtccgccacccccgagagcggccctggcacctccaccgagcccagcgagggcagcgcacccggcagccctgccggcagccccacctccacagaggagggaaccagcaccgagcccagcgaaggcagcgccccaggcaccagcaccgagcctagtgagcaggagattaaacggatcaacaagatcagaagaagacttgtgaaagacagcaacaccaagaaggccggcaagacaggccccatgaaaaccctgctggttagagtgatgacacccgatctgagagagcggctggaaaacctgagaaagaagcctgaaaatatcccccagcccatcagcaatacatctagagccaacctgaataagctgctgaccgattacaccgaaatgaagaaggcgatcctgcatgtgtactgggaagagttccagaaggaccctgtgggcctgatgagccgggtggcccagcctgccagcaagaagatcgatcagaacaagctgaaacctgagatggacgagaagggcaacctgaccaccgccggctttgcctgctctcagtgtggccagcccctgttcgtgtacaagctggagcaggtgtctgagaagggcaaggcttacaccaactacttcggacggtgcaatgtggccgagcacgaaaagctgatcctgctggcccagctgaagcccgagaaggatagcgacgaagccgtgacatatagcctgggaaagtttgggcagagggccctggatttctacagcattcatgtgaccaaggagtccacccaccccgtgaagcccctggcccagatcgccggaaacagatacgcctccggacctgtgggaaaggccctgagcgacgcatgtatgggcacaatcgcctccttcctgtctaagtaccaggacatcatcatcgaacaccagaaggtggtgaagggcaaccagaagagactggagagcctgcgggagctggccggcaaggaaaacctggaataccctagcgtgaccctgccacctcagcctcacaccaaggagggcgttgatgcctacaacgaagtgatcgcccgggtgcgaatgtgggtgaacctgaacctgtggcagaagctgaagctaagcagagatgatgccaagcctctgctgagactgaagggattcccttcctttcctctggtcgagagacaggccaacgaagtggactggtgggacatggtgtgtaacgtgaagaagctgatcaacgagaaaaaggaggatggcaaggtgttttggcagaatctggctggctacaagagacaggaagccctgagaccatacctgagcagcgaggaagatcggaagaagggaaagaaattcgctcggtaccagctgggcgacctgctgctgcacctggaaaagaagcacggcgaggactggggaaaggtgtacgacgaggcctgggagcggattgacaagaaagtggaaggcctgagcaagcacatcaagctggaagaggaacggagaagcgaggacgcccagagcaaggccgccctgaccgactggctgcgggctaaggccagcttcgtgatcgagggcctgaaggaggccgacaaggacgagttctgcagatgcgagctgaagctgcagaagtggtacggggacctgcggggaaagcccttcgccatcgaagccgagaacagcatcctggacatcagcggcttcagcaagcagtacaactgtgccttcatctggcagaaggacggcgtgaagaagctgaacctgtacctgatcatcaactacttcaagggcggcaagctgcggttcaagaagatcaaacctgaagccttcgaagccaacagattctacaccgtgatcaacaaaaagagcggcgagatcgtgcccatggaggtgaacttcaacttcgacgaccccaacctgatcatcctgcctctggcctttggcaagagacagggcagagaattcatctggaacgacctgctgtccctggaaaccggcagcctgaagctggccaacggaagagtgatcgagaagacactgtacaacagaagaacccggcaggatgagcctgccctgttcgtggccctgaccttcgagcggcgggaggtcctggactcctccaatatcaaaccaatgaacctgatcggcgtggcaagaggcgaaaacatccccgccgtgatcgccctgaccgaccccgagggctgcccactgagccggtttaaggatagcctgggaaacccaacccacatcctgagaatcggcgagagctataaggagaagcagcggaccatccaggccaagaaggaggtggagcagcggagagccggcggctacagccggaagtacgccagcaaagccaagaatctggcagacgatatggtgagaaacaccgctagagatctgctgtactacgccgtgacccaggatgccatgctgatcttcgccaacctgagccggggcttcggccggcagggcaagcggaccttcatggccgagagacagtacacacggatggaggactggctgaccgccaagctggcctacgagggcctgagcaagacctacctgtccaagacactggcccagtacacctccaagacatgcagcaactgtgggtttaccatcaccagcgccgactacgacagggtgctggagaagctgaagaagacagcaacaggctggatgaccacaattaacggcaaggagctgaaggtggagggccagattacctactacaacagatacaagagacagaacgtagtcaaggacctgtccgtcgagctggatagactgagcgaagaatctgtgaacaacgacatctcctcctggacaaagggcagaagcggagaagctctgagcctcctgaagaaaagattctcccatagacccgtgcaggagaagttcgtgtgcctgaactgcggcttcgagacacacgcagccgagcaagccgccctgaacatcgccagatcctggctgttcctgcggagccaggagtacaagaaataccagacaaacaagacaaccggcaacaccgataagagagccttcgtcgagacctggcagtccttttaccggaagaagcttaaggaggtgtggaaacctgccgtgcggtctggcggatctggcggaggctcctatgatcaacgcccaggagctgctgaccctggaggacgtgaccgtggagttcacctgggaggagtggcagctgctggaccccttccagaaggacctgtacagggacgtgatgctggagatctacagcaacctggtgagcatcggctaccaggtgagcaagcccgacgccctgagcaagctggagaggggcgaggagccctggaccgtggaggacgagaggcacagccagatctgccccgagaacggatctggctccggcagcggccccaagaaaaagagaaaagtctaagctgccttctgcggggcttgccttctggccatgcccttcttctctcccttgcacctgtacctcttggtctttgaataaagcctgagtaggaaggctagcaaaaaaaaaaaaaaaaaaaaaaaaaaaaaaaaaaaaaaaaaaaaaaaaaaaaaaaaaaaaaaaaaaaaaaaaaaaaaaaa

SEQ ID NO: 15914 - RNA, 9485 nt, synthetic construct
  source 1..9485: mol_type = other RNA
aggaaataagagagaaaagaagagtaagaagaaatataagagccaccatggcccctaagaagaagcgtaaagtgagccggatggaacgcctcgtctacgaggtgcggcagaagtgcagaaacatcgaggacatctgcatctcctgcggatctctgaacgtgaccctggagcacccactgttcatcggcggcatgtgccagaactgtaaaaactgttttctggagtgtgcctatcaatacgacgatgacggctaccagagctactgcaccatctgttgcggcggaagagaggtgctgatgtgtggaaataacaactgctgccggtgcttctgcgtggaatgcgtggacctgctggtgggccccggcgccgcccaggccgctattaaggaagatccttggaactgctacatgtgcggccacaagggcacatacggcctgctgagacggagagaggactggcctagcagactgcagatgttcttcgccaataaccacgaccaggagttcgacccccctaaggtgtaccctcccgtccccgccgagaagagaaagcccatccgggtcctgagcctgttcgatggcatcgccaccggtctgctggtgctgaaggacctgggcatccaggtggataggtacattgcctccgaggtgtgcgaggactccatcaccgtgggaatggtgcgtcatcagggcaagatcatgtacgtgggcgacgtgcggagcgtgacacagaagcatatccaggagtggggccctttcgacctggtgatcggcggcagcccttgcaatgacctgagcatcgtgaacccagcccggaagggcctgtacgagggaaccggcagactgttcttcgagttttacagactgctgcacgacgcccggcctaaggaaggcgacgaccggcccttcttttggctgttcgagaatgtggtggccatgggagtcagcgacaagcgggatattagccggttcctggagagcaaccccgtgatgatcgatgccaaggaagtgagcgccgcccaccgggccagatacttctggggcaatctgcctggcatgaacagacccctggccagcaccgtgaacgacaagctggagctgcaggagtgcctggagcacggccggatcgccaagttcagcaaggtgagaaccatcaccacccgaagcaacagcatcaaacaaggcaaggaccagcactttcctgtgttcatgaacgagaaggaggacatcctgtggtgtaccgagatggagagagtgttcgggttcccagtccactacacagatgtcagcaacatgtctagactggccagacagagactgctgggaagaagctggtccgtccctgtgatcagacacctgttcgcccctctgaaggagtacttcgcctgcgtgagcagcggcaacagcaacgccaacagccggggccccagcttctctagcggcctggtgccactgtccctgagagggagccacatgggccccatggagatctacaaaaccgtgagcgcctggaagcggcagcctgtgcgcgtgctgagcctgtttcggaatatcgataaagtcctgaaaagcctgggattcctggagagcggctctggctccggcggtggcaccctgaagtacgtggaggatgtgacaaacgtggtcagacgggatgtggagaagtggggccccttcgatctggtgtacggcagcacccaacccctgggcagctcttgtgaccggtgccctggctggtacatgtttcagttccaccggatcctgcagtacgccctgccgagacaggagtcccagcggccattcttttggattttcatggacaacttgctgctgaccgaggatgaccaggaaactaccactcggttcctgcagaccgaagccgtgaccctgcaggacgtgagaggccgggactaccagaacgccatgcgggtgtggtccaacatccctggactgaaaagcaagcacgcacctctgacccctaaagaagaggagtacctgcaggcccaggtgcggagcagaagcaagctggacgcccctaaggtggatctgctggtgaagaattgcctcctgcccctgagagagtacttcaagtatttcagccagaatagtctgcccctgggaggcagcggcggcggcgccctggtgacatttgaggacgtcgccgtgcggttcacccaggaggaatgggctctgctggatccttctcagaaaatcctgtaccgggacgtgatgagagagacataccggaatctgacctccgtgggcatcaactgggaatgttgggaccttgaagcctgcttcagaagcctgggaagaaacctgagagtgcaggtggtgaagagaaagtgcgagctgaccaacagcggcccctgcgccgagggcggcccaagcagcggcgcccctcctcccagcggcggcagcccagccggctccccaacctctaccgaggagggcacctctgagtccgccacccccgagagcggccctggcacctccaccgagcccagcgagggcagcgcacccggcagccctgccggcagccccacctccacagaggagggaaccagcaccgagcccagcgaaggcagcgccccaggcaccagcaccgagcctagtgagcaggagattaaacggatcaacaagatcagaagaagacttgtgaaagacagcaacaccaagaaggccggcaagacaggccccatgaaaaccctgctggttagagtgatgacacccgatctgagagagcggctggaaaacctgagaaagaagcctgaaaatatcccccagcccatcagcaatacatctagagccaacctgaataagctgctgaccgattacaccgaaatgaagaaggcgatcctgcatgtgtactgggaagagttccagaaggaccctgtgggcctgatgagccgggtggcccagcctgccagcaagaagatcgatcagaacaagctgaaacctgagatggacgagaagggcaacctgaccaccgccggctttgcctgctctcagtgtggccagcccctgttcgtgtacaagctggagcaggtgtctgagaagggcaaggcttacaccaactacttcggacggtgcaatgtggccgagcacgaaaagctgatcctgctggcccagctgaagcccgagaaggatagcgacgaagccgtgacatatagcctgggaaagtttgggcagagggccctggatttctacagcattcatgtgaccaaggagtccacccaccccgtgaagcccctggcccagatcgccggaaacagatacgcctccggacctgtgggaaaggccctgagcgacgcatgtatgggcacaatcgcctccttcctgtctaagtaccaggacatcatcatcgaacaccagaaggtggtgaagggcaaccagaagagactggagagcctgcgggagctggccggcaaggaaaacctggaataccctagcgtgaccctgccacctcagcctcacaccaaggagggcgttgatgcctacaacgaagtgatcgcccgggtgcgaatgtgggtgaacctgaacctgtggcagaagctgaagctaagcagagatgatgccaagcctctgctgagactgaagggattcccttcctttcctctggtcgagagacaggccaacgaagtggactggtgggacatggtgtgtaacgtgaagaagctgatcaacgagaaaaaggaggatggcaaggtgttttggcagaatctggctggctacaagagacaggaagccctgagaccatacctgagcagcgaggaagatcggaagaagggaaagaaattcgctcggtaccagctgggcgacctgctgctgcacctggaaaagaagcacggcgaggactggggaaaggtgtacgacgaggcctgggagcggattgacaagaaagtggaaggcctgagcaagcacatcaagctggaagaggaacggagaagcgaggacgcccagagcaaggccgccctgaccgactggctgcgggctaaggccagcttcgtgatcgagggcctgaaggaggccgacaaggacgagttctgcagatgcgagctgaagctgcagaagtggtacggggacctgcggggaaagcccttcgccatcgaagccgagaacagcatcctggacatcagcggcttcagcaagcagtacaactgtgccttcatctggcagaaggacggcgtgaagaagctgaacctgtacctgatcatcaactacttcaagggcggcaagctgcggttcaagaagatcaaacctgaagccttcgaagccaacagattctacaccgtgatcaacaaaaagagcggcgagatcgtgcccatggaggtgaacttcaacttcgacgaccccaacctgatcatcctgcctctggcctttggcaagagacagggcagagaattcatctggaacgacctgctgtccctggaaaccggcagcctgaagctggccaacggaagagtgatcgagaagacactgtacaacagaagaacccggcaggatgagcctgccctgttcgtggccctgaccttcgagcggcgggaggtcctggactcctccaatatcaaaccaatgaacctgatcggcgtggcaagaggcgaaaacatccccgccgtgatcgccctgaccgaccccgagggctgcccactgagccggtttaaggatagcctgggaaacccaacccacatcctgagaatcggcgagagctataaggagaagcagcggaccatccaggccaagaaggaggtggagcagcggagagccggcggctacagccggaagtacgccagcaaagccaagaatctggcagacgatatggtgagaaacaccgctagagatctgctgtactacgccgtgacccaggatgccatgctgatcttcgccaacctgagccggggcttcggccggcagggcaagcggaccttcatggccgagagacagtacacacggatggaggactggctgaccgccaagctggcctacgagggcctgagcaagacctacctgtccaagacactggcccagtacacctccaagacatgcagcaactgtgggtttaccatcaccagcgccgactacgacagggtgctggagaagctgaagaagacagcaacaggctggatgaccacaattaacggcaaggagctgaaggtggagggccagattacctactacaacagatacaagagacagaacgtagtcaaggacctgtccgtcgagctggatagactgagcgaagaatctgtgaacaacgacatctcctcctggacaaagggcagaagcggagaagctctgagcctcctgaagaaaagattctcccatagacccgtgcaggagaagttcgtgtgcctgaactgcggcttcgagacacacgcagccgagcaagccgccctgaacatcgccagatcctggctgttcctgcggagccaggagtacaagaaataccagacaaacaagacaaccggcaacaccgataagagagccttcgtcgagacctggcagtccttttaccggaagaagcttaaggaggtgtggaaacctgccgtgcggtctggcggatctggcggaggctccatggacgtggcccaggagcaggtgaccttccaggacgtggccatctacttcagctgggaggagtgggagtgcctggagcccagccagagggccctgtacagggacgtgatgctggacaacttcagcaacgtggccgccctgggcttctgcagccccaggcccgacctggtgagcaggctggagcagtgggaggagccctgggtggaggacagggacaggcccgagctgcaggccgtgcagaggggcggcccaagcagcggcgcccctcctcccagcggcggcagcccagccggctccccaacctctaccgaggagggcacctctgagtccgccacccccgagagcggccctggcacctccaccgagcccagcgagggcagcgcacccggcagccctgccggcagccccacctccacagaggagggaaccagcaccgagcccagcgaaggcagcgccccaggcaccagcaccgagcctagtgagcaggagattaaacggatcaacaagatcagaagaagacttgtgaaagacagcaacaccaagaaggccggcaagacaggccccatgaaaaccctgctggttagagtgatgacacccgatctgagagagcggctggaaaacctgagaaagaagcctgaaaatatcccccagcccatcagcaatacatctagagccaacctgaataagctgctgaccgattacaccgaaatgaagaaggcgatcctgcatgtgtactgggaagagttccagaaggaccctgtgggcctgatgagccgggtggcccagcctgccagcaagaagatcgatcagaacaagctgaaacctgagatggacgagaagggcaacctgaccaccgccggctttgcctgctctcagtgtggccagcccctgttcgtgtacaagctggagcaggtgtctgagaagggcaaggcttacaccaactacttcggacggtgcaatgtggccgagcacgaaaagctgatcctgctggcccagctgaagcccgagaaggatagcgacgaagccgtgacatatagcctgggaaagtttgggcagagggccctggatttctacagcattcatgtgaccaaggagtccacccaccccgtgaagcccctggcccagatcgccggaaacagatacgcctccggacctgtgggaaaggccctgagcgacgcatgtatgggcacaatcgcctccttcctgtctaagtaccaggacatcatcatcgaacaccagaaggtggtgaagggcaaccagaagagactggagagcctgcgggagctggccggcaaggaaaacctggaataccctagcgtgaccctgccacctcagcctcacaccaaggagggcgttgatgcctacaacgaagtgatcgcccgggtgcgaatgtgggtgaacctgaacctgtggcagaagctgaagctaagcagagatgatgccaagcctctgctgagactgaagggattcccttcctttcctctggtcgagagacaggccaacgaagtggactggtgggacatggtgtgtaacgtgaagaagctgatcaacgagaaaaaggaggatggcaaggtgttttggcagaatctggctggctacaagagacaggaagccctgagaccatacctgagcagcgaggaagatcggaagaagggaaagaaattcgctcggtaccagctgggcgacctgctgctgcacctggaaaagaagcacggcgaggactggggaaaggtgtacgacgaggcctgggagcggattgacaagaaagtggaaggcctgagcaagcacatcaagctggaagaggaacggagaagcgaggacgcccagagcaaggccgccctgaccgactggctgcgggctaaggccagcttcgtgatcgagggcctgaaggaggccgacaaggacgagttctgcagatgcgagctgaagctgcagaagtggtacggggacctgcggggaaagcccttcgccatcgaagccgagaacagcatcctggacatcagcggcttcagcaagcagtacaactgtgccttcatctggcagaaggacggcgtgaagaagctgaacctgtacctgatcatcaactacttcaagggcggcaagctgcggttcaagaagatcaaacctgaagccttcgaagccaacagattctacaccgtgatcaacaaaaagagcggcgagatcgtgcccatggaggtgaacttcaacttcgacgaccccaacctgatcatcctgcctctggcctttggcaagagacagggcagagaattcatctggaacgacctgctgtccctggaaaccggcagcctgaagctggccaacggaagagtgatcgagaagacactgtacaacagaagaacccggcaggatgagcctgccctgttcgtggccctgaccttcgagcggcgggaggtcctggactcctccaatatcaaaccaatgaacctgatcggcgtggcaagaggcgaaaacatccccgccgtgatcgccctgaccgaccccgagggctgcccactgagccggtttaaggatagcctgggaaacccaacccacatcctgagaatcggcgagagctataaggagaagcagcggaccatccaggccaagaaggaggtggagcagcggagagccggcggctacagccggaagtacgccagcaaagccaagaatctggcagacgatatggtgagaaacaccgctagagatctgctgtactacgccgtgacccaggatgccatgctgatcttcgccaacctgagccggggcttcggccggcagggcaagcggaccttcatggccgagagacagtacacacggatggaggactggctgaccgccaagctggcctacgagggcctgagcaagacctacctgtccaagacactggcccagtacacctccaagacatgcagcaactgtgggtttaccatcaccagcgccgactacgacagggtgctggagaagctgaagaagacagcaacaggctggatgaccacaattaacggcaaggagctgaaggtggagggccagattacctactacaacagatacaagagacagaacgtagtcaaggacctgtccgtcgagctggatagactgagcgaagaatctgtgaacaacgacatctcctcctggacaaagggcagaagcggagaagctctgagcctcctgaagaaaagattctcccatagacccgtgcaggagaagttcgtgtgcctgaactgcggcttcgagacacacgcagccgagcaagccgccctgaacatcgccagatcctggctgttcctgcggagccaggagtacaagaaataccagacaaacaagacaaccggcaacaccgataagagagccttcgtcgagacctggcagtccttttaccggaagaagcttaaggaggtgtggaaacctgccgtgcggtctggcggatctggcggaggctcctatggacgtggcccaggagcaggtgaccttccaggacgtggccatctacttcagctgggaggagtgggagtgcctggagcccagccagagggccctgtacagggacgtgatgctggacaacttcagcaacgtggccgccctgggcttctgcagccccaggcccgacctggtgagcaggctggagcagtgggaggagccctgggtggaggacagggacaggcccgagctgcaggccgtgcagaggggatctggctccggcagcggccccaagaaaaagagaaaagtctaagctgccttctgcggggcttgccttctggccatgcccttcttctctcccttgcacctgtacctcttggtctttgaataaagcctgagtaggaaggctagcaaaaaaaaaaaaaaaaaaaaaaaaaaaaaaaaaaaaaaaaaaaaaaaaaaaaaaaaaaaaaaaaaaaaaaaaaaaaaaaa

SEQ ID NO: 15915 - RNA, 9485 nt, synthetic construct
  source 1..9485: mol_type = other RNA
aggaaataagagagaaaagaagagtaagaagaaatataagagccaccatggcccctaagaagaagcgtaaagtgagccggatggaacgcctcgtctacgaggtgcggcagaagtgcagaaacatcgaggacatctgcatctcctgcggatctctgaacgtgaccctggagcacccactgttcatcggcggcatgtgccagaactgtaaaaactgttttctggagtgtgcctatcaatacgacgatgacggctaccagagctactgcaccatctgttgcggcggaagagaggtgctgatgtgtggaaataacaactgctgccggtgcttctgcgtggaatgcgtggacctgctggtgggccccggcgccgcccaggccgctattaaggaagatccttggaactgctacatgtgcggccacaagggcacatacggcctgctgagacggagagaggactggcctagcagactgcagatgttcttcgccaataaccacgaccaggagttcgacccccctaaggtgtaccctcccgtccccgccgagaagagaaagcccatccgggtcctgagcctgttcgatggcatcgccaccggtctgctggtgctgaaggacctgggcatccaggtggataggtacattgcctccgaggtgtgcgaggactccatcaccgtgggaatggtgcgtcatcagggcaagatcatgtacgtgggcgacgtgcggagcgtgacacagaagcatatccaggagtggggccctttcgacctggtgatcggcggcagcccttgcaatgacctgagcatcgtgaacccagcccggaagggcctgtacgagggaaccggcagactgttcttcgagttttacagactgctgcacgacgcccggcctaaggaaggcgacgaccggcccttcttttggctgttcgagaatgtggtggccatgggagtcagcgacaagcgggatattagccggttcctggagagcaaccccgtgatgatcgatgccaaggaagtgagcgccgcccaccgggccagatacttctggggcaatctgcctggcatgaacagacccctggccagcaccgtgaacgacaagctggagctgcaggagtgcctggagcacggccggatcgccaagttcagcaaggtgagaaccatcaccacccgaagcaacagcatcaaacaaggcaaggaccagcactttcctgtgttcatgaacgagaaggaggacatcctgtggtgtaccgagatggagagagtgttcgggttcccagtccactacacagatgtcagcaacatgtctagactggccagacagagactgctgggaagaagctggtccgtccctgtgatcagacacctgttcgcccctctgaaggagtacttcgcctgcgtgagcagcggcaacagcaacgccaacagccggggccccagcttctctagcggcctggtgccactgtccctgagagggagccacatgggccccatggagatctacaaaaccgtgagcgcctggaagcggcagcctgtgcgcgtgctgagcctgtttcggaatatcgataaagtcctgaaaagcctgggattcctggagagcggctctggctccggcggtggcaccctgaagtacgtggaggatgtgacaaacgtggtcagacgggatgtggagaagtggggccccttcgatctggtgtacggcagcacccaacccctgggcagctcttgtgaccggtgccctggctggtacatgtttcagttccaccggatcctgcagtacgccctgccgagacaggagtcccagcggccattcttttggattttcatggacaacttgctgctgaccgaggatgaccaggaaactaccactcggttcctgcagaccgaagccgtgaccctgcaggacgtgagaggccgggactaccagaacgccatgcgggtgtggtccaacatccctggactgaaaagcaagcacgcacctctgacccctaaagaagaggagtacctgcaggcccaggtgcggagcagaagcaagctggacgcccctaaggtggatctgctggtgaagaattgcctcctgcccctgagagagtacttcaagtatttcagccagaatagtctgcccctgggaggcagcggcggcggcgccctggtgacatttgaggacgtcgccgtgcggttcacccaggaggaatgggctctgctggatccttctcagaaaatcctgtaccgggacgtgatgagagagacataccggaatctgacctccgtgggcatcaactgggaatgttgggaccttgaagcctgcttcagaagcctgggaagaaacctgagagtgcaggtggtgaagagaaagtgcgagctgaccaacagcggcccctgcgccgagggcggcccaagcagcggcgcccctcctcccagcggcggcagcccagccggctccccaacctctaccgaggagggcacctctgagtccgccacccccgagagcggccctggcacctccaccgagcccagcgagggcagcgcacccggcagccctgccggcagccccacctccacagaggagggaaccagcaccgagcccagcgaaggcagcgccccaggcaccagcaccgagcctagtgagcaggagattaaacggatcaacaagatcagaagaagacttgtgaaagacagcaacaccaagaaggccggcaagacaggccccatgaaaaccctgctggttagagtgatgacacccgatctgagagagcggctggaaaacctgagaaagaagcctgaaaatatcccccagcccatcagcaatacatctagagccaacctgaataagctgctgaccgattacaccgaaatgaagaaggcgatcctgcatgtgtactgggaagagttccagaaggaccctgtgggcctgatgagccgggtggcccagcctgccagcaagaagatcgatcagaacaagctgaaacctgagatggacgagaagggcaacctgaccaccgccggctttgcctgctctcagtgtggccagcccctgttcgtgtacaagctggagcaggtgtctgagaagggcaaggcttacaccaactacttcggacggtgcaatgtggccgagcacgaaaagctgatcctgctggcccagctgaagcccgagaaggatagcgacgaagccgtgacatatagcctgggaaagtttgggcagagggccctggatttctacagcattcatgtgaccaaggagtccacccaccccgtgaagcccctggcccagatcgccggaaacagatacgcctccggacctgtgggaaaggccctgagcgacgcatgtatgggcacaatcgcctccttcctgtctaagtaccaggacatcatcatcgaacaccagaaggtggtgaagggcaaccagaagagactggagagcctgcgggagctggccggcaaggaaaacctggaataccctagcgtgaccctgccacctcagcctcacaccaaggagggcgttgatgcctacaacgaagtgatcgcccgggtgcgaatgtgggtgaacctgaacctgtggcagaagctgaagctaagcagagatgatgccaagcctctgctgagactgaagggattcccttcctttcctctggtcgagagacaggccaacgaagtggactggtgggacatggtgtgtaacgtgaagaagctgatcaacgagaaaaaggaggatggcaaggtgttttggcagaatctggctggctacaagagacaggaagccctgagaccatacctgagcagcgaggaagatcggaagaagggaaagaaattcgctcggtaccagctgggcgacctgctgctgcacctggaaaagaagcacggcgaggactggggaaaggtgtacgacgaggcctgggagcggattgacaagaaagtggaaggcctgagcaagcacatcaagctggaagaggaacggagaagcgaggacgcccagagcaaggccgccctgaccgactggctgcgggctaaggccagcttcgtgatcgagggcctgaaggaggccgacaaggacgagttctgcagatgcgagctgaagctgcagaagtggtacggggacctgcggggaaagcccttcgccatcgaagccgagaacagcatcctggacatcagcggcttcagcaagcagtacaactgtgccttcatctggcagaaggacggcgtgaagaagctgaacctgtacctgatcatcaactacttcaagggcggcaagctgcggttcaagaagatcaaacctgaagccttcgaagccaacagattctacaccgtgatcaacaaaaagagcggcgagatcgtgcccatggaggtgaacttcaacttcgacgaccccaacctgatcatcctgcctctggcctttggcaagagacagggcagagaattcatctggaacgacctgctgtccctggaaaccggcagcctgaagctggccaacggaagagtgatcgagaagacactgtacaacagaagaacccggcaggatgagcctgccctgttcgtggccctgaccttcgagcggcgggaggtcctggactcctccaatatcaaaccaatgaacctgatcggcgtggcaagaggcgaaaacatccccgccgtgatcgccctgaccgaccccgagggctgcccactgagccggtttaaggatagcctgggaaacccaacccacatcctgagaatcggcgagagctataaggagaagcagcggaccatccaggccaagaaggaggtggagcagcggagagccggcggctacagccggaagtacgccagcaaagccaagaatctggcagacgatatggtgagaaacaccgctagagatctgctgtactacgccgtgacccaggatgccatgctgatcttcgccaacctgagccggggcttcggccggcagggcaagcggaccttcatggccgagagacagtacacacggatggaggactggctgaccgccaagctggcctacgagggcctgagcaagacctacctgtccaagacactggcccagtacacctccaagacatgcagcaactgtgggtttaccatcaccagcgccgactacgacagggtgctggagaagctgaagaagacagcaacaggctggatgaccacaattaacggcaaggagctgaaggtggagggccagattacctactacaacagatacaagagacagaacgtagtcaaggacctgtccgtcgagctggatagactgagcgaagaatctgtgaacaacgacatctcctcctggacaaagggcagaagcggagaagctctgagcctcctgaagaaaagattctcccatagacccgtgcaggagaagttcgtgtgcctgaactgcggcttcgagacacacgcagccgagcaagccgccctgaacatcgccagatcctggctgttcctgcggagccaggagtacaagaaataccagacaaacaagacaaccggcaacaccgataagagagccttcgtcgagacctggcagtccttttaccggaagaagcttaaggaggtgtggaaacctgccgtgcggtctggcggatctggcggaggctccgaggagctgcccgtggtgttcgaggacgtggccgtgtacttcaccagggaggagtggggcatgctggacaagaggcagaaggagctgtacagggacgtgatgaggatgaactacgagctgctggccagcctgggccccgccgccgccaagcccgacctgatcagcaagctggagaggagggccgccccctggatcaaggaccccaacggccccaagtggggcaagggcaggccccccggcaacggcggcccaagcagcggcgcccctcctcccagcggcggcagcccagccggctccccaacctctaccgaggagggcacctctgagtccgccacccccgagagcggccctggcacctccaccgagcccagcgagggcagcgcacccggcagccctgccggcagccccacctccacagaggagggaaccagcaccgagcccagcgaaggcagcgccccaggcaccagcaccgagcctagtgagcaggagattaaacggatcaacaagatcagaagaagacttgtgaaagacagcaacaccaagaaggccggcaagacaggccccatgaaaaccctgctggttagagtgatgacacccgatctgagagagcggctggaaaacctgagaaagaagcctgaaaatatcccccagcccatcagcaatacatctagagccaacctgaataagctgctgaccgattacaccgaaatgaagaaggcgatcctgcatgtgtactgggaagagttccagaaggaccctgtgggcctgatgagccgggtggcccagcctgccagcaagaagatcgatcagaacaagctgaaacctgagatggacgagaagggcaacctgaccaccgccggctttgcctgctctcagtgtggccagcccctgttcgtgtacaagctggagcaggtgtctgagaagggcaaggcttacaccaactacttcggacggtgcaatgtggccgagcacgaaaagctgatcctgctggcccagctgaagcccgagaaggatagcgacgaagccgtgacatatagcctgggaaagtttgggcagagggccctggatttctacagcattcatgtgaccaaggagtccacccaccccgtgaagcccctggcccagatcgccggaaacagatacgcctccggacctgtgggaaaggccctgagcgacgcatgtatgggcacaatcgcctccttcctgtctaagtaccaggacatcatcatcgaacaccagaaggtggtgaagggcaaccagaagagactggagagcctgcgggagctggccggcaaggaaaacctggaataccctagcgtgaccctgccacctcagcctcacaccaaggagggcgttgatgcctacaacgaagtgatcgcccgggtgcgaatgtgggtgaacctgaacctgtggcagaagctgaagctaagcagagatgatgccaagcctctgctgagactgaagggattcccttcctttcctctggtcgagagacaggccaacgaagtggactggtgggacatggtgtgtaacgtgaagaagctgatcaacgagaaaaaggaggatggcaaggtgttttggcagaatctggctggctacaagagacaggaagccctgagaccatacctgagcagcgaggaagatcggaagaagggaaagaaattcgctcggtaccagctgggcgacctgctgctgcacctggaaaagaagcacggcgaggactggggaaaggtgtacgacgaggcctgggagcggattgacaagaaagtggaaggcctgagcaagcacatcaagctggaagaggaacggagaagcgaggacgcccagagcaaggccgccctgaccgactggctgcgggctaaggccagcttcgtgatcgagggcctgaaggaggccgacaaggacgagttctgcagatgcgagctgaagctgcagaagtggtacggggacctgcggggaaagcccttcgccatcgaagccgagaacagcatcctggacatcagcggcttcagcaagcagtacaactgtgccttcatctggcagaaggacggcgtgaagaagctgaacctgtacctgatcatcaactacttcaagggcggcaagctgcggttcaagaagatcaaacctgaagccttcgaagccaacagattctacaccgtgatcaacaaaaagagcggcgagatcgtgcccatggaggtgaacttcaacttcgacgaccccaacctgatcatcctgcctctggcctttggcaagagacagggcagagaattcatctggaacgacctgctgtccctggaaaccggcagcctgaagctggccaacggaagagtgatcgagaagacactgtacaacagaagaacccggcaggatgagcctgccctgttcgtggccctgaccttcgagcggcgggaggtcctggactcctccaatatcaaaccaatgaacctgatcggcgtggcaagaggcgaaaacatccccgccgtgatcgccctgaccgaccccgagggctgcccactgagccggtttaaggatagcctgggaaacccaacccacatcctgagaatcggcgagagctataaggagaagcagcggaccatccaggccaagaaggaggtggagcagcggagagccggcggctacagccggaagtacgccagcaaagccaagaatctggcagacgatatggtgagaaacaccgctagagatctgctgtactacgccgtgacccaggatgccatgctgatcttcgccaacctgagccggggcttcggccggcagggcaagcggaccttcatggccgagagacagtacacacggatggaggactggctgaccgccaagctggcctacgagggcctgagcaagacctacctgtccaagacactggcccagtacacctccaagacatgcagcaactgtgggtttaccatcaccagcgccgactacgacagggtgctggagaagctgaagaagacagcaacaggctggatgaccacaattaacggcaaggagctgaaggtggagggccagattacctactacaacagatacaagagacagaacgtagtcaaggacctgtccgtcgagctggatagactgagcgaagaatctgtgaacaacgacatctcctcctggacaaagggcagaagcggagaagctctgagcctcctgaagaaaagattctcccatagacccgtgcaggagaagttcgtgtgcctgaactgcggcttcgagacacacgcagccgagcaagccgccctgaacatcgccagatcctggctgttcctgcggagccaggagtacaagaaataccagacaaacaagacaaccggcaacaccgataagagagccttcgtcgagacctggcagtccttttaccggaagaagcttaaggaggtgtggaaacctgccgtgcggtctggcggatctggcggaggctcctgaggagctgcccgtggtgttcgaggacgtggccgtgtacttcaccagggaggagtggggcatgctggacaagaggcagaaggagctgtacagggacgtgatgaggatgaactacgagctgctggccagcctgggccccgccgccgccaagcccgacctgatcagcaagctggagaggagggccgccccctggatcaaggaccccaacggccccaagtggggcaagggcaggccccccggcaacggatctggctccggcagcggccccaagaaaaagagaaaagtctaagctgccttctgcggggcttgccttctggccatgcccttcttctctcccttgcacctgtacctcttggtctttgaataaagcctgagtaggaaggctagcaaaaaaaaaaaaaaaaaaaaaaaaaaaaaaaaaaaaaaaaaaaaaaaaaaaaaaaaaaaaaaaaaaaaaaaaaaaaaaaa

SEQ ID NO: 15916 - RNA, 9485 nt, synthetic construct
  source 1..9485: mol_type = other RNA
aggaaataagagagaaaagaagagtaagaagaaatataagagccaccatggcccctaagaagaagcgtaaagtgagccggatggaacgcctcgtctacgaggtgcggcagaagtgcagaaacatcgaggacatctgcatctcctgcggatctctgaacgtgaccctggagcacccactgttcatcggcggcatgtgccagaactgtaaaaactgttttctggagtgtgcctatcaatacgacgatgacggctaccagagctactgcaccatctgttgcggcggaagagaggtgctgatgtgtggaaataacaactgctgccggtgcttctgcgtggaatgcgtggacctgctggtgggccccggcgccgcccaggccgctattaaggaagatccttggaactgctacatgtgcggccacaagggcacatacggcctgctgagacggagagaggactggcctagcagactgcagatgttcttcgccaataaccacgaccaggagttcgacccccctaaggtgtaccctcccgtccccgccgagaagagaaagcccatccgggtcctgagcctgttcgatggcatcgccaccggtctgctggtgctgaaggacctgggcatccaggtggataggtacattgcctccgaggtgtgcgaggactccatcaccgtgggaatggtgcgtcatcagggcaagatcatgtacgtgggcgacgtgcggagcgtgacacagaagcatatccaggagtggggccctttcgacctggtgatcggcggcagcccttgcaatgacctgagcatcgtgaacccagcccggaagggcctgtacgagggaaccggcagactgttcttcgagttttacagactgctgcacgacgcccggcctaaggaaggcgacgaccggcccttcttttggctgttcgagaatgtggtggccatgggagtcagcgacaagcgggatattagccggttcctggagagcaaccccgtgatgatcgatgccaaggaagtgagcgccgcccaccgggccagatacttctggggcaatctgcctggcatgaacagacccctggccagcaccgtgaacgacaagctggagctgcaggagtgcctggagcacggccggatcgccaagttcagcaaggtgagaaccatcaccacccgaagcaacagcatcaaacaaggcaaggaccagcactttcctgtgttcatgaacgagaaggaggacatcctgtggtgtaccgagatggagagagtgttcgggttcccagtccactacacagatgtcagcaacatgtctagactggccagacagagactgctgggaagaagctggtccgtccctgtgatcagacacctgttcgcccctctgaaggagtacttcgcctgcgtgagcagcggcaacagcaacgccaacagccggggccccagcttctctagcggcctggtgccactgtccctgagagggagccacatgggccccatggagatctacaaaaccgtgagcgcctggaagcggcagcctgtgcgcgtgctgagcctgtttcggaatatcgataaagtcctgaaaagcctgggattcctggagagcggctctggctccggcggtggcaccctgaagtacgtggaggatgtgacaaacgtggtcagacgggatgtggagaagtggggccccttcgatctggtgtacggcagcacccaacccctgggcagctcttgtgaccggtgccctggctggtacatgtttcagttccaccggatcctgcagtacgccctgccgagacaggagtcccagcggccattcttttggattttcatggacaacttgctgctgaccgaggatgaccaggaaactaccactcggttcctgcagaccgaagccgtgaccctgcaggacgtgagaggccgggactaccagaacgccatgcgggtgtggtccaacatccctggactgaaaagcaagcacgcacctctgacccctaaagaagaggagtacctgcaggcccaggtgcggagcagaagcaagctggacgcccctaaggtggatctgctggtgaagaattgcctcctgcccctgagagagtacttcaagtatttcagccagaatagtctgcccctgggaggcagcggcggcggcgccctggtgacatttgaggacgtcgccgtgcggttcacccaggaggaatgggctctgctggatccttctcagaaaatcctgtaccgggacgtgatgagagagacataccggaatctgacctccgtgggcatcaactgggaatgttgggaccttgaagcctgcttcagaagcctgggaagaaacctgagagtgcaggtggtgaagagaaagtgcgagctgaccaacagcggcccctgcgccgagggcggcccaagcagcggcgcccctcctcccagcggcggcagcccagccggctccccaacctctaccgaggagggcacctctgagtccgccacccccgagagcggccctggcacctccaccgagcccagcgagggcagcgcacccggcagccctgccggcagccccacctccacagaggagggaaccagcaccgagcccagcgaaggcagcgccccaggcaccagcaccgagcctagtgagcaggagattaaacggatcaacaagatcagaagaagacttgtgaaagacagcaacaccaagaaggccggcaagacaggccccatgaaaaccctgctggttagagtgatgacacccgatctgagagagcggctggaaaacctgagaaagaagcctgaaaatatcccccagcccatcagcaatacatctagagccaacctgaataagctgctgaccgattacaccgaaatgaagaaggcgatcctgcatgtgtactgggaagagttccagaaggaccctgtgggcctgatgagccgggtggcccagcctgccagcaagaagatcgatcagaacaagctgaaacctgagatggacgagaagggcaacctgaccaccgccggctttgcctgctctcagtgtggccagcccctgttcgtgtacaagctggagcaggtgtctgagaagggcaaggcttacaccaactacttcggacggtgcaatgtggccgagcacgaaaagctgatcctgctggcccagctgaagcccgagaaggatagcgacgaagccgtgacatatagcctgggaaagtttgggcagagggccctggatttctacagcattcatgtgaccaaggagtccacccaccccgtgaagcccctggcccagatcgccggaaacagatacgcctccggacctgtgggaaaggccctgagcgacgcatgtatgggcacaatcgcctccttcctgtctaagtaccaggacatcatcatcgaacaccagaaggtggtgaagggcaaccagaagagactggagagcctgcgggagctggccggcaaggaaaacctggaataccctagcgtgaccctgccacctcagcctcacaccaaggagggcgttgatgcctacaacgaagtgatcgcccgggtgcgaatgtgggtgaacctgaacctgtggcagaagctgaagctaagcagagatgatgccaagcctctgctgagactgaagggattcccttcctttcctctggtcgagagacaggccaacgaagtggactggtgggacatggtgtgtaacgtgaagaagctgatcaacgagaaaaaggaggatggcaaggtgttttggcagaatctggctggctacaagagacaggaagccctgagaccatacctgagcagcgaggaagatcggaagaagggaaagaaattcgctcggtaccagctgggcgacctgctgctgcacctggaaaagaagcacggcgaggactggggaaaggtgtacgacgaggcctgggagcggattgacaagaaagtggaaggcctgagcaagcacatcaagctggaagaggaacggagaagcgaggacgcccagagcaaggccgccctgaccgactggctgcgggctaaggccagcttcgtgatcgagggcctgaaggaggccgacaaggacgagttctgcagatgcgagctgaagctgcagaagtggtacggggacctgcggggaaagcccttcgccatcgaagccgagaacagcatcctggacatcagcggcttcagcaagcagtacaactgtgccttcatctggcagaaggacggcgtgaagaagctgaacctgtacctgatcatcaactacttcaagggcggcaagctgcggttcaagaagatcaaacctgaagccttcgaagccaacagattctacaccgtgatcaacaaaaagagcggcgagatcgtgcccatggaggtgaacttcaacttcgacgaccccaacctgatcatcctgcctctggcctttggcaagagacagggcagagaattcatctggaacgacctgctgtccctggaaaccggcagcctgaagctggccaacggaagagtgatcgagaagacactgtacaacagaagaacccggcaggatgagcctgccctgttcgtggccctgaccttcgagcggcgggaggtcctggactcctccaatatcaaaccaatgaacctgatcggcgtggcaagaggcgaaaacatccccgccgtgatcgccctgaccgaccccgagggctgcccactgagccggtttaaggatagcctgggaaacccaacccacatcctgagaatcggcgagagctataaggagaagcagcggaccatccaggccaagaaggaggtggagcagcggagagccggcggctacagccggaagtacgccagcaaagccaagaatctggcagacgatatggtgagaaacaccgctagagatctgctgtactacgccgtgacccaggatgccatgctgatcttcgccaacctgagccggggcttcggccggcagggcaagcggaccttcatggccgagagacagtacacacggatggaggactggctgaccgccaagctggcctacgagggcctgagcaagacctacctgtccaagacactggcccagtacacctccaagacatgcagcaactgtgggtttaccatcaccagcgccgactacgacagggtgctggagaagctgaagaagacagcaacaggctggatgaccacaattaacggcaaggagctgaaggtggagggccagattacctactacaacagatacaagagacagaacgtagtcaaggacctgtccgtcgagctggatagactgagcgaagaatctgtgaacaacgacatctcctcctggacaaagggcagaagcggagaagctctgagcctcctgaagaaaagattctcccatagacccgtgcaggagaagttcgtgtgcctgaactgcggcttcgagacacacgcagccgagcaagccgccctgaacatcgccagatcctggctgttcctgcggagccaggagtacaagaaataccagacaaacaagacaaccggcaacaccgataagagagccttcgtcgagacctggcagtccttttaccggaagaagcttaaggaggtgtggaaacctgccgtgcggtctggcggatctggcggaggctccccccaggagagcgtgaccttcaaggacatcgccgtggacttcacccaggaggagtgggccctgctggacaccagccagaggaagctgtacagggacgtgatgctggagaacatcagccacctggtgagcgtgggctaccacctgtgcaagagcgacgtgatcagccagctggagcagggcgtggagctgtggagggagggcaggggcttcccccagggccccaaccccgacaggaagagcggcggcggcccaagcagcggcgcccctcctcccagcggcggcagcccagccggctccccaacctctaccgaggagggcacctctgagtccgccacccccgagagcggccctggcacctccaccgagcccagcgagggcagcgcacccggcagccctgccggcagccccacctccacagaggagggaaccagcaccgagcccagcgaaggcagcgccccaggcaccagcaccgagcctagtgagcaggagattaaacggatcaacaagatcagaagaagacttgtgaaagacagcaacaccaagaaggccggcaagacaggccccatgaaaaccctgctggttagagtgatgacacccgatctgagagagcggctggaaaacctgagaaagaagcctgaaaatatcccccagcccatcagcaatacatctagagccaacctgaataagctgctgaccgattacaccgaaatgaagaaggcgatcctgcatgtgtactgggaagagttccagaaggaccctgtgggcctgatgagccgggtggcccagcctgccagcaagaagatcgatcagaacaagctgaaacctgagatggacgagaagggcaacctgaccaccgccggctttgcctgctctcagtgtggccagcccctgttcgtgtacaagctggagcaggtgtctgagaagggcaaggcttacaccaactacttcggacggtgcaatgtggccgagcacgaaaagctgatcctgctggcccagctgaagcccgagaaggatagcgacgaagccgtgacatatagcctgggaaagtttgggcagagggccctggatttctacagcattcatgtgaccaaggagtccacccaccccgtgaagcccctggcccagatcgccggaaacagatacgcctccggacctgtgggaaaggccctgagcgacgcatgtatgggcacaatcgcctccttcctgtctaagtaccaggacatcatcatcgaacaccagaaggtggtgaagggcaaccagaagagactggagagcctgcgggagctggccggcaaggaaaacctggaataccctagcgtgaccctgccacctcagcctcacaccaaggagggcgttgatgcctacaacgaagtgatcgcccgggtgcgaatgtgggtgaacctgaacctgtggcagaagctgaagctaagcagagatgatgccaagcctctgctgagactgaagggattcccttcctttcctctggtcgagagacaggccaacgaagtggactggtgggacatggtgtgtaacgtgaagaagctgatcaacgagaaaaaggaggatggcaaggtgttttggcagaatctggctggctacaagagacaggaagccctgagaccatacctgagcagcgaggaagatcggaagaagggaaagaaattcgctcggtaccagctgggcgacctgctgctgcacctggaaaagaagcacggcgaggactggggaaaggtgtacgacgaggcctgggagcggattgacaagaaagtggaaggcctgagcaagcacatcaagctggaagaggaacggagaagcgaggacgcccagagcaaggccgccctgaccgactggctgcgggctaaggccagcttcgtgatcgagggcctgaaggaggccgacaaggacgagttctgcagatgcgagctgaagctgcagaagtggtacggggacctgcggggaaagcccttcgccatcgaagccgagaacagcatcctggacatcagcggcttcagcaagcagtacaactgtgccttcatctggcagaaggacggcgtgaagaagctgaacctgtacctgatcatcaactacttcaagggcggcaagctgcggttcaagaagatcaaacctgaagccttcgaagccaacagattctacaccgtgatcaacaaaaagagcggcgagatcgtgcccatggaggtgaacttcaacttcgacgaccccaacctgatcatcctgcctctggcctttggcaagagacagggcagagaattcatctggaacgacctgctgtccctggaaaccggcagcctgaagctggccaacggaagagtgatcgagaagacactgtacaacagaagaacccggcaggatgagcctgccctgttcgtggccctgaccttcgagcggcgggaggtcctggactcctccaatatcaaaccaatgaacctgatcggcgtggcaagaggcgaaaacatccccgccgtgatcgccctgaccgaccccgagggctgcccactgagccggtttaaggatagcctgggaaacccaacccacatcctgagaatcggcgagagctataaggagaagcagcggaccatccaggccaagaaggaggtggagcagcggagagccggcggctacagccggaagtacgccagcaaagccaagaatctggcagacgatatggtgagaaacaccgctagagatctgctgtactacgccgtgacccaggatgccatgctgatcttcgccaacctgagccggggcttcggccggcagggcaagcggaccttcatggccgagagacagtacacacggatggaggactggctgaccgccaagctggcctacgagggcctgagcaagacctacctgtccaagacactggcccagtacacctccaagacatgcagcaactgtgggtttaccatcaccagcgccgactacgacagggtgctggagaagctgaagaagacagcaacaggctggatgaccacaattaacggcaaggagctgaaggtggagggccagattacctactacaacagatacaagagacagaacgtagtcaaggacctgtccgtcgagctggatagactgagcgaagaatctgtgaacaacgacatctcctcctggacaaagggcagaagcggagaagctctgagcctcctgaagaaaagattctcccatagacccgtgcaggagaagttcgtgtgcctgaactgcggcttcgagacacacgcagccgagcaagccgccctgaacatcgccagatcctggctgttcctgcggagccaggagtacaagaaataccagacaaacaagacaaccggcaacaccgataagagagccttcgtcgagacctggcagtccttttaccggaagaagcttaaggaggtgtggaaacctgccgtgcggtctggcggatctggcggaggctcctccccaggagagcgtgaccttcaaggacatcgccgtggacttcacccaggaggagtgggccctgctggacaccagccagaggaagctgtacagggacgtgatgctggagaacatcagccacctggtgagcgtgggctaccacctgtgcaagagcgacgtgatcagccagctggagcagggcgtggagctgtggagggagggcaggggcttcccccagggccccaaccccgacaggaagagcggcggatctggctccggcagcggccccaagaaaaagagaaaagtctaagctgccttctgcggggcttgccttctggccatgcccttcttctctcccttgcacctgtacctcttggtctttgaataaagcctgagtaggaaggctagcaaaaaaaaaaaaaaaaaaaaaaaaaaaaaaaaaaaaaaaaaaaaaaaaaaaaaaaaaaaaaaaaaaaaaaaaaaaaaaaa

SEQ ID NO: 15917 - RNA, 9485 nt, synthetic construct
  source 1..9485: mol_type = other RNA
aggaaataagagagaaaagaagagtaagaagaaatataagagccaccatggcccctaagaagaagcgtaaagtgagccggatggaacgcctcgtctacgaggtgcggcagaagtgcagaaacatcgaggacatctgcatctcctgcggatctctgaacgtgaccctggagcacccactgttcatcggcggcatgtgccagaactgtaaaaactgttttctggagtgtgcctatcaatacgacgatgacggctaccagagctactgcaccatctgttgcggcggaagagaggtgctgatgtgtggaaataacaactgctgccggtgcttctgcgtggaatgcgtggacctgctggtgggccccggcgccgcccaggccgctattaaggaagatccttggaactgctacatgtgcggccacaagggcacatacggcctgctgagacggagagaggactggcctagcagactgcagatgttcttcgccaataaccacgaccaggagttcgacccccctaaggtgtaccctcccgtccccgccgagaagagaaagcccatccgggtcctgagcctgttcgatggcatcgccaccggtctgctggtgctgaaggacctgggcatccaggtggataggtacattgcctccgaggtgtgcgaggactccatcaccgtgggaatggtgcgtcatcagggcaagatcatgtacgtgggcgacgtgcggagcgtgacacagaagcatatccaggagtggggccctttcgacctggtgatcggcggcagcccttgcaatgacctgagcatcgtgaacccagcccggaagggcctgtacgagggaaccggcagactgttcttcgagttttacagactgctgcacgacgcccggcctaaggaaggcgacgaccggcccttcttttggctgttcgagaatgtggtggccatgggagtcagcgacaagcgggatattagccggttcctggagagcaaccccgtgatgatcgatgccaaggaagtgagcgccgcccaccgggccagatacttctggggcaatctgcctggcatgaacagacccctggccagcaccgtgaacgacaagctggagctgcaggagtgcctggagcacggccggatcgccaagttcagcaaggtgagaaccatcaccacccgaagcaacagcatcaaacaaggcaaggaccagcactttcctgtgttcatgaacgagaaggaggacatcctgtggtgtaccgagatggagagagtgttcgggttcccagtccactacacagatgtcagcaacatgtctagactggccagacagagactgctgggaagaagctggtccgtccctgtgatcagacacctgttcgcccctctgaaggagtacttcgcctgcgtgagcagcggcaacagcaacgccaacagccggggccccagcttctctagcggcctggtgccactgtccctgagagggagccacatgggccccatggagatctacaaaaccgtgagcgcctggaagcggcagcctgtgcgcgtgctgagcctgtttcggaatatcgataaagtcctgaaaagcctgggattcctggagagcggctctggctccggcggtggcaccctgaagtacgtggaggatgtgacaaacgtggtcagacgggatgtggagaagtggggccccttcgatctggtgtacggcagcacccaacccctgggcagctcttgtgaccggtgccctggctggtacatgtttcagttccaccggatcctgcagtacgccctgccgagacaggagtcccagcggccattcttttggattttcatggacaacttgctgctgaccgaggatgaccaggaaactaccactcggttcctgcagaccgaagccgtgaccctgcaggacgtgagaggccgggactaccagaacgccatgcgggtgtggtccaacatccctggactgaaaagcaagcacgcacctctgacccctaaagaagaggagtacctgcaggcccaggtgcggagcagaagcaagctggacgcccctaaggtggatctgctggtgaagaattgcctcctgcccctgagagagtacttcaagtatttcagccagaatagtctgcccctgggaggcagcggcggcggcgccctggtgacatttgaggacgtcgccgtgcggttcacccaggaggaatgggctctgctggatccttctcagaaaatcctgtaccgggacgtgatgagagagacataccggaatctgacctccgtgggcatcaactgggaatgttgggaccttgaagcctgcttcagaagcctgggaagaaacctgagagtgcaggtggtgaagagaaagtgcgagctgaccaacagcggcccctgcgccgagggcggcccaagcagcggcgcccctcctcccagcggcggcagcccagccggctccccaacctctaccgaggagggcacctctgagtccgccacccccgagagcggccctggcacctccaccgagcccagcgagggcagcgcacccggcagccctgccggcagccccacctccacagaggagggaaccagcaccgagcccagcgaaggcagcgccccaggcaccagcaccgagcctagtgagcaggagattaaacggatcaacaagatcagaagaagacttgtgaaagacagcaacaccaagaaggccggcaagacaggccccatgaaaaccctgctggttagagtgatgacacccgatctgagagagcggctggaaaacctgagaaagaagcctgaaaatatcccccagcccatcagcaatacatctagagccaacctgaataagctgctgaccgattacaccgaaatgaagaaggcgatcctgcatgtgtactgggaagagttccagaaggaccctgtgggcctgatgagccgggtggcccagcctgccagcaagaagatcgatcagaacaagctgaaacctgagatggacgagaagggcaacctgaccaccgccggctttgcctgctctcagtgtggccagcccctgttcgtgtacaagctggagcaggtgtctgagaagggcaaggcttacaccaactacttcggacggtgcaatgtggccgagcacgaaaagctgatcctgctggcccagctgaagcccgagaaggatagcgacgaagccgtgacatatagcctgggaaagtttgggcagagggccctggatttctacagcattcatgtgaccaaggagtccacccaccccgtgaagcccctggcccagatcgccggaaacagatacgcctccggacctgtgggaaaggccctgagcgacgcatgtatgggcacaatcgcctccttcctgtctaagtaccaggacatcatcatcgaacaccagaaggtggtgaagggcaaccagaagagactggagagcctgcgggagctggccggcaaggaaaacctggaataccctagcgtgaccctgccacctcagcctcacaccaaggagggcgttgatgcctacaacgaagtgatcgcccgggtgcgaatgtgggtgaacctgaacctgtggcagaagctgaagctaagcagagatgatgccaagcctctgctgagactgaagggattcccttcctttcctctggtcgagagacaggccaacgaagtggactggtgggacatggtgtgtaacgtgaagaagctgatcaacgagaaaaaggaggatggcaaggtgttttggcagaatctggctggctacaagagacaggaagccctgagaccatacctgagcagcgaggaagatcggaagaagggaaagaaattcgctcggtaccagctgggcgacctgctgctgcacctggaaaagaagcacggcgaggactggggaaaggtgtacgacgaggcctgggagcggattgacaagaaagtggaaggcctgagcaagcacatcaagctggaagaggaacggagaagcgaggacgcccagagcaaggccgccctgaccgactggctgcgggctaaggccagcttcgtgatcgagggcctgaaggaggccgacaaggacgagttctgcagatgcgagctgaagctgcagaagtggtacggggacctgcggggaaagcccttcgccatcgaagccgagaacagcatcctggacatcagcggcttcagcaagcagtacaactgtgccttcatctggcagaaggacggcgtgaagaagctgaacctgtacctgatcatcaactacttcaagggcggcaagctgcggttcaagaagatcaaacctgaagccttcgaagccaacagattctacaccgtgatcaacaaaaagagcggcgagatcgtgcccatggaggtgaacttcaacttcgacgaccccaacctgatcatcctgcctctggcctttggcaagagacagggcagagaattcatctggaacgacctgctgtccctggaaaccggcagcctgaagctggccaacggaagagtgatcgagaagacactgtacaacagaagaacccggcaggatgagcctgccctgttcgtggccctgaccttcgagcggcgggaggtcctggactcctccaatatcaaaccaatgaacctgatcggcgtggcaagaggcgaaaacatccccgccgtgatcgccctgaccgaccccgagggctgcccactgagccggtttaaggatagcctgggaaacccaacccacatcctgagaatcggcgagagctataaggagaagcagcggaccatccaggccaagaaggaggtggagcagcggagagccggcggctacagccggaagtacgccagcaaagccaagaatctggcagacgatatggtgagaaacaccgctagagatctgctgtactacgccgtgacccaggatgccatgctgatcttcgccaacctgagccggggcttcggccggcagggcaagcggaccttcatggccgagagacagtacacacggatggaggactggctgaccgccaagctggcctacgagggcctgagcaagacctacctgtccaagacactggcccagtacacctccaagacatgcagcaactgtgggtttaccatcaccagcgccgactacgacagggtgctggagaagctgaagaagacagcaacaggctggatgaccacaattaacggcaaggagctgaaggtggagggccagattacctactacaacagatacaagagacagaacgtagtcaaggacctgtccgtcgagctggatagactgagcgaagaatctgtgaacaacgacatctcctcctggacaaagggcagaagcggagaagctctgagcctcctgaagaaaagattctcccatagacccgtgcaggagaagttcgtgtgcctgaactgcggcttcgagacacacgcagccgagcaagccgccctgaacatcgccagatcctggctgttcctgcggagccaggagtacaagaaataccagacaaacaagacaaccggcaacaccgataagagagccttcgtcgagacctggcagtccttttaccggaagaagcttaaggaggtgtggaaacctgccgtgcggtctggcggatctggcggaggctccatggccgccctgttcctgagcgcccccccccaggccgaggtgaccttcgaggacgtggccgtgtacctgagcagggaggagtggggcaggctgggccccgcccagaggggcctgtacagggacgtgatgctggagacctacggcaacctggtgagcctgggcgtgggccccgccggccccaagcccggcgtgatcagccagctggagaggggcgacgagccctgggtgctggacgtgcagggcggcggcccaagcagcggcgcccctcctcccagcggcggcagcccagccggctccccaacctctaccgaggagggcacctctgagtccgccacccccgagagcggccctggcacctccaccgagcccagcgagggcagcgcacccggcagccctgccggcagccccacctccacagaggagggaaccagcaccgagcccagcgaaggcagcgccccaggcaccagcaccgagcctagtgagcaggagattaaacggatcaacaagatcagaagaagacttgtgaaagacagcaacaccaagaaggccggcaagacaggccccatgaaaaccctgctggttagagtgatgacacccgatctgagagagcggctggaaaacctgagaaagaagcctgaaaatatcccccagcccatcagcaatacatctagagccaacctgaataagctgctgaccgattacaccgaaatgaagaaggcgatcctgcatgtgtactgggaagagttccagaaggaccctgtgggcctgatgagccgggtggcccagcctgccagcaagaagatcgatcagaacaagctgaaacctgagatggacgagaagggcaacctgaccaccgccggctttgcctgctctcagtgtggccagcccctgttcgtgtacaagctggagcaggtgtctgagaagggcaaggcttacaccaactacttcggacggtgcaatgtggccgagcacgaaaagctgatcctgctggcccagctgaagcccgagaaggatagcgacgaagccgtgacatatagcctgggaaagtttgggcagagggccctggatttctacagcattcatgtgaccaaggagtccacccaccccgtgaagcccctggcccagatcgccggaaacagatacgcctccggacctgtgggaaaggccctgagcgacgcatgtatgggcacaatcgcctccttcctgtctaagtaccaggacatcatcatcgaacaccagaaggtggtgaagggcaaccagaagagactggagagcctgcgggagctggccggcaaggaaaacctggaataccctagcgtgaccctgccacctcagcctcacaccaaggagggcgttgatgcctacaacgaagtgatcgcccgggtgcgaatgtgggtgaacctgaacctgtggcagaagctgaagctaagcagagatgatgccaagcctctgctgagactgaagggattcccttcctttcctctggtcgagagacaggccaacgaagtggactggtgggacatggtgtgtaacgtgaagaagctgatcaacgagaaaaaggaggatggcaaggtgttttggcagaatctggctggctacaagagacaggaagccctgagaccatacctgagcagcgaggaagatcggaagaagggaaagaaattcgctcggtaccagctgggcgacctgctgctgcacctggaaaagaagcacggcgaggactggggaaaggtgtacgacgaggcctgggagcggattgacaagaaagtggaaggcctgagcaagcacatcaagctggaagaggaacggagaagcgaggacgcccagagcaaggccgccctgaccgactggctgcgggctaaggccagcttcgtgatcgagggcctgaaggaggccgacaaggacgagttctgcagatgcgagctgaagctgcagaagtggtacggggacctgcggggaaagcccttcgccatcgaagccgagaacagcatcctggacatcagcggcttcagcaagcagtacaactgtgccttcatctggcagaaggacggcgtgaagaagctgaacctgtacctgatcatcaactacttcaagggcggcaagctgcggttcaagaagatcaaacctgaagccttcgaagccaacagattctacaccgtgatcaacaaaaagagcggcgagatcgtgcccatggaggtgaacttcaacttcgacgaccccaacctgatcatcctgcctctggcctttggcaagagacagggcagagaattcatctggaacgacctgctgtccctggaaaccggcagcctgaagctggccaacggaagagtgatcgagaagacactgtacaacagaagaacccggcaggatgagcctgccctgttcgtggccctgaccttcgagcggcgggaggtcctggactcctccaatatcaaaccaatgaacctgatcggcgtggcaagaggcgaaaacatccccgccgtgatcgccctgaccgaccccgagggctgcccactgagccggtttaaggatagcctgggaaacccaacccacatcctgagaatcggcgagagctataaggagaagcagcggaccatccaggccaagaaggaggtggagcagcggagagccggcggctacagccggaagtacgccagcaaagccaagaatctggcagacgatatggtgagaaacaccgctagagatctgctgtactacgccgtgacccaggatgccatgctgatcttcgccaacctgagccggggcttcggccggcagggcaagcggaccttcatggccgagagacagtacacacggatggaggactggctgaccgccaagctggcctacgagggcctgagcaagacctacctgtccaagacactggcccagtacacctccaagacatgcagcaactgtgggtttaccatcaccagcgccgactacgacagggtgctggagaagctgaagaagacagcaacaggctggatgaccacaattaacggcaaggagctgaaggtggagggccagattacctactacaacagatacaagagacagaacgtagtcaaggacctgtccgtcgagctggatagactgagcgaagaatctgtgaacaacgacatctcctcctggacaaagggcagaagcggagaagctctgagcctcctgaagaaaagattctcccatagacccgtgcaggagaagttcgtgtgcctgaactgcggcttcgagacacacgcagccgagcaagccgccctgaacatcgccagatcctggctgttcctgcggagccaggagtacaagaaataccagacaaacaagacaaccggcaacaccgataagagagccttcgtcgagacctggcagtccttttaccggaagaagcttaaggaggtgtggaaacctgccgtgcggtctggcggatctggcggaggctcctatggccgccctgttcctgagcgcccccccccaggccgaggtgaccttcgaggacgtggccgtgtacctgagcagggaggagtggggcaggctgggccccgcccagaggggcctgtacagggacgtgatgctggagacctacggcaacctggtgagcctgggcgtgggccccgccggccccaagcccggcgtgatcagccagctggagaggggcgacgagccctgggtgctggacgtgcagggcggatctggctccggcagcggccccaagaaaaagagaaaagtctaagctgccttctgcggggcttgccttctggccatgcccttcttctctcccttgcacctgtacctcttggtctttgaataaagcctgagtaggaaggctagcaaaaaaaaaaaaaaaaaaaaaaaaaaaaaaaaaaaaaaaaaaaaaaaaaaaaaaaaaaaaaaaaaaaaaaaaaaaaaaaa

SEQ ID NO: 15918 - RNA, 9485 nt, synthetic construct
  source 1..9485: mol_type = other RNA
aggaaataagagagaaaagaagagtaagaagaaatataagagccaccatggcccctaagaagaagcgtaaagtgagccggatggaacgcctcgtctacgaggtgcggcagaagtgcagaaacatcgaggacatctgcatctcctgcggatctctgaacgtgaccctggagcacccactgttcatcggcggcatgtgccagaactgtaaaaactgttttctggagtgtgcctatcaatacgacgatgacggctaccagagctactgcaccatctgttgcggcggaagagaggtgctgatgtgtggaaataacaactgctgccggtgcttctgcgtggaatgcgtggacctgctggtgggccccggcgccgcccaggccgctattaaggaagatccttggaactgctacatgtgcggccacaagggcacatacggcctgctgagacggagagaggactggcctagcagactgcagatgttcttcgccaataaccacgaccaggagttcgacccccctaaggtgtaccctcccgtccccgccgagaagagaaagcccatccgggtcctgagcctgttcgatggcatcgccaccggtctgctggtgctgaaggacctgggcatccaggtggataggtacattgcctccgaggtgtgcgaggactccatcaccgtgggaatggtgcgtcatcagggcaagatcatgtacgtgggcgacgtgcggagcgtgacacagaagcatatccaggagtggggccctttcgacctggtgatcggcggcagcccttgcaatgacctgagcatcgtgaacccagcccggaagggcctgtacgagggaaccggcagactgttcttcgagttttacagactgctgcacgacgcccggcctaaggaaggcgacgaccggcccttcttttggctgttcgagaatgtggtggccatgggagtcagcgacaagcgggatattagccggttcctggagagcaaccccgtgatgatcgatgccaaggaagtgagcgccgcccaccgggccagatacttctggggcaatctgcctggcatgaacagacccctggccagcaccgtgaacgacaagctggagctgcaggagtgcctggagcacggccggatcgccaagttcagcaaggtgagaaccatcaccacccgaagcaacagcatcaaacaaggcaaggaccagcactttcctgtgttcatgaacgagaaggaggacatcctgtggtgtaccgagatggagagagtgttcgggttcccagtccactacacagatgtcagcaacatgtctagactggccagacagagactgctgggaagaagctggtccgtccctgtgatcagacacctgttcgcccctctgaaggagtacttcgcctgcgtgagcagcggcaacagcaacgccaacagccggggccccagcttctctagcggcctggtgccactgtccctgagagggagccacatgggccccatggagatctacaaaaccgtgagcgcctggaagcggcagcctgtgcgcgtgctgagcctgtttcggaatatcgataaagtcctgaaaagcctgggattcctggagagcggctctggctccggcggtggcaccctgaagtacgtggaggatgtgacaaacgtggtcagacgggatgtggagaagtggggccccttcgatctggtgtacggcagcacccaacccctgggcagctcttgtgaccggtgccctggctggtacatgtttcagttccaccggatcctgcagtacgccctgccgagacaggagtcccagcggccattcttttggattttcatggacaacttgctgctgaccgaggatgaccaggaaactaccactcggttcctgcagaccgaagccgtgaccctgcaggacgtgagaggccgggactaccagaacgccatgcgggtgtggtccaacatccctggactgaaaagcaagcacgcacctctgacccctaaagaagaggagtacctgcaggcccaggtgcggagcagaagcaagctggacgcccctaaggtggatctgctggtgaagaattgcctcctgcccctgagagagtacttcaagtatttcagccagaatagtctgcccctgggaggcagcggcggcggcgccctggtgacatttgaggacgtcgccgtgcggttcacccaggaggaatgggctctgctggatccttctcagaaaatcctgtaccgggacgtgatgagagagacataccggaatctgacctccgtgggcatcaactgggaatgttgggaccttgaagcctgcttcagaagcctgggaagaaacctgagagtgcaggtggtgaagagaaagtgcgagctgaccaacagcggcccctgcgccgagggcggcccaagcagcggcgcccctcctcccagcggcggcagcccagccggctccccaacctctaccgaggagggcacctctgagtccgccacccccgagagcggccctggcacctccaccgagcccagcgagggcagcgcacccggcagccctgccggcagccccacctccacagaggagggaaccagcaccgagcccagcgaaggcagcgccccaggcaccagcaccgagcctagtgagcaggagattaaacggatcaacaagatcagaagaagacttgtgaaagacagcaacaccaagaaggccggcaagacaggccccatgaaaaccctgctggttagagtgatgacacccgatctgagagagcggctggaaaacctgagaaagaagcctgaaaatatcccccagcccatcagcaatacatctagagccaacctgaataagctgctgaccgattacaccgaaatgaagaaggcgatcctgcatgtgtactgggaagagttccagaaggaccctgtgggcctgatgagccgggtggcccagcctgccagcaagaagatcgatcagaacaagctgaaacctgagatggacgagaagggcaacctgaccaccgccggctttgcctgctctcagtgtggccagcccctgttcgtgtacaagctggagcaggtgtctgagaagggcaaggcttacaccaactacttcggacggtgcaatgtggccgagcacgaaaagctgatcctgctggcccagctgaagcccgagaaggatagcgacgaagccgtgacatatagcctgggaaagtttgggcagagggccctggatttctacagcattcatgtgaccaaggagtccacccaccccgtgaagcccctggcccagatcgccggaaacagatacgcctccggacctgtgggaaaggccctgagcgacgcatgtatgggcacaatcgcctccttcctgtctaagtaccaggacatcatcatcgaacaccagaaggtggtgaagggcaaccagaagagactggagagcctgcgggagctggccggcaaggaaaacctggaataccctagcgtgaccctgccacctcagcctcacaccaaggagggcgttgatgcctacaacgaagtgatcgcccgggtgcgaatgtgggtgaacctgaacctgtggcagaagctgaagctaagcagagatgatgccaagcctctgctgagactgaagggattcccttcctttcctctggtcgagagacaggccaacgaagtggactggtgggacatggtgtgtaacgtgaagaagctgatcaacgagaaaaaggaggatggcaaggtgttttggcagaatctggctggctacaagagacaggaagccctgagaccatacctgagcagcgaggaagatcggaagaagggaaagaaattcgctcggtaccagctgggcgacctgctgctgcacctggaaaagaagcacggcgaggactggggaaaggtgtacgacgaggcctgggagcggattgacaagaaagtggaaggcctgagcaagcacatcaagctggaagaggaacggagaagcgaggacgcccagagcaaggccgccctgaccgactggctgcgggctaaggccagcttcgtgatcgagggcctgaaggaggccgacaaggacgagttctgcagatgcgagctgaagctgcagaagtggtacggggacctgcggggaaagcccttcgccatcgaagccgagaacagcatcctggacatcagcggcttcagcaagcagtacaactgtgccttcatctggcagaaggacggcgtgaagaagctgaacctgtacctgatcatcaactacttcaagggcggcaagctgcggttcaagaagatcaaacctgaagccttcgaagccaacagattctacaccgtgatcaacaaaaagagcggcgagatcgtgcccatggaggtgaacttcaacttcgacgaccccaacctgatcatcctgcctctggcctttggcaagagacagggcagagaattcatctggaacgacctgctgtccctggaaaccggcagcctgaagctggccaacggaagagtgatcgagaagacactgtacaacagaagaacccggcaggatgagcctgccctgttcgtggccctgaccttcgagcggcgggaggtcctggactcctccaatatcaaaccaatgaacctgatcggcgtggcaagaggcgaaaacatccccgccgtgatcgccctgaccgaccccgagggctgcccactgagccggtttaaggatagcctgggaaacccaacccacatcctgagaatcggcgagagctataaggagaagcagcggaccatccaggccaagaaggaggtggagcagcggagagccggcggctacagccggaagtacgccagcaaagccaagaatctggcagacgatatggtgagaaacaccgctagagatctgctgtactacgccgtgacccaggatgccatgctgatcttcgccaacctgagccggggcttcggccggcagggcaagcggaccttcatggccgagagacagtacacacggatggaggactggctgaccgccaagctggcctacgagggcctgagcaagacctacctgtccaagacactggcccagtacacctccaagacatgcagcaactgtgggtttaccatcaccagcgccgactacgacagggtgctggagaagctgaagaagacagcaacaggctggatgaccacaattaacggcaaggagctgaaggtggagggccagattacctactacaacagatacaagagacagaacgtagtcaaggacctgtccgtcgagctggatagactgagcgaagaatctgtgaacaacgacatctcctcctggacaaagggcagaagcggagaagctctgagcctcctgaagaaaagattctcccatagacccgtgcaggagaagttcgtgtgcctgaactgcggcttcgagacacacgcagccgagcaagccgccctgaacatcgccagatcctggctgttcctgcggagccaggagtacaagaaataccagacaaacaagacaaccggcaacaccgataagagagccttcgtcgagacctggcagtccttttaccggaagaagcttaaggaggtgtggaaacctgccgtgcggtctggcggatctggcggaggctccaagcccggcatcgtgaggttcgccgacgtggccgtgtacttcagcagggaggagtgggcctgcctgaggcccgcccagagggccctgtacagggacgtgatgagggagacctacggccacctgggcgccctgggcttccccggccccaagcccgccctgatcagctggatggagagggagagcgaggcctggagccccgccgcccaggagcccaaggagggcgagaacctgggcggcgcccccggcggcccaagcagcggcgcccctcctcccagcggcggcagcccagccggctccccaacctctaccgaggagggcacctctgagtccgccacccccgagagcggccctggcacctccaccgagcccagcgagggcagcgcacccggcagccctgccggcagccccacctccacagaggagggaaccagcaccgagcccagcgaaggcagcgccccaggcaccagcaccgagcctagtgagcaggagattaaacggatcaacaagatcagaagaagacttgtgaaagacagcaacaccaagaaggccggcaagacaggccccatgaaaaccctgctggttagagtgatgacacccgatctgagagagcggctggaaaacctgagaaagaagcctgaaaatatcccccagcccatcagcaatacatctagagccaacctgaataagctgctgaccgattacaccgaaatgaagaaggcgatcctgcatgtgtactgggaagagttccagaaggaccctgtgggcctgatgagccgggtggcccagcctgccagcaagaagatcgatcagaacaagctgaaacctgagatggacgagaagggcaacctgaccaccgccggctttgcctgctctcagtgtggccagcccctgttcgtgtacaagctggagcaggtgtctgagaagggcaaggcttacaccaactacttcggacggtgcaatgtggccgagcacgaaaagctgatcctgctggcccagctgaagcccgagaaggatagcgacgaagccgtgacatatagcctgggaaagtttgggcagagggccctggatttctacagcattcatgtgaccaaggagtccacccaccccgtgaagcccctggcccagatcgccggaaacagatacgcctccggacctgtgggaaaggccctgagcgacgcatgtatgggcacaatcgcctccttcctgtctaagtaccaggacatcatcatcgaacaccagaaggtggtgaagggcaaccagaagagactggagagcctgcgggagctggccggcaaggaaaacctggaataccctagcgtgaccctgccacctcagcctcacaccaaggagggcgttgatgcctacaacgaagtgatcgcccgggtgcgaatgtgggtgaacctgaacctgtggcagaagctgaagctaagcagagatgatgccaagcctctgctgagactgaagggattcccttcctttcctctggtcgagagacaggccaacgaagtggactggtgggacatggtgtgtaacgtgaagaagctgatcaacgagaaaaaggaggatggcaaggtgttttggcagaatctggctggctacaagagacaggaagccctgagaccatacctgagcagcgaggaagatcggaagaagggaaagaaattcgctcggtaccagctgggcgacctgctgctgcacctggaaaagaagcacggcgaggactggggaaaggtgtacgacgaggcctgggagcggattgacaagaaagtggaaggcctgagcaagcacatcaagctggaagaggaacggagaagcgaggacgcccagagcaaggccgccctgaccgactggctgcgggctaaggccagcttcgtgatcgagggcctgaaggaggccgacaaggacgagttctgcagatgcgagctgaagctgcagaagtggtacggggacctgcggggaaagcccttcgccatcgaagccgagaacagcatcctggacatcagcggcttcagcaagcagtacaactgtgccttcatctggcagaaggacggcgtgaagaagctgaacctgtacctgatcatcaactacttcaagggcggcaagctgcggttcaagaagatcaaacctgaagccttcgaagccaacagattctacaccgtgatcaacaaaaagagcggcgagatcgtgcccatggaggtgaacttcaacttcgacgaccccaacctgatcatcctgcctctggcctttggcaagagacagggcagagaattcatctggaacgacctgctgtccctggaaaccggcagcctgaagctggccaacggaagagtgatcgagaagacactgtacaacagaagaacccggcaggatgagcctgccctgttcgtggccctgaccttcgagcggcgggaggtcctggactcctccaatatcaaaccaatgaacctgatcggcgtggcaagaggcgaaaacatccccgccgtgatcgccctgaccgaccccgagggctgcccactgagccggtttaaggatagcctgggaaacccaacccacatcctgagaatcggcgagagctataaggagaagcagcggaccatccaggccaagaaggaggtggagcagcggagagccggcggctacagccggaagtacgccagcaaagccaagaatctggcagacgatatggtgagaaacaccgctagagatctgctgtactacgccgtgacccaggatgccatgctgatcttcgccaacctgagccggggcttcggccggcagggcaagcggaccttcatggccgagagacagtacacacggatggaggactggctgaccgccaagctggcctacgagggcctgagcaagacctacctgtccaagacactggcccagtacacctccaagacatgcagcaactgtgggtttaccatcaccagcgccgactacgacagggtgctggagaagctgaagaagacagcaacaggctggatgaccacaattaacggcaaggagctgaaggtggagggccagattacctactacaacagatacaagagacagaacgtagtcaaggacctgtccgtcgagctggatagactgagcgaagaatctgtgaacaacgacatctcctcctggacaaagggcagaagcggagaagctctgagcctcctgaagaaaagattctcccatagacccgtgcaggagaagttcgtgtgcctgaactgcggcttcgagacacacgcagccgagcaagccgccctgaacatcgccagatcctggctgttcctgcggagccaggagtacaagaaataccagacaaacaagacaaccggcaacaccgataagagagccttcgtcgagacctggcagtccttttaccggaagaagcttaaggaggtgtggaaacctgccgtgcggtctggcggatctggcggaggctcctaagcccggcatcgtgaggttcgccgacgtggccgtgtacttcagcagggaggagtgggcctgcctgaggcccgcccagagggccctgtacagggacgtgatgagggagacctacggccacctgggcgccctgggcttccccggccccaagcccgccctgatcagctggatggagagggagagcgaggcctggagccccgccgcccaggagcccaaggagggcgagaacctgggcggcgcccccggatctggctccggcagcggccccaagaaaaagagaaaagtctaagctgccttctgcggggcttgccttctggccatgcccttcttctctcccttgcacctgtacctcttggtctttgaataaagcctgagtaggaaggctagcaaaaaaaaaaaaaaaaaaaaaaaaaaaaaaaaaaaaaaaaaaaaaaaaaaaaaaaaaaaaaaaaaaaaaaaaaaaaaaaa

SEQ ID NO: 15919 - RNA, 9485 nt, synthetic construct
  source 1..9485: mol_type = other RNA
aggaaataagagagaaaagaagagtaagaagaaatataagagccaccatggcccctaagaagaagcgtaaagtgagccggatggaacgcctcgtctacgaggtgcggcagaagtgcagaaacatcgaggacatctgcatctcctgcggatctctgaacgtgaccctggagcacccactgttcatcggcggcatgtgccagaactgtaaaaactgttttctggagtgtgcctatcaatacgacgatgacggctaccagagctactgcaccatctgttgcggcggaagagaggtgctgatgtgtggaaataacaactgctgccggtgcttctgcgtggaatgcgtggacctgctggtgggccccggcgccgcccaggccgctattaaggaagatccttggaactgctacatgtgcggccacaagggcacatacggcctgctgagacggagagaggactggcctagcagactgcagatgttcttcgccaataaccacgaccaggagttcgacccccctaaggtgtaccctcccgtccccgccgagaagagaaagcccatccgggtcctgagcctgttcgatggcatcgccaccggtctgctggtgctgaaggacctgggcatccaggtggataggtacattgcctccgaggtgtgcgaggactccatcaccgtgggaatggtgcgtcatcagggcaagatcatgtacgtgggcgacgtgcggagcgtgacacagaagcatatccaggagtggggccctttcgacctggtgatcggcggcagcccttgcaatgacctgagcatcgtgaacccagcccggaagggcctgtacgagggaaccggcagactgttcttcgagttttacagactgctgcacgacgcccggcctaaggaaggcgacgaccggcccttcttttggctgttcgagaatgtggtggccatgggagtcagcgacaagcgggatattagccggttcctggagagcaaccccgtgatgatcgatgccaaggaagtgagcgccgcccaccgggccagatacttctggggcaatctgcctggcatgaacagacccctggccagcaccgtgaacgacaagctggagctgcaggagtgcctggagcacggccggatcgccaagttcagcaaggtgagaaccatcaccacccgaagcaacagcatcaaacaaggcaaggaccagcactttcctgtgttcatgaacgagaaggaggacatcctgtggtgtaccgagatggagagagtgttcgggttcccagtccactacacagatgtcagcaacatgtctagactggccagacagagactgctgggaagaagctggtccgtccctgtgatcagacacctgttcgcccctctgaaggagtacttcgcctgcgtgagcagcggcaacagcaacgccaacagccggggccccagcttctctagcggcctggtgccactgtccctgagagggagccacatgggccccatggagatctacaaaaccgtgagcgcctggaagcggcagcctgtgcgcgtgctgagcctgtttcggaatatcgataaagtcctgaaaagcctgggattcctggagagcggctctggctccggcggtggcaccctgaagtacgtggaggatgtgacaaacgtggtcagacgggatgtggagaagtggggccccttcgatctggtgtacggcagcacccaacccctgggcagctcttgtgaccggtgccctggctggtacatgtttcagttccaccggatcctgcagtacgccctgccgagacaggagtcccagcggccattcttttggattttcatggacaacttgctgctgaccgaggatgaccaggaaactaccactcggttcctgcagaccgaagccgtgaccctgcaggacgtgagaggccgggactaccagaacgccatgcgggtgtggtccaacatccctggactgaaaagcaagcacgcacctctgacccctaaagaagaggagtacctgcaggcccaggtgcggagcagaagcaagctggacgcccctaaggtggatctgctggtgaagaattgcctcctgcccctgagagagtacttcaagtatttcagccagaatagtctgcccctgggaggcagcggcggcggcgccctggtgacatttgaggacgtcgccgtgcggttcacccaggaggaatgggctctgctggatccttctcagaaaatcctgtaccgggacgtgatgagagagacataccggaatctgacctccgtgggcatcaactgggaatgttgggaccttgaagcctgcttcagaagcctgggaagaaacctgagagtgcaggtggtgaagagaaagtgcgagctgaccaacagcggcccctgcgccgagggcggcccaagcagcggcgcccctcctcccagcggcggcagcccagccggctccccaacctctaccgaggagggcacctctgagtccgccacccccgagagcggccctggcacctccaccgagcccagcgagggcagcgcacccggcagccctgccggcagccccacctccacagaggagggaaccagcaccgagcccagcgaaggcagcgccccaggcaccagcaccgagcctagtgagcaggagattaaacggatcaacaagatcagaagaagacttgtgaaagacagcaacaccaagaaggccggcaagacaggccccatgaaaaccctgctggttagagtgatgacacccgatctgagagagcggctggaaaacctgagaaagaagcctgaaaatatcccccagcccatcagcaatacatctagagccaacctgaataagctgctgaccgattacaccgaaatgaagaaggcgatcctgcatgtgtactgggaagagttccagaaggaccctgtgggcctgatgagccgggtggcccagcctgccagcaagaagatcgatcagaacaagctgaaacctgagatggacgagaagggcaacctgaccaccgccggctttgcctgctctcagtgtggccagcccctgttcgtgtacaagctggagcaggtgtctgagaagggcaaggcttacaccaactacttcggacggtgcaatgtggccgagcacgaaaagctgatcctgctggcccagctgaagcccgagaaggatagcgacgaagccgtgacatatagcctgggaaagtttgggcagagggccctggatttctacagcattcatgtgaccaaggagtccacccaccccgtgaagcccctggcccagatcgccggaaacagatacgcctccggacctgtgggaaaggccctgagcgacgcatgtatgggcacaatcgcctccttcctgtctaagtaccaggacatcatcatcgaacaccagaaggtggtgaagggcaaccagaagagactggagagcctgcgggagctggccggcaaggaaaacctggaataccctagcgtgaccctgccacctcagcctcacaccaaggagggcgttgatgcctacaacgaagtgatcgcccgggtgcgaatgtgggtgaacctgaacctgtggcagaagctgaagctaagcagagatgatgccaagcctctgctgagactgaagggattcccttcctttcctctggtcgagagacaggccaacgaagtggactggtgggacatggtgtgtaacgtgaagaagctgatcaacgagaaaaaggaggatggcaaggtgttttggcagaatctggctggctacaagagacaggaagccctgagaccatacctgagcagcgaggaagatcggaagaagggaaagaaattcgctcggtaccagctgggcgacctgctgctgcacctggaaaagaagcacggcgaggactggggaaaggtgtacgacgaggcctgggagcggattgacaagaaagtggaaggcctgagcaagcacatcaagctggaagaggaacggagaagcgaggacgcccagagcaaggccgccctgaccgactggctgcgggctaaggccagcttcgtgatcgagggcctgaaggaggccgacaaggacgagttctgcagatgcgagctgaagctgcagaagtggtacggggacctgcggggaaagcccttcgccatcgaagccgagaacagcatcctggacatcagcggcttcagcaagcagtacaactgtgccttcatctggcagaaggacggcgtgaagaagctgaacctgtacctgatcatcaactacttcaagggcggcaagctgcggttcaagaagatcaaacctgaagccttcgaagccaacagattctacaccgtgatcaacaaaaagagcggcgagatcgtgcccatggaggtgaacttcaacttcgacgaccccaacctgatcatcctgcctctggcctttggcaagagacagggcagagaattcatctggaacgacctgctgtccctggaaaccggcagcctgaagctggccaacggaagagtgatcgagaagacactgtacaacagaagaacccggcaggatgagcctgccctgttcgtggccctgaccttcgagcggcgggaggtcctggactcctccaatatcaaaccaatgaacctgatcggcgtggcaagaggcgaaaacatccccgccgtgatcgccctgaccgaccccgagggctgcccactgagccggtttaaggatagcctgggaaacccaacccacatcctgagaatcggcgagagctataaggagaagcagcggaccatccaggccaagaaggaggtggagcagcggagagccggcggctacagccggaagtacgccagcaaagccaagaatctggcagacgatatggtgagaaacaccgctagagatctgctgtactacgccgtgacccaggatgccatgctgatcttcgccaacctgagccggggcttcggccggcagggcaagcggaccttcatggccgagagacagtacacacggatggaggactggctgaccgccaagctggcctacgagggcctgagcaagacctacctgtccaagacactggcccagtacacctccaagacatgcagcaactgtgggtttaccatcaccagcgccgactacgacagggtgctggagaagctgaagaagacagcaacaggctggatgaccacaattaacggcaaggagctgaaggtggagggccagattacctactacaacagatacaagagacagaacgtagtcaaggacctgtccgtcgagctggatagactgagcgaagaatctgtgaacaacgacatctcctcctggacaaagggcagaagcggagaagctctgagcctcctgaagaaaagattctcccatagacccgtgcaggagaagttcgtgtgcctgaactgcggcttcgagacacacgcagccgagcaagccgccctgaacatcgccagatcctggctgttcctgcggagccaggagtacaagaaataccagacaaacaagacaaccggcaacaccgataagagagccttcgtcgagacctggcagtccttttaccggaagaagcttaaggaggtgtggaaacctgccgtgcggtctggcggatctggcggaggctccatggcccacgccctggtgaccttcagggacgtggccatcgacttcagccagaaggagtgggagtgcctggacaccacccagaggaagctgtacagggacgtgatgctggagaactacaacaacctggtgagcctgggctacagcggcagcaagcccgacgtgatcaccctgctggagcagggcaaggagccctgcatggccgccagggacgtgaccggcaggcagtaccccggcctgctgagcggcggcccaagcagcggcgcccctcctcccagcggcggcagcccagccggctccccaacctctaccgaggagggcacctctgagtccgccacccccgagagcggccctggcacctccaccgagcccagcgagggcagcgcacccggcagccctgccggcagccccacctccacagaggagggaaccagcaccgagcccagcgaaggcagcgccccaggcaccagcaccgagcctagtgagcaggagattaaacggatcaacaagatcagaagaagacttgtgaaagacagcaacaccaagaaggccggcaagacaggccccatgaaaaccctgctggttagagtgatgacacccgatctgagagagcggctggaaaacctgagaaagaagcctgaaaatatcccccagcccatcagcaatacatctagagccaacctgaataagctgctgaccgattacaccgaaatgaagaaggcgatcctgcatgtgtactgggaagagttccagaaggaccctgtgggcctgatgagccgggtggcccagcctgccagcaagaagatcgatcagaacaagctgaaacctgagatggacgagaagggcaacctgaccaccgccggctttgcctgctctcagtgtggccagcccctgttcgtgtacaagctggagcaggtgtctgagaagggcaaggcttacaccaactacttcggacggtgcaatgtggccgagcacgaaaagctgatcctgctggcccagctgaagcccgagaaggatagcgacgaagccgtgacatatagcctgggaaagtttgggcagagggccctggatttctacagcattcatgtgaccaaggagtccacccaccccgtgaagcccctggcccagatcgccggaaacagatacgcctccggacctgtgggaaaggccctgagcgacgcatgtatgggcacaatcgcctccttcctgtctaagtaccaggacatcatcatcgaacaccagaaggtggtgaagggcaaccagaagagactggagagcctgcgggagctggccggcaaggaaaacctggaataccctagcgtgaccctgccacctcagcctcacaccaaggagggcgttgatgcctacaacgaagtgatcgcccgggtgcgaatgtgggtgaacctgaacctgtggcagaagctgaagctaagcagagatgatgccaagcctctgctgagactgaagggattcccttcctttcctctggtcgagagacaggccaacgaagtggactggtgggacatggtgtgtaacgtgaagaagctgatcaacgagaaaaaggaggatggcaaggtgttttggcagaatctggctggctacaagagacaggaagccctgagaccatacctgagcagcgaggaagatcggaagaagggaaagaaattcgctcggtaccagctgggcgacctgctgctgcacctggaaaagaagcacggcgaggactggggaaaggtgtacgacgaggcctgggagcggattgacaagaaagtggaaggcctgagcaagcacatcaagctggaagaggaacggagaagcgaggacgcccagagcaaggccgccctgaccgactggctgcgggctaaggccagcttcgtgatcgagggcctgaaggaggccgacaaggacgagttctgcagatgcgagctgaagctgcagaagtggtacggggacctgcggggaaagcccttcgccatcgaagccgagaacagcatcctggacatcagcggcttcagcaagcagtacaactgtgccttcatctggcagaaggacggcgtgaagaagctgaacctgtacctgatcatcaactacttcaagggcggcaagctgcggttcaagaagatcaaacctgaagccttcgaagccaacagattctacaccgtgatcaacaaaaagagcggcgagatcgtgcccatggaggtgaacttcaacttcgacgaccccaacctgatcatcctgcctctggcctttggcaagagacagggcagagaattcatctggaacgacctgctgtccctggaaaccggcagcctgaagctggccaacggaagagtgatcgagaagacactgtacaacagaagaacccggcaggatgagcctgccctgttcgtggccctgaccttcgagcggcgggaggtcctggactcctccaatatcaaaccaatgaacctgatcggcgtggcaagaggcgaaaacatccccgccgtgatcgccctgaccgaccccgagggctgcccactgagccggtttaaggatagcctgggaaacccaacccacatcctgagaatcggcgagagctataaggagaagcagcggaccatccaggccaagaaggaggtggagcagcggagagccggcggctacagccggaagtacgccagcaaagccaagaatctggcagacgatatggtgagaaacaccgctagagatctgctgtactacgccgtgacccaggatgccatgctgatcttcgccaacctgagccggggcttcggccggcagggcaagcggaccttcatggccgagagacagtacacacggatggaggactggctgaccgccaagctggcctacgagggcctgagcaagacctacctgtccaagacactggcccagtacacctccaagacatgcagcaactgtgggtttaccatcaccagcgccgactacgacagggtgctggagaagctgaagaagacagcaacaggctggatgaccacaattaacggcaaggagctgaaggtggagggccagattacctactacaacagatacaagagacagaacgtagtcaaggacctgtccgtcgagctggatagactgagcgaagaatctgtgaacaacgacatctcctcctggacaaagggcagaagcggagaagctctgagcctcctgaagaaaagattctcccatagacccgtgcaggagaagttcgtgtgcctgaactgcggcttcgagacacacgcagccgagcaagccgccctgaacatcgccagatcctggctgttcctgcggagccaggagtacaagaaataccagacaaacaagacaaccggcaacaccgataagagagccttcgtcgagacctggcagtccttttaccggaagaagcttaaggaggtgtggaaacctgccgtgcggtctggcggatctggcggaggctcctatggcccacgccctggtgaccttcagggacgtggccatcgacttcagccagaaggagtgggagtgcctggacaccacccagaggaagctgtacagggacgtgatgctggagaactacaacaacctggtgagcctgggctacagcggcagcaagcccgacgtgatcaccctgctggagcagggcaaggagccctgcatggccgccagggacgtgaccggcaggcagtaccccggcctgctgagcggatctggctccggcagcggccccaagaaaaagagaaaagtctaagctgccttctgcggggcttgccttctggccatgcccttcttctctcccttgcacctgtacctcttggtctttgaataaagcctgagtaggaaggctagcaaaaaaaaaaaaaaaaaaaaaaaaaaaaaaaaaaaaaaaaaaaaaaaaaaaaaaaaaaaaaaaaaaaaaaaaaaaaaaaa

SEQ ID NO: 15920 - RNA, 9485 nt, synthetic construct
  source 1..9485: mol_type = other RNA
aggaaataagagagaaaagaagagtaagaagaaatataagagccaccatggcccctaagaagaagcgtaaagtgagccggatggaacgcctcgtctacgaggtgcggcagaagtgcagaaacatcgaggacatctgcatctcctgcggatctctgaacgtgaccctggagcacccactgttcatcggcggcatgtgccagaactgtaaaaactgttttctggagtgtgcctatcaatacgacgatgacggctaccagagctactgcaccatctgttgcggcggaagagaggtgctgatgtgtggaaataacaactgctgccggtgcttctgcgtggaatgcgtggacctgctggtgggccccggcgccgcccaggccgctattaaggaagatccttggaactgctacatgtgcggccacaagggcacatacggcctgctgagacggagagaggactggcctagcagactgcagatgttcttcgccaataaccacgaccaggagttcgacccccctaaggtgtaccctcccgtccccgccgagaagagaaagcccatccgggtcctgagcctgttcgatggcatcgccaccggtctgctggtgctgaaggacctgggcatccaggtggataggtacattgcctccgaggtgtgcgaggactccatcaccgtgggaatggtgcgtcatcagggcaagatcatgtacgtgggcgacgtgcggagcgtgacacagaagcatatccaggagtggggccctttcgacctggtgatcggcggcagcccttgcaatgacctgagcatcgtgaacccagcccggaagggcctgtacgagggaaccggcagactgttcttcgagttttacagactgctgcacgacgcccggcctaaggaaggcgacgaccggcccttcttttggctgttcgagaatgtggtggccatgggagtcagcgacaagcgggatattagccggttcctggagagcaaccccgtgatgatcgatgccaaggaagtgagcgccgcccaccgggccagatacttctggggcaatctgcctggcatgaacagacccctggccagcaccgtgaacgacaagctggagctgcaggagtgcctggagcacggccggatcgccaagttcagcaaggtgagaaccatcaccacccgaagcaacagcatcaaacaaggcaaggaccagcactttcctgtgttcatgaacgagaaggaggacatcctgtggtgtaccgagatggagagagtgttcgggttcccagtccactacacagatgtcagcaacatgtctagactggccagacagagactgctgggaagaagctggtccgtccctgtgatcagacacctgttcgcccctctgaaggagtacttcgcctgcgtgagcagcggcaacagcaacgccaacagccggggccccagcttctctagcggcctggtgccactgtccctgagagggagccacatgggccccatggagatctacaaaaccgtgagcgcctggaagcggcagcctgtgcgcgtgctgagcctgtttcggaatatcgataaagtcctgaaaagcctgggattcctggagagcggctctggctccggcggtggcaccctgaagtacgtggaggatgtgacaaacgtggtcagacgggatgtggagaagtggggccccttcgatctggtgtacggcagcacccaacccctgggcagctcttgtgaccggtgccctggctggtacatgtttcagttccaccggatcctgcagtacgccctgccgagacaggagtcccagcggccattcttttggattttcatggacaacttgctgctgaccgaggatgaccaggaaactaccactcggttcctgcagaccgaagccgtgaccctgcaggacgtgagaggccgggactaccagaacgccatgcgggtgtggtccaacatccctggactgaaaagcaagcacgcacctctgacccctaaagaagaggagtacctgcaggcccaggtgcggagcagaagcaagctggacgcccctaaggtggatctgctggtgaagaattgcctcctgcccctgagagagtacttcaagtatttcagccagaatagtctgcccctgggaggcagcggcggcggcgccctggtgacatttgaggacgtcgccgtgcggttcacccaggaggaatgggctctgctggatccttctcagaaaatcctgtaccgggacgtgatgagagagacataccggaatctgacctccgtgggcatcaactgggaatgttgggaccttgaagcctgcttcagaagcctgggaagaaacctgagagtgcaggtggtgaagagaaagtgcgagctgaccaacagcggcccctgcgccgagggcggcccaagcagcggcgcccctcctcccagcggcggcagcccagccggctccccaacctctaccgaggagggcacctctgagtccgccacccccgagagcggccctggcacctccaccgagcccagcgagggcagcgcacccggcagccctgccggcagccccacctccacagaggagggaaccagcaccgagcccagcgaaggcagcgccccaggcaccagcaccgagcctagtgagcaggagattaaacggatcaacaagatcagaagaagacttgtgaaagacagcaacaccaagaaggccggcaagacaggccccatgaaaaccctgctggttagagtgatgacacccgatctgagagagcggctggaaaacctgagaaagaagcctgaaaatatcccccagcccatcagcaatacatctagagccaacctgaataagctgctgaccgattacaccgaaatgaagaaggcgatcctgcatgtgtactgggaagagttccagaaggaccctgtgggcctgatgagccgggtggcccagcctgccagcaagaagatcgatcagaacaagctgaaacctgagatggacgagaagggcaacctgaccaccgccggctttgcctgctctcagtgtggccagcccctgttcgtgtacaagctggagcaggtgtctgagaagggcaaggcttacaccaactacttcggacggtgcaatgtggccgagcacgaaaagctgatcctgctggcccagctgaagcccgagaaggatagcgacgaagccgtgacatatagcctgggaaagtttgggcagagggccctggatttctacagcattcatgtgaccaaggagtccacccaccccgtgaagcccctggcccagatcgccggaaacagatacgcctccggacctgtgggaaaggccctgagcgacgcatgtatgggcacaatcgcctccttcctgtctaagtaccaggacatcatcatcgaacaccagaaggtggtgaagggcaaccagaagagactggagagcctgcgggagctggccggcaaggaaaacctggaataccctagcgtgaccctgccacctcagcctcacaccaaggagggcgttgatgcctacaacgaagtgatcgcccgggtgcgaatgtgggtgaacctgaacctgtggcagaagctgaagctaagcagagatgatgccaagcctctgctgagactgaagggattcccttcctttcctctggtcgagagacaggccaacgaagtggactggtgggacatggtgtgtaacgtgaagaagctgatcaacgagaaaaaggaggatggcaaggtgttttggcagaatctggctggctacaagagacaggaagccctgagaccatacctgagcagcgaggaagatcggaagaagggaaagaaattcgctcggtaccagctgggcgacctgctgctgcacctggaaaagaagcacggcgaggactggggaaaggtgtacgacgaggcctgggagcggattgacaagaaagtggaaggcctgagcaagcacatcaagctggaagaggaacggagaagcgaggacgcccagagcaaggccgccctgaccgactggctgcgggctaaggccagcttcgtgatcgagggcctgaaggaggccgacaaggacgagttctgcagatgcgagctgaagctgcagaagtggtacggggacctgcggggaaagcccttcgccatcgaagccgagaacagcatcctggacatcagcggcttcagcaagcagtacaactgtgccttcatctggcagaaggacggcgtgaagaagctgaacctgtacctgatcatcaactacttcaagggcggcaagctgcggttcaagaagatcaaacctgaagccttcgaagccaacagattctacaccgtgatcaacaaaaagagcggcgagatcgtgcccatggaggtgaacttcaacttcgacgaccccaacctgatcatcctgcctctggcctttggcaagagacagggcagagaattcatctggaacgacctgctgtccctggaaaccggcagcctgaagctggccaacggaagagtgatcgagaagacactgtacaacagaagaacccggcaggatgagcctgccctgttcgtggccctgaccttcgagcggcgggaggtcctggactcctccaatatcaaaccaatgaacctgatcggcgtggcaagaggcgaaaacatccccgccgtgatcgccctgaccgaccccgagggctgcccactgagccggtttaaggatagcctgggaaacccaacccacatcctgagaatcggcgagagctataaggagaagcagcggaccatccaggccaagaaggaggtggagcagcggagagccggcggctacagccggaagtacgccagcaaagccaagaatctggcagacgatatggtgagaaacaccgctagagatctgctgtactacgccgtgacccaggatgccatgctgatcttcgccaacctgagccggggcttcggccggcagggcaagcggaccttcatggccgagagacagtacacacggatggaggactggctgaccgccaagctggcctacgagggcctgagcaagacctacctgtccaagacactggcccagtacacctccaagacatgcagcaactgtgggtttaccatcaccagcgccgactacgacagggtgctggagaagctgaagaagacagcaacaggctggatgaccacaattaacggcaaggagctgaaggtggagggccagattacctactacaacagatacaagagacagaacgtagtcaaggacctgtccgtcgagctggatagactgagcgaagaatctgtgaacaacgacatctcctcctggacaaagggcagaagcggagaagctctgagcctcctgaagaaaagattctcccatagacccgtgcaggagaagttcgtgtgcctgaactgcggcttcgagacacacgcagccgagcaagccgccctgaacatcgccagatcctggctgttcctgcggagccaggagtacaagaaataccagacaaacaagacaaccggcaacaccgataagagagccttcgtcgagacctggcagtccttttaccggaagaagcttaaggaggtgtggaaacctgccgtgcggtctggcggatctggcggaggctccatgcccgtgaccttcgaggacgtggccgtgtacttcacccagggccagggcgccctgctggaccccacccagagggccctgtacagggacgtgatgcaggagaactacgagaccgtgaccagcctgggcaagagcgtgaagggcttccccctggccaagcccgacctgatcaccaggctggagaggggcgaggagccctgggtgagcgacctgcaggccaccggcgacgagaggatgagcgagggcggcccaagcagcggcgcccctcctcccagcggcggcagcccagccggctccccaacctctaccgaggagggcacctctgagtccgccacccccgagagcggccctggcacctccaccgagcccagcgagggcagcgcacccggcagccctgccggcagccccacctccacagaggagggaaccagcaccgagcccagcgaaggcagcgccccaggcaccagcaccgagcctagtgagcaggagattaaacggatcaacaagatcagaagaagacttgtgaaagacagcaacaccaagaaggccggcaagacaggccccatgaaaaccctgctggttagagtgatgacacccgatctgagagagcggctggaaaacctgagaaagaagcctgaaaatatcccccagcccatcagcaatacatctagagccaacctgaataagctgctgaccgattacaccgaaatgaagaaggcgatcctgcatgtgtactgggaagagttccagaaggaccctgtgggcctgatgagccgggtggcccagcctgccagcaagaagatcgatcagaacaagctgaaacctgagatggacgagaagggcaacctgaccaccgccggctttgcctgctctcagtgtggccagcccctgttcgtgtacaagctggagcaggtgtctgagaagggcaaggcttacaccaactacttcggacggtgcaatgtggccgagcacgaaaagctgatcctgctggcccagctgaagcccgagaaggatagcgacgaagccgtgacatatagcctgggaaagtttgggcagagggccctggatttctacagcattcatgtgaccaaggagtccacccaccccgtgaagcccctggcccagatcgccggaaacagatacgcctccggacctgtgggaaaggccctgagcgacgcatgtatgggcacaatcgcctccttcctgtctaagtaccaggacatcatcatcgaacaccagaaggtggtgaagggcaaccagaagagactggagagcctgcgggagctggccggcaaggaaaacctggaataccctagcgtgaccctgccacctcagcctcacaccaaggagggcgttgatgcctacaacgaagtgatcgcccgggtgcgaatgtgggtgaacctgaacctgtggcagaagctgaagctaagcagagatgatgccaagcctctgctgagactgaagggattcccttcctttcctctggtcgagagacaggccaacgaagtggactggtgggacatggtgtgtaacgtgaagaagctgatcaacgagaaaaaggaggatggcaaggtgttttggcagaatctggctggctacaagagacaggaagccctgagaccatacctgagcagcgaggaagatcggaagaagggaaagaaattcgctcggtaccagctgggcgacctgctgctgcacctggaaaagaagcacggcgaggactggggaaaggtgtacgacgaggcctgggagcggattgacaagaaagtggaaggcctgagcaagcacatcaagctggaagaggaacggagaagcgaggacgcccagagcaaggccgccctgaccgactggctgcgggctaaggccagcttcgtgatcgagggcctgaaggaggccgacaaggacgagttctgcagatgcgagctgaagctgcagaagtggtacggggacctgcggggaaagcccttcgccatcgaagccgagaacagcatcctggacatcagcggcttcagcaagcagtacaactgtgccttcatctggcagaaggacggcgtgaagaagctgaacctgtacctgatcatcaactacttcaagggcggcaagctgcggttcaagaagatcaaacctgaagccttcgaagccaacagattctacaccgtgatcaacaaaaagagcggcgagatcgtgcccatggaggtgaacttcaacttcgacgaccccaacctgatcatcctgcctctggcctttggcaagagacagggcagagaattcatctggaacgacctgctgtccctggaaaccggcagcctgaagctggccaacggaagagtgatcgagaagacactgtacaacagaagaacccggcaggatgagcctgccctgttcgtggccctgaccttcgagcggcgggaggtcctggactcctccaatatcaaaccaatgaacctgatcggcgtggcaagaggcgaaaacatccccgccgtgatcgccctgaccgaccccgagggctgcccactgagccggtttaaggatagcctgggaaacccaacccacatcctgagaatcggcgagagctataaggagaagcagcggaccatccaggccaagaaggaggtggagcagcggagagccggcggctacagccggaagtacgccagcaaagccaagaatctggcagacgatatggtgagaaacaccgctagagatctgctgtactacgccgtgacccaggatgccatgctgatcttcgccaacctgagccggggcttcggccggcagggcaagcggaccttcatggccgagagacagtacacacggatggaggactggctgaccgccaagctggcctacgagggcctgagcaagacctacctgtccaagacactggcccagtacacctccaagacatgcagcaactgtgggtttaccatcaccagcgccgactacgacagggtgctggagaagctgaagaagacagcaacaggctggatgaccacaattaacggcaaggagctgaaggtggagggccagattacctactacaacagatacaagagacagaacgtagtcaaggacctgtccgtcgagctggatagactgagcgaagaatctgtgaacaacgacatctcctcctggacaaagggcagaagcggagaagctctgagcctcctgaagaaaagattctcccatagacccgtgcaggagaagttcgtgtgcctgaactgcggcttcgagacacacgcagccgagcaagccgccctgaacatcgccagatcctggctgttcctgcggagccaggagtacaagaaataccagacaaacaagacaaccggcaacaccgataagagagccttcgtcgagacctggcagtccttttaccggaagaagcttaaggaggtgtggaaacctgccgtgcggtctggcggatctggcggaggctcctatgcccgtgaccttcgaggacgtggccgtgtacttcacccagggccagggcgccctgctggaccccacccagagggccctgtacagggacgtgatgcaggagaactacgagaccgtgaccagcctgggcaagagcgtgaagggcttccccctggccaagcccgacctgatcaccaggctggagaggggcgaggagccctgggtgagcgacctgcaggccaccggcgacgagaggatgagcgagggatctggctccggcagcggccccaagaaaaagagaaaagtctaagctgccttctgcggggcttgccttctggccatgcccttcttctctcccttgcacctgtacctcttggtctttgaataaagcctgagtaggaaggctagcaaaaaaaaaaaaaaaaaaaaaaaaaaaaaaaaaaaaaaaaaaaaaaaaaaaaaaaaaaaaaaaaaaaaaaaaaaaaaaaa

SEQ ID NO: 15921 - RNA, 9485 nt, synthetic construct
  source 1..9485: mol_type = other RNA
aggaaataagagagaaaagaagagtaagaagaaatataagagccaccatggcccctaagaagaagcgtaaagtgagccggatggaacgcctcgtctacgaggtgcggcagaagtgcagaaacatcgaggacatctgcatctcctgcggatctctgaacgtgaccctggagcacccactgttcatcggcggcatgtgccagaactgtaaaaactgttttctggagtgtgcctatcaatacgacgatgacggctaccagagctactgcaccatctgttgcggcggaagagaggtgctgatgtgtggaaataacaactgctgccggtgcttctgcgtggaatgcgtggacctgctggtgggccccggcgccgcccaggccgctattaaggaagatccttggaactgctacatgtgcggccacaagggcacatacggcctgctgagacggagagaggactggcctagcagactgcagatgttcttcgccaataaccacgaccaggagttcgacccccctaaggtgtaccctcccgtccccgccgagaagagaaagcccatccgggtcctgagcctgttcgatggcatcgccaccggtctgctggtgctgaaggacctgggcatccaggtggataggtacattgcctccgaggtgtgcgaggactccatcaccgtgggaatggtgcgtcatcagggcaagatcatgtacgtgggcgacgtgcggagcgtgacacagaagcatatccaggagtggggccctttcgacctggtgatcggcggcagcccttgcaatgacctgagcatcgtgaacccagcccggaagggcctgtacgagggaaccggcagactgttcttcgagttttacagactgctgcacgacgcccggcctaaggaaggcgacgaccggcccttcttttggctgttcgagaatgtggtggccatgggagtcagcgacaagcgggatattagccggttcctggagagcaaccccgtgatgatcgatgccaaggaagtgagcgccgcccaccgggccagatacttctggggcaatctgcctggcatgaacagacccctggccagcaccgtgaacgacaagctggagctgcaggagtgcctggagcacggccggatcgccaagttcagcaaggtgagaaccatcaccacccgaagcaacagcatcaaacaaggcaaggaccagcactttcctgtgttcatgaacgagaaggaggacatcctgtggtgtaccgagatggagagagtgttcgggttcccagtccactacacagatgtcagcaacatgtctagactggccagacagagactgctgggaagaagctggtccgtccctgtgatcagacacctgttcgcccctctgaaggagtacttcgcctgcgtgagcagcggcaacagcaacgccaacagccggggccccagcttctctagcggcctggtgccactgtccctgagagggagccacatgggccccatggagatctacaaaaccgtgagcgcctggaagcggcagcctgtgcgcgtgctgagcctgtttcggaatatcgataaagtcctgaaaagcctgggattcctggagagcggctctggctccggcggtggcaccctgaagtacgtggaggatgtgacaaacgtggtcagacgggatgtggagaagtggggccccttcgatctggtgtacggcagcacccaacccctgggcagctcttgtgaccggtgccctggctggtacatgtttcagttccaccggatcctgcagtacgccctgccgagacaggagtcccagcggccattcttttggattttcatggacaacttgctgctgaccgaggatgaccaggaaactaccactcggttcctgcagaccgaagccgtgaccctgcaggacgtgagaggccgggactaccagaacgccatgcgggtgtggtccaacatccctggactgaaaagcaagcacgcacctctgacccctaaagaagaggagtacctgcaggcccaggtgcggagcagaagcaagctggacgcccctaaggtggatctgctggtgaagaattgcctcctgcccctgagagagtacttcaagtatttcagccagaatagtctgcccctgggaggcagcggcggcggcgccctggtgacatttgaggacgtcgccgtgcggttcacccaggaggaatgggctctgctggatccttctcagaaaatcctgtaccgggacgtgatgagagagacataccggaatctgacctccgtgggcatcaactgggaatgttgggaccttgaagcctgcttcagaagcctgggaagaaacctgagagtgcaggtggtgaagagaaagtgcgagctgaccaacagcggcccctgcgccgagggcggcccaagcagcggcgcccctcctcccagcggcggcagcccagccggctccccaacctctaccgaggagggcacctctgagtccgccacccccgagagcggccctggcacctccaccgagcccagcgagggcagcgcacccggcagccctgccggcagccccacctccacagaggagggaaccagcaccgagcccagcgaaggcagcgccccaggcaccagcaccgagcctagtgagcaggagattaaacggatcaacaagatcagaagaagacttgtgaaagacagcaacaccaagaaggccggcaagacaggccccatgaaaaccctgctggttagagtgatgacacccgatctgagagagcggctggaaaacctgagaaagaagcctgaaaatatcccccagcccatcagcaatacatctagagccaacctgaataagctgctgaccgattacaccgaaatgaagaaggcgatcctgcatgtgtactgggaagagttccagaaggaccctgtgggcctgatgagccgggtggcccagcctgccagcaagaagatcgatcagaacaagctgaaacctgagatggacgagaagggcaacctgaccaccgccggctttgcctgctctcagtgtggccagcccctgttcgtgtacaagctggagcaggtgtctgagaagggcaaggcttacaccaactacttcggacggtgcaatgtggccgagcacgaaaagctgatcctgctggcccagctgaagcccgagaaggatagcgacgaagccgtgacatatagcctgggaaagtttgggcagagggccctggatttctacagcattcatgtgaccaaggagtccacccaccccgtgaagcccctggcccagatcgccggaaacagatacgcctccggacctgtgggaaaggccctgagcgacgcatgtatgggcacaatcgcctccttcctgtctaagtaccaggacatcatcatcgaacaccagaaggtggtgaagggcaaccagaagagactggagagcctgcgggagctggccggcaaggaaaacctggaataccctagcgtgaccctgccacctcagcctcacaccaaggagggcgttgatgcctacaacgaagtgatcgcccgggtgcgaatgtgggtgaacctgaacctgtggcagaagctgaagctaagcagagatgatgccaagcctctgctgagactgaagggattcccttcctttcctctggtcgagagacaggccaacgaagtggactggtgggacatggtgtgtaacgtgaagaagctgatcaacgagaaaaaggaggatggcaaggtgttttggcagaatctggctggctacaagagacaggaagccctgagaccatacctgagcagcgaggaagatcggaagaagggaaagaaattcgctcggtaccagctgggcgacctgctgctgcacctggaaaagaagcacggcgaggactggggaaaggtgtacgacgaggcctgggagcggattgacaagaaagtggaaggcctgagcaagcacatcaagctggaagaggaacggagaagcgaggacgcccagagcaaggccgccctgaccgactggctgcgggctaaggccagcttcgtgatcgagggcctgaaggaggccgacaaggacgagttctgcagatgcgagctgaagctgcagaagtggtacggggacctgcggggaaagcccttcgccatcgaagccgagaacagcatcctggacatcagcggcttcagcaagcagtacaactgtgccttcatctggcagaaggacggcgtgaagaagctgaacctgtacctgatcatcaactacttcaagggcggcaagctgcggttcaagaagatcaaacctgaagccttcgaagccaacagattctacaccgtgatcaacaaaaagagcggcgagatcgtgcccatggaggtgaacttcaacttcgacgaccccaacctgatcatcctgcctctggcctttggcaagagacagggcagagaattcatctggaacgacctgctgtccctggaaaccggcagcctgaagctggccaacggaagagtgatcgagaagacactgtacaacagaagaacccggcaggatgagcctgccctgttcgtggccctgaccttcgagcggcgggaggtcctggactcctccaatatcaaaccaatgaacctgatcggcgtggcaagaggcgaaaacatccccgccgtgatcgccctgaccgaccccgagggctgcccactgagccggtttaaggatagcctgggaaacccaacccacatcctgagaatcggcgagagctataaggagaagcagcggaccatccaggccaagaaggaggtggagcagcggagagccggcggctacagccggaagtacgccagcaaagccaagaatctggcagacgatatggtgagaaacaccgctagagatctgctgtactacgccgtgacccaggatgccatgctgatcttcgccaacctgagccggggcttcggccggcagggcaagcggaccttcatggccgagagacagtacacacggatggaggactggctgaccgccaagctggcctacgagggcctgagcaagacctacctgtccaagacactggcccagtacacctccaagacatgcagcaactgtgggtttaccatcaccagcgccgactacgacagggtgctggagaagctgaagaagacagcaacaggctggatgaccacaattaacggcaaggagctgaaggtggagggccagattacctactacaacagatacaagagacagaacgtagtcaaggacctgtccgtcgagctggatagactgagcgaagaatctgtgaacaacgacatctcctcctggacaaagggcagaagcggagaagctctgagcctcctgaagaaaagattctcccatagacccgtgcaggagaagttcgtgtgcctgaactgcggcttcgagacacacgcagccgagcaagccgccctgaacatcgccagatcctggctgttcctgcggagccaggagtacaagaaataccagacaaacaagacaaccggcaacaccgataagagagccttcgtcgagacctggcagtccttttaccggaagaagcttaaggaggtgtggaaacctgccgtgcggtctggcggatctggcggaggctccggcaagatgagcgtgaccttcgaggacgtggccctgtacttcagccccgaggagtgggccaagctgagcggctgccagaggcagctgtacagggaggtgatgctggagaactaccagatggtggccagcctgggctgggccaacatcaagcccgagatcatctgcaagatggagagggaggagaccctgtgcgtgcccgccccccccagggagtggcagagggaccagagccccgtgcccgccggcggcccaagcagcggcgcccctcctcccagcggcggcagcccagccggctccccaacctctaccgaggagggcacctctgagtccgccacccccgagagcggccctggcacctccaccgagcccagcgagggcagcgcacccggcagccctgccggcagccccacctccacagaggagggaaccagcaccgagcccagcgaaggcagcgccccaggcaccagcaccgagcctagtgagcaggagattaaacggatcaacaagatcagaagaagacttgtgaaagacagcaacaccaagaaggccggcaagacaggccccatgaaaaccctgctggttagagtgatgacacccgatctgagagagcggctggaaaacctgagaaagaagcctgaaaatatcccccagcccatcagcaatacatctagagccaacctgaataagctgctgaccgattacaccgaaatgaagaaggcgatcctgcatgtgtactgggaagagttccagaaggaccctgtgggcctgatgagccgggtggcccagcctgccagcaagaagatcgatcagaacaagctgaaacctgagatggacgagaagggcaacctgaccaccgccggctttgcctgctctcagtgtggccagcccctgttcgtgtacaagctggagcaggtgtctgagaagggcaaggcttacaccaactacttcggacggtgcaatgtggccgagcacgaaaagctgatcctgctggcccagctgaagcccgagaaggatagcgacgaagccgtgacatatagcctgggaaagtttgggcagagggccctggatttctacagcattcatgtgaccaaggagtccacccaccccgtgaagcccctggcccagatcgccggaaacagatacgcctccggacctgtgggaaaggccctgagcgacgcatgtatgggcacaatcgcctccttcctgtctaagtaccaggacatcatcatcgaacaccagaaggtggtgaagggcaaccagaagagactggagagcctgcgggagctggccggcaaggaaaacctggaataccctagcgtgaccctgccacctcagcctcacaccaaggagggcgttgatgcctacaacgaagtgatcgcccgggtgcgaatgtgggtgaacctgaacctgtggcagaagctgaagctaagcagagatgatgccaagcctctgctgagactgaagggattcccttcctttcctctggtcgagagacaggccaacgaagtggactggtgggacatggtgtgtaacgtgaagaagctgatcaacgagaaaaaggaggatggcaaggtgttttggcagaatctggctggctacaagagacaggaagccctgagaccatacctgagcagcgaggaagatcggaagaagggaaagaaattcgctcggtaccagctgggcgacctgctgctgcacctggaaaagaagcacggcgaggactggggaaaggtgtacgacgaggcctgggagcggattgacaagaaagtggaaggcctgagcaagcacatcaagctggaagaggaacggagaagcgaggacgcccagagcaaggccgccctgaccgactggctgcgggctaaggccagcttcgtgatcgagggcctgaaggaggccgacaaggacgagttctgcagatgcgagctgaagctgcagaagtggtacggggacctgcggggaaagcccttcgccatcgaagccgagaacagcatcctggacatcagcggcttcagcaagcagtacaactgtgccttcatctggcagaaggacggcgtgaagaagctgaacctgtacctgatcatcaactacttcaagggcggcaagctgcggttcaagaagatcaaacctgaagccttcgaagccaacagattctacaccgtgatcaacaaaaagagcggcgagatcgtgcccatggaggtgaacttcaacttcgacgaccccaacctgatcatcctgcctctggcctttggcaagagacagggcagagaattcatctggaacgacctgctgtccctggaaaccggcagcctgaagctggccaacggaagagtgatcgagaagacactgtacaacagaagaacccggcaggatgagcctgccctgttcgtggccctgaccttcgagcggcgggaggtcctggactcctccaatatcaaaccaatgaacctgatcggcgtggcaagaggcgaaaacatccccgccgtgatcgccctgaccgaccccgagggctgcccactgagccggtttaaggatagcctgggaaacccaacccacatcctgagaatcggcgagagctataaggagaagcagcggaccatccaggccaagaaggaggtggagcagcggagagccggcggctacagccggaagtacgccagcaaagccaagaatctggcagacgatatggtgagaaacaccgctagagatctgctgtactacgccgtgacccaggatgccatgctgatcttcgccaacctgagccggggcttcggccggcagggcaagcggaccttcatggccgagagacagtacacacggatggaggactggctgaccgccaagctggcctacgagggcctgagcaagacctacctgtccaagacactggcccagtacacctccaagacatgcagcaactgtgggtttaccatcaccagcgccgactacgacagggtgctggagaagctgaagaagacagcaacaggctggatgaccacaattaacggcaaggagctgaaggtggagggccagattacctactacaacagatacaagagacagaacgtagtcaaggacctgtccgtcgagctggatagactgagcgaagaatctgtgaacaacgacatctcctcctggacaaagggcagaagcggagaagctctgagcctcctgaagaaaagattctcccatagacccgtgcaggagaagttcgtgtgcctgaactgcggcttcgagacacacgcagccgagcaagccgccctgaacatcgccagatcctggctgttcctgcggagccaggagtacaagaaataccagacaaacaagacaaccggcaacaccgataagagagccttcgtcgagacctggcagtccttttaccggaagaagcttaaggaggtgtggaaacctgccgtgcggtctggcggatctggcggaggctcctggcaagatgagcgtgaccttcgaggacgtggccctgtacttcagccccgaggagtgggccaagctgagcggctgccagaggcagctgtacagggaggtgatgctggagaactaccagatggtggccagcctgggctgggccaacatcaagcccgagatcatctgcaagatggagagggaggagaccctgtgcgtgcccgccccccccagggagtggcagagggaccagagccccgtgcccgccggatctggctccggcagcggccccaagaaaaagagaaaagtctaagctgccttctgcggggcttgccttctggccatgcccttcttctctcccttgcacctgtacctcttggtctttgaataaagcctgagtaggaaggctagcaaaaaaaaaaaaaaaaaaaaaaaaaaaaaaaaaaaaaaaaaaaaaaaaaaaaaaaaaaaaaaaaaaaaaaaaaaaaaaaa

SEQ ID NO: 15922 - RNA, 9485 nt, synthetic construct
  source 1..9485: mol_type = other RNA
aggaaataagagagaaaagaagagtaagaagaaatataagagccaccatggcccctaagaagaagcgtaaagtgagccggatggaacgcctcgtctacgaggtgcggcagaagtgcagaaacatcgaggacatctgcatctcctgcggatctctgaacgtgaccctggagcacccactgttcatcggcggcatgtgccagaactgtaaaaactgttttctggagtgtgcctatcaatacgacgatgacggctaccagagctactgcaccatctgttgcggcggaagagaggtgctgatgtgtggaaataacaactgctgccggtgcttctgcgtggaatgcgtggacctgctggtgggccccggcgccgcccaggccgctattaaggaagatccttggaactgctacatgtgcggccacaagggcacatacggcctgctgagacggagagaggactggcctagcagactgcagatgttcttcgccaataaccacgaccaggagttcgacccccctaaggtgtaccctcccgtccccgccgagaagagaaagcccatccgggtcctgagcctgttcgatggcatcgccaccggtctgctggtgctgaaggacctgggcatccaggtggataggtacattgcctccgaggtgtgcgaggactccatcaccgtgggaatggtgcgtcatcagggcaagatcatgtacgtgggcgacgtgcggagcgtgacacagaagcatatccaggagtggggccctttcgacctggtgatcggcggcagcccttgcaatgacctgagcatcgtgaacccagcccggaagggcctgtacgagggaaccggcagactgttcttcgagttttacagactgctgcacgacgcccggcctaaggaaggcgacgaccggcccttcttttggctgttcgagaatgtggtggccatgggagtcagcgacaagcgggatattagccggttcctggagagcaaccccgtgatgatcgatgccaaggaagtgagcgccgcccaccgggccagatacttctggggcaatctgcctggcatgaacagacccctggccagcaccgtgaacgacaagctggagctgcaggagtgcctggagcacggccggatcgccaagttcagcaaggtgagaaccatcaccacccgaagcaacagcatcaaacaaggcaaggaccagcactttcctgtgttcatgaacgagaaggaggacatcctgtggtgtaccgagatggagagagtgttcgggttcccagtccactacacagatgtcagcaacatgtctagactggccagacagagactgctgggaagaagctggtccgtccctgtgatcagacacctgttcgcccctctgaaggagtacttcgcctgcgtgagcagcggcaacagcaacgccaacagccggggccccagcttctctagcggcctggtgccactgtccctgagagggagccacatgggccccatggagatctacaaaaccgtgagcgcctggaagcggcagcctgtgcgcgtgctgagcctgtttcggaatatcgataaagtcctgaaaagcctgggattcctggagagcggctctggctccggcggtggcaccctgaagtacgtggaggatgtgacaaacgtggtcagacgggatgtggagaagtggggccccttcgatctggtgtacggcagcacccaacccctgggcagctcttgtgaccggtgccctggctggtacatgtttcagttccaccggatcctgcagtacgccctgccgagacaggagtcccagcggccattcttttggattttcatggacaacttgctgctgaccgaggatgaccaggaaactaccactcggttcctgcagaccgaagccgtgaccctgcaggacgtgagaggccgggactaccagaacgccatgcgggtgtggtccaacatccctggactgaaaagcaagcacgcacctctgacccctaaagaagaggagtacctgcaggcccaggtgcggagcagaagcaagctggacgcccctaaggtggatctgctggtgaagaattgcctcctgcccctgagagagtacttcaagtatttcagccagaatagtctgcccctgggaggcagcggcggcggcgccctggtgacatttgaggacgtcgccgtgcggttcacccaggaggaatgggctctgctggatccttctcagaaaatcctgtaccgggacgtgatgagagagacataccggaatctgacctccgtgggcatcaactgggaatgttgggaccttgaagcctgcttcagaagcctgggaagaaacctgagagtgcaggtggtgaagagaaagtgcgagctgaccaacagcggcccctgcgccgagggcggcccaagcagcggcgcccctcctcccagcggcggcagcccagccggctccccaacctctaccgaggagggcacctctgagtccgccacccccgagagcggccctggcacctccaccgagcccagcgagggcagcgcacccggcagccctgccggcagccccacctccacagaggagggaaccagcaccgagcccagcgaaggcagcgccccaggcaccagcaccgagcctagtgagcaggagattaaacggatcaacaagatcagaagaagacttgtgaaagacagcaacaccaagaaggccggcaagacaggccccatgaaaaccctgctggttagagtgatgacacccgatctgagagagcggctggaaaacctgagaaagaagcctgaaaatatcccccagcccatcagcaatacatctagagccaacctgaataagctgctgaccgattacaccgaaatgaagaaggcgatcctgcatgtgtactgggaagagttccagaaggaccctgtgggcctgatgagccgggtggcccagcctgccagcaagaagatcgatcagaacaagctgaaacctgagatggacgagaagggcaacctgaccaccgccggctttgcctgctctcagtgtggccagcccctgttcgtgtacaagctggagcaggtgtctgagaagggcaaggcttacaccaactacttcggacggtgcaatgtggccgagcacgaaaagctgatcctgctggcccagctgaagcccgagaaggatagcgacgaagccgtgacatatagcctgggaaagtttgggcagagggccctggatttctacagcattcatgtgaccaaggagtccacccaccccgtgaagcccctggcccagatcgccggaaacagatacgcctccggacctgtgggaaaggccctgagcgacgcatgtatgggcacaatcgcctccttcctgtctaagtaccaggacatcatcatcgaacaccagaaggtggtgaagggcaaccagaagagactggagagcctgcgggagctggccggcaaggaaaacctggaataccctagcgtgaccctgccacctcagcctcacaccaaggagggcgttgatgcctacaacgaagtgatcgcccgggtgcgaatgtgggtgaacctgaacctgtggcagaagctgaagctaagcagagatgatgccaagcctctgctgagactgaagggattcccttcctttcctctggtcgagagacaggccaacgaagtggactggtgggacatggtgtgtaacgtgaagaagctgatcaacgagaaaaaggaggatggcaaggtgttttggcagaatctggctggctacaagagacaggaagccctgagaccatacctgagcagcgaggaagatcggaagaagggaaagaaattcgctcggtaccagctgggcgacctgctgctgcacctggaaaagaagcacggcgaggactggggaaaggtgtacgacgaggcctgggagcggattgacaagaaagtggaaggcctgagcaagcacatcaagctggaagaggaacggagaagcgaggacgcccagagcaaggccgccctgaccgactggctgcgggctaaggccagcttcgtgatcgagggcctgaaggaggccgacaaggacgagttctgcagatgcgagctgaagctgcagaagtggtacggggacctgcggggaaagcccttcgccatcgaagccgagaacagcatcctggacatcagcggcttcagcaagcagtacaactgtgccttcatctggcagaaggacggcgtgaagaagctgaacctgtacctgatcatcaactacttcaagggcggcaagctgcggttcaagaagatcaaacctgaagccttcgaagccaacagattctacaccgtgatcaacaaaaagagcggcgagatcgtgcccatggaggtgaacttcaacttcgacgaccccaacctgatcatcctgcctctggcctttggcaagagacagggcagagaattcatctggaacgacctgctgtccctggaaaccggcagcctgaagctggccaacggaagagtgatcgagaagacactgtacaacagaagaacccggcaggatgagcctgccctgttcgtggccctgaccttcgagcggcgggaggtcctggactcctccaatatcaaaccaatgaacctgatcggcgtggcaagaggcgaaaacatccccgccgtgatcgccctgaccgaccccgagggctgcccactgagccggtttaaggatagcctgggaaacccaacccacatcctgagaatcggcgagagctataaggagaagcagcggaccatccaggccaagaaggaggtggagcagcggagagccggcggctacagccggaagtacgccagcaaagccaagaatctggcagacgatatggtgagaaacaccgctagagatctgctgtactacgccgtgacccaggatgccatgctgatcttcgccaacctgagccggggcttcggccggcagggcaagcggaccttcatggccgagagacagtacacacggatggaggactggctgaccgccaagctggcctacgagggcctgagcaagacctacctgtccaagacactggcccagtacacctccaagacatgcagcaactgtgggtttaccatcaccagcgccgactacgacagggtgctggagaagctgaagaagacagcaacaggctggatgaccacaattaacggcaaggagctgaaggtggagggccagattacctactacaacagatacaagagacagaacgtagtcaaggacctgtccgtcgagctggatagactgagcgaagaatctgtgaacaacgacatctcctcctggacaaagggcagaagcggagaagctctgagcctcctgaagaaaagattctcccatagacccgtgcaggagaagttcgtgtgcctgaactgcggcttcgagacacacgcagccgagcaagccgccctgaacatcgccagatcctggctgttcctgcggagccaggagtacaagaaataccagacaaacaagacaaccggcaacaccgataagagagccttcgtcgagacctggcagtccttttaccggaagaagcttaaggaggtgtggaaacctgccgtgcggtctggcggatctggcggaggctccatgaacaacagccagggcagggtgaccttcgaggacgtgaccgtgaacttcacccagggcgagtggcagaggctgaaccccgagcagaggaacctgtacagggacgtgatgctggagaactacagcaacctggtgagcgtgggccagagggagaccaccaagcccgacgtgatcctgaggctggagcagggcaaggagccctggagcgaggaggaggaggtgctgggcagcggcagggccgagggcggcccaagcagcggcgcccctcctcccagcggcggcagcccagccggctccccaacctctaccgaggagggcacctctgagtccgccacccccgagagcggccctggcacctccaccgagcccagcgagggcagcgcacccggcagccctgccggcagccccacctccacagaggagggaaccagcaccgagcccagcgaaggcagcgccccaggcaccagcaccgagcctagtgagcaggagattaaacggatcaacaagatcagaagaagacttgtgaaagacagcaacaccaagaaggccggcaagacaggccccatgaaaaccctgctggttagagtgatgacacccgatctgagagagcggctggaaaacctgagaaagaagcctgaaaatatcccccagcccatcagcaatacatctagagccaacctgaataagctgctgaccgattacaccgaaatgaagaaggcgatcctgcatgtgtactgggaagagttccagaaggaccctgtgggcctgatgagccgggtggcccagcctgccagcaagaagatcgatcagaacaagctgaaacctgagatggacgagaagggcaacctgaccaccgccggctttgcctgctctcagtgtggccagcccctgttcgtgtacaagctggagcaggtgtctgagaagggcaaggcttacaccaactacttcggacggtgcaatgtggccgagcacgaaaagctgatcctgctggcccagctgaagcccgagaaggatagcgacgaagccgtgacatatagcctgggaaagtttgggcagagggccctggatttctacagcattcatgtgaccaaggagtccacccaccccgtgaagcccctggcccagatcgccggaaacagatacgcctccggacctgtgggaaaggccctgagcgacgcatgtatgggcacaatcgcctccttcctgtctaagtaccaggacatcatcatcgaacaccagaaggtggtgaagggcaaccagaagagactggagagcctgcgggagctggccggcaaggaaaacctggaataccctagcgtgaccctgccacctcagcctcacaccaaggagggcgttgatgcctacaacgaagtgatcgcccgggtgcgaatgtgggtgaacctgaacctgtggcagaagctgaagctaagcagagatgatgccaagcctctgctgagactgaagggattcccttcctttcctctggtcgagagacaggccaacgaagtggactggtgggacatggtgtgtaacgtgaagaagctgatcaacgagaaaaaggaggatggcaaggtgttttggcagaatctggctggctacaagagacaggaagccctgagaccatacctgagcagcgaggaagatcggaagaagggaaagaaattcgctcggtaccagctgggcgacctgctgctgcacctggaaaagaagcacggcgaggactggggaaaggtgtacgacgaggcctgggagcggattgacaagaaagtggaaggcctgagcaagcacatcaagctggaagaggaacggagaagcgaggacgcccagagcaaggccgccctgaccgactggctgcgggctaaggccagcttcgtgatcgagggcctgaaggaggccgacaaggacgagttctgcagatgcgagctgaagctgcagaagtggtacggggacctgcggggaaagcccttcgccatcgaagccgagaacagcatcctggacatcagcggcttcagcaagcagtacaactgtgccttcatctggcagaaggacggcgtgaagaagctgaacctgtacctgatcatcaactacttcaagggcggcaagctgcggttcaagaagatcaaacctgaagccttcgaagccaacagattctacaccgtgatcaacaaaaagagcggcgagatcgtgcccatggaggtgaacttcaacttcgacgaccccaacctgatcatcctgcctctggcctttggcaagagacagggcagagaattcatctggaacgacctgctgtccctggaaaccggcagcctgaagctggccaacggaagagtgatcgagaagacactgtacaacagaagaacccggcaggatgagcctgccctgttcgtggccctgaccttcgagcggcgggaggtcctggactcctccaatatcaaaccaatgaacctgatcggcgtggcaagaggcgaaaacatccccgccgtgatcgccctgaccgaccccgagggctgcccactgagccggtttaaggatagcctgggaaacccaacccacatcctgagaatcggcgagagctataaggagaagcagcggaccatccaggccaagaaggaggtggagcagcggagagccggcggctacagccggaagtacgccagcaaagccaagaatctggcagacgatatggtgagaaacaccgctagagatctgctgtactacgccgtgacccaggatgccatgctgatcttcgccaacctgagccggggcttcggccggcagggcaagcggaccttcatggccgagagacagtacacacggatggaggactggctgaccgccaagctggcctacgagggcctgagcaagacctacctgtccaagacactggcccagtacacctccaagacatgcagcaactgtgggtttaccatcaccagcgccgactacgacagggtgctggagaagctgaagaagacagcaacaggctggatgaccacaattaacggcaaggagctgaaggtggagggccagattacctactacaacagatacaagagacagaacgtagtcaaggacctgtccgtcgagctggatagactgagcgaagaatctgtgaacaacgacatctcctcctggacaaagggcagaagcggagaagctctgagcctcctgaagaaaagattctcccatagacccgtgcaggagaagttcgtgtgcctgaactgcggcttcgagacacacgcagccgagcaagccgccctgaacatcgccagatcctggctgttcctgcggagccaggagtacaagaaataccagacaaacaagacaaccggcaacaccgataagagagccttcgtcgagacctggcagtccttttaccggaagaagcttaaggaggtgtggaaacctgccgtgcggtctggcggatctggcggaggctcctatgaacaacagccagggcagggtgaccttcgaggacgtgaccgtgaacttcacccagggcgagtggcagaggctgaaccccgagcagaggaacctgtacagggacgtgatgctggagaactacagcaacctggtgagcgtgggccagagggagaccaccaagcccgacgtgatcctgaggctggagcagggcaaggagccctggagcgaggaggaggaggtgctgggcagcggcagggccgagggatctggctccggcagcggccccaagaaaaagagaaaagtctaagctgccttctgcggggcttgccttctggccatgcccttcttctctcccttgcacctgtacctcttggtctttgaataaagcctgagtaggaaggctagcaaaaaaaaaaaaaaaaaaaaaaaaaaaaaaaaaaaaaaaaaaaaaaaaaaaaaaaaaaaaaaaaaaaaaaaaaaaaaaaa

SEQ ID NO: 15923 - RNA, 9485 nt, synthetic construct
  source 1..9485: mol_type = other RNA
aggaaataagagagaaaagaagagtaagaagaaatataagagccaccatggcccctaagaagaagcgtaaagtgagccggatggaacgcctcgtctacgaggtgcggcagaagtgcagaaacatcgaggacatctgcatctcctgcggatctctgaacgtgaccctggagcacccactgttcatcggcggcatgtgccagaactgtaaaaactgttttctggagtgtgcctatcaatacgacgatgacggctaccagagctactgcaccatctgttgcggcggaagagaggtgctgatgtgtggaaataacaactgctgccggtgcttctgcgtggaatgcgtggacctgctggtgggccccggcgccgcccaggccgctattaaggaagatccttggaactgctacatgtgcggccacaagggcacatacggcctgctgagacggagagaggactggcctagcagactgcagatgttcttcgccaataaccacgaccaggagttcgacccccctaaggtgtaccctcccgtccccgccgagaagagaaagcccatccgggtcctgagcctgttcgatggcatcgccaccggtctgctggtgctgaaggacctgggcatccaggtggataggtacattgcctccgaggtgtgcgaggactccatcaccgtgggaatggtgcgtcatcagggcaagatcatgtacgtgggcgacgtgcggagcgtgacacagaagcatatccaggagtggggccctttcgacctggtgatcggcggcagcccttgcaatgacctgagcatcgtgaacccagcccggaagggcctgtacgagggaaccggcagactgttcttcgagttttacagactgctgcacgacgcccggcctaaggaaggcgacgaccggcccttcttttggctgttcgagaatgtggtggccatgggagtcagcgacaagcgggatattagccggttcctggagagcaaccccgtgatgatcgatgccaaggaagtgagcgccgcccaccgggccagatacttctggggcaatctgcctggcatgaacagacccctggccagcaccgtgaacgacaagctggagctgcaggagtgcctggagcacggccggatcgccaagttcagcaaggtgagaaccatcaccacccgaagcaacagcatcaaacaaggcaaggaccagcactttcctgtgttcatgaacgagaaggaggacatcctgtggtgtaccgagatggagagagtgttcgggttcccagtccactacacagatgtcagcaacatgtctagactggccagacagagactgctgggaagaagctggtccgtccctgtgatcagacacctgttcgcccctctgaaggagtacttcgcctgcgtgagcagcggcaacagcaacgccaacagccggggccccagcttctctagcggcctggtgccactgtccctgagagggagccacatgggccccatggagatctacaaaaccgtgagcgcctggaagcggcagcctgtgcgcgtgctgagcctgtttcggaatatcgataaagtcctgaaaagcctgggattcctggagagcggctctggctccggcggtggcaccctgaagtacgtggaggatgtgacaaacgtggtcagacgggatgtggagaagtggggccccttcgatctggtgtacggcagcacccaacccctgggcagctcttgtgaccggtgccctggctggtacatgtttcagttccaccggatcctgcagtacgccctgccgagacaggagtcccagcggccattcttttggattttcatggacaacttgctgctgaccgaggatgaccaggaaactaccactcggttcctgcagaccgaagccgtgaccctgcaggacgtgagaggccgggactaccagaacgccatgcgggtgtggtccaacatccctggactgaaaagcaagcacgcacctctgacccctaaagaagaggagtacctgcaggcccaggtgcggagcagaagcaagctggacgcccctaaggtggatctgctggtgaagaattgcctcctgcccctgagagagtacttcaagtatttcagccagaatagtctgcccctgggaggcagcggcggcggcgccctggtgacatttgaggacgtcgccgtgcggttcacccaggaggaatgggctctgctggatccttctcagaaaatcctgtaccgggacgtgatgagagagacataccggaatctgacctccgtgggcatcaactgggaatgttgggaccttgaagcctgcttcagaagcctgggaagaaacctgagagtgcaggtggtgaagagaaagtgcgagctgaccaacagcggcccctgcgccgagggcggcccaagcagcggcgcccctcctcccagcggcggcagcccagccggctccccaacctctaccgaggagggcacctctgagtccgccacccccgagagcggccctggcacctccaccgagcccagcgagggcagcgcacccggcagccctgccggcagccccacctccacagaggagggaaccagcaccgagcccagcgaaggcagcgccccaggcaccagcaccgagcctagtgagcaggagattaaacggatcaacaagatcagaagaagacttgtgaaagacagcaacaccaagaaggccggcaagacaggccccatgaaaaccctgctggttagagtgatgacacccgatctgagagagcggctggaaaacctgagaaagaagcctgaaaatatcccccagcccatcagcaatacatctagagccaacctgaataagctgctgaccgattacaccgaaatgaagaaggcgatcctgcatgtgtactgggaagagttccagaaggaccctgtgggcctgatgagccgggtggcccagcctgccagcaagaagatcgatcagaacaagctgaaacctgagatggacgagaagggcaacctgaccaccgccggctttgcctgctctcagtgtggccagcccctgttcgtgtacaagctggagcaggtgtctgagaagggcaaggcttacaccaactacttcggacggtgcaatgtggccgagcacgaaaagctgatcctgctggcccagctgaagcccgagaaggatagcgacgaagccgtgacatatagcctgggaaagtttgggcagagggccctggatttctacagcattcatgtgaccaaggagtccacccaccccgtgaagcccctggcccagatcgccggaaacagatacgcctccggacctgtgggaaaggccctgagcgacgcatgtatgggcacaatcgcctccttcctgtctaagtaccaggacatcatcatcgaacaccagaaggtggtgaagggcaaccagaagagactggagagcctgcgggagctggccggcaaggaaaacctggaataccctagcgtgaccctgccacctcagcctcacaccaaggagggcgttgatgcctacaacgaagtgatcgcccgggtgcgaatgtgggtgaacctgaacctgtggcagaagctgaagctaagcagagatgatgccaagcctctgctgagactgaagggattcccttcctttcctctggtcgagagacaggccaacgaagtggactggtgggacatggtgtgtaacgtgaagaagctgatcaacgagaaaaaggaggatggcaaggtgttttggcagaatctggctggctacaagagacaggaagccctgagaccatacctgagcagcgaggaagatcggaagaagggaaagaaattcgctcggtaccagctgggcgacctgctgctgcacctggaaaagaagcacggcgaggactggggaaaggtgtacgacgaggcctgggagcggattgacaagaaagtggaaggcctgagcaagcacatcaagctggaagaggaacggagaagcgaggacgcccagagcaaggccgccctgaccgactggctgcgggctaaggccagcttcgtgatcgagggcctgaaggaggccgacaaggacgagttctgcagatgcgagctgaagctgcagaagtggtacggggacctgcggggaaagcccttcgccatcgaagccgagaacagcatcctggacatcagcggcttcagcaagcagtacaactgtgccttcatctggcagaaggacggcgtgaagaagctgaacctgtacctgatcatcaactacttcaagggcggcaagctgcggttcaagaagatcaaacctgaagccttcgaagccaacagattctacaccgtgatcaacaaaaagagcggcgagatcgtgcccatggaggtgaacttcaacttcgacgaccccaacctgatcatcctgcctctggcctttggcaagagacagggcagagaattcatctggaacgacctgctgtccctggaaaccggcagcctgaagctggccaacggaagagtgatcgagaagacactgtacaacagaagaacccggcaggatgagcctgccctgttcgtggccctgaccttcgagcggcgggaggtcctggactcctccaatatcaaaccaatgaacctgatcggcgtggcaagaggcgaaaacatccccgccgtgatcgccctgaccgaccccgagggctgcccactgagccggtttaaggatagcctgggaaacccaacccacatcctgagaatcggcgagagctataaggagaagcagcggaccatccaggccaagaaggaggtggagcagcggagagccggcggctacagccggaagtacgccagcaaagccaagaatctggcagacgatatggtgagaaacaccgctagagatctgctgtactacgccgtgacccaggatgccatgctgatcttcgccaacctgagccggggcttcggccggcagggcaagcggaccttcatggccgagagacagtacacacggatggaggactggctgaccgccaagctggcctacgagggcctgagcaagacctacctgtccaagacactggcccagtacacctccaagacatgcagcaactgtgggtttaccatcaccagcgccgactacgacagggtgctggagaagctgaagaagacagcaacaggctggatgaccacaattaacggcaaggagctgaaggtggagggccagattacctactacaacagatacaagagacagaacgtagtcaaggacctgtccgtcgagctggatagactgagcgaagaatctgtgaacaacgacatctcctcctggacaaagggcagaagcggagaagctctgagcctcctgaagaaaagattctcccatagacccgtgcaggagaagttcgtgtgcctgaactgcggcttcgagacacacgcagccgagcaagccgccctgaacatcgccagatcctggctgttcctgcggagccaggagtacaagaaataccagacaaacaagacaaccggcaacaccgataagagagccttcgtcgagacctggcagtccttttaccggaagaagcttaaggaggtgtggaaacctgccgtgcggtctggcggatctggcggaggctccatggacaccgtggtgttcgaggacgtggtggtggacttcacccccgaggagtgggccctgctgaaccccgcccagaggaagctgtacagggacgtgatgctggagaccttcaagcacctggccagcgtggacaacgaggcccagctgaaggccagcggcagcatcagccagcaggacaccagcggcgagaagctgagcctgaagcagaagatcgagaagttcaccaggaagaacatctgggccggcggcccaagcagcggcgcccctcctcccagcggcggcagcccagccggctccccaacctctaccgaggagggcacctctgagtccgccacccccgagagcggccctggcacctccaccgagcccagcgagggcagcgcacccggcagccctgccggcagccccacctccacagaggagggaaccagcaccgagcccagcgaaggcagcgccccaggcaccagcaccgagcctagtgagcaggagattaaacggatcaacaagatcagaagaagacttgtgaaagacagcaacaccaagaaggccggcaagacaggccccatgaaaaccctgctggttagagtgatgacacccgatctgagagagcggctggaaaacctgagaaagaagcctgaaaatatcccccagcccatcagcaatacatctagagccaacctgaataagctgctgaccgattacaccgaaatgaagaaggcgatcctgcatgtgtactgggaagagttccagaaggaccctgtgggcctgatgagccgggtggcccagcctgccagcaagaagatcgatcagaacaagctgaaacctgagatggacgagaagggcaacctgaccaccgccggctttgcctgctctcagtgtggccagcccctgttcgtgtacaagctggagcaggtgtctgagaagggcaaggcttacaccaactacttcggacggtgcaatgtggccgagcacgaaaagctgatcctgctggcccagctgaagcccgagaaggatagcgacgaagccgtgacatatagcctgggaaagtttgggcagagggccctggatttctacagcattcatgtgaccaaggagtccacccaccccgtgaagcccctggcccagatcgccggaaacagatacgcctccggacctgtgggaaaggccctgagcgacgcatgtatgggcacaatcgcctccttcctgtctaagtaccaggacatcatcatcgaacaccagaaggtggtgaagggcaaccagaagagactggagagcctgcgggagctggccggcaaggaaaacctggaataccctagcgtgaccctgccacctcagcctcacaccaaggagggcgttgatgcctacaacgaagtgatcgcccgggtgcgaatgtgggtgaacctgaacctgtggcagaagctgaagctaagcagagatgatgccaagcctctgctgagactgaagggattcccttcctttcctctggtcgagagacaggccaacgaagtggactggtgggacatggtgtgtaacgtgaagaagctgatcaacgagaaaaaggaggatggcaaggtgttttggcagaatctggctggctacaagagacaggaagccctgagaccatacctgagcagcgaggaagatcggaagaagggaaagaaattcgctcggtaccagctgggcgacctgctgctgcacctggaaaagaagcacggcgaggactggggaaaggtgtacgacgaggcctgggagcggattgacaagaaagtggaaggcctgagcaagcacatcaagctggaagaggaacggagaagcgaggacgcccagagcaaggccgccctgaccgactggctgcgggctaaggccagcttcgtgatcgagggcctgaaggaggccgacaaggacgagttctgcagatgcgagctgaagctgcagaagtggtacggggacctgcggggaaagcccttcgccatcgaagccgagaacagcatcctggacatcagcggcttcagcaagcagtacaactgtgccttcatctggcagaaggacggcgtgaagaagctgaacctgtacctgatcatcaactacttcaagggcggcaagctgcggttcaagaagatcaaacctgaagccttcgaagccaacagattctacaccgtgatcaacaaaaagagcggcgagatcgtgcccatggaggtgaacttcaacttcgacgaccccaacctgatcatcctgcctctggcctttggcaagagacagggcagagaattcatctggaacgacctgctgtccctggaaaccggcagcctgaagctggccaacggaagagtgatcgagaagacactgtacaacagaagaacccggcaggatgagcctgccctgttcgtggccctgaccttcgagcggcgggaggtcctggactcctccaatatcaaaccaatgaacctgatcggcgtggcaagaggcgaaaacatccccgccgtgatcgccctgaccgaccccgagggctgcccactgagccggtttaaggatagcctgggaaacccaacccacatcctgagaatcggcgagagctataaggagaagcagcggaccatccaggccaagaaggaggtggagcagcggagagccggcggctacagccggaagtacgccagcaaagccaagaatctggcagacgatatggtgagaaacaccgctagagatctgctgtactacgccgtgacccaggatgccatgctgatcttcgccaacctgagccggggcttcggccggcagggcaagcggaccttcatggccgagagacagtacacacggatggaggactggctgaccgccaagctggcctacgagggcctgagcaagacctacctgtccaagacactggcccagtacacctccaagacatgcagcaactgtgggtttaccatcaccagcgccgactacgacagggtgctggagaagctgaagaagacagcaacaggctggatgaccacaattaacggcaaggagctgaaggtggagggccagattacctactacaacagatacaagagacagaacgtagtcaaggacctgtccgtcgagctggatagactgagcgaagaatctgtgaacaacgacatctcctcctggacaaagggcagaagcggagaagctctgagcctcctgaagaaaagattctcccatagacccgtgcaggagaagttcgtgtgcctgaactgcggcttcgagacacacgcagccgagcaagccgccctgaacatcgccagatcctggctgttcctgcggagccaggagtacaagaaataccagacaaacaagacaaccggcaacaccgataagagagccttcgtcgagacctggcagtccttttaccggaagaagcttaaggaggtgtggaaacctgccgtgcggtctggcggatctggcggaggctcctatggacaccgtggtgttcgaggacgtggtggtggacttcacccccgaggagtgggccctgctgaaccccgcccagaggaagctgtacagggacgtgatgctggagaccttcaagcacctggccagcgtggacaacgaggcccagctgaaggccagcggcagcatcagccagcaggacaccagcggcgagaagctgagcctgaagcagaagatcgagaagttcaccaggaagaacatctgggccggatctggctccggcagcggccccaagaaaaagagaaaagtctaagctgccttctgcggggcttgccttctggccatgcccttcttctctcccttgcacctgtacctcttggtctttgaataaagcctgagtaggaaggctagcaaaaaaaaaaaaaaaaaaaaaaaaaaaaaaaaaaaaaaaaaaaaaaaaaaaaaaaaaaaaaaaaaaaaaaaaaaaaaaaa

SEQ ID NO: 15924 - RNA, 9485 nt, synthetic construct
  source 1..9485: mol_type = other RNA
aggaaataagagagaaaagaagagtaagaagaaatataagagccaccatggcccctaagaagaagcgtaaagtgagccggatggaacgcctcgtctacgaggtgcggcagaagtgcagaaacatcgaggacatctgcatctcctgcggatctctgaacgtgaccctggagcacccactgttcatcggcggcatgtgccagaactgtaaaaactgttttctggagtgtgcctatcaatacgacgatgacggctaccagagctactgcaccatctgttgcggcggaagagaggtgctgatgtgtggaaataacaactgctgccggtgcttctgcgtggaatgcgtggacctgctggtgggccccggcgccgcccaggccgctattaaggaagatccttggaactgctacatgtgcggccacaagggcacatacggcctgctgagacggagagaggactggcctagcagactgcagatgttcttcgccaataaccacgaccaggagttcgacccccctaaggtgtaccctcccgtccccgccgagaagagaaagcccatccgggtcctgagcctgttcgatggcatcgccaccggtctgctggtgctgaaggacctgggcatccaggtggataggtacattgcctccgaggtgtgcgaggactccatcaccgtgggaatggtgcgtcatcagggcaagatcatgtacgtgggcgacgtgcggagcgtgacacagaagcatatccaggagtggggccctttcgacctggtgatcggcggcagcccttgcaatgacctgagcatcgtgaacccagcccggaagggcctgtacgagggaaccggcagactgttcttcgagttttacagactgctgcacgacgcccggcctaaggaaggcgacgaccggcccttcttttggctgttcgagaatgtggtggccatgggagtcagcgacaagcgggatattagccggttcctggagagcaaccccgtgatgatcgatgccaaggaagtgagcgccgcccaccgggccagatacttctggggcaatctgcctggcatgaacagacccctggccagcaccgtgaacgacaagctggagctgcaggagtgcctggagcacggccggatcgccaagttcagcaaggtgagaaccatcaccacccgaagcaacagcatcaaacaaggcaaggaccagcactttcctgtgttcatgaacgagaaggaggacatcctgtggtgtaccgagatggagagagtgttcgggttcccagtccactacacagatgtcagcaacatgtctagactggccagacagagactgctgggaagaagctggtccgtccctgtgatcagacacctgttcgcccctctgaaggagtacttcgcctgcgtgagcagcggcaacagcaacgccaacagccggggccccagcttctctagcggcctggtgccactgtccctgagagggagccacatgggccccatggagatctacaaaaccgtgagcgcctggaagcggcagcctgtgcgcgtgctgagcctgtttcggaatatcgataaagtcctgaaaagcctgggattcctggagagcggctctggctccggcggtggcaccctgaagtacgtggaggatgtgacaaacgtggtcagacgggatgtggagaagtggggccccttcgatctggtgtacggcagcacccaacccctgggcagctcttgtgaccggtgccctggctggtacatgtttcagttccaccggatcctgcagtacgccctgccgagacaggagtcccagcggccattcttttggattttcatggacaacttgctgctgaccgaggatgaccaggaaactaccactcggttcctgcagaccgaagccgtgaccctgcaggacgtgagaggccgggactaccagaacgccatgcgggtgtggtccaacatccctggactgaaaagcaagcacgcacctctgacccctaaagaagaggagtacctgcaggcccaggtgcggagcagaagcaagctggacgcccctaaggtggatctgctggtgaagaattgcctcctgcccctgagagagtacttcaagtatttcagccagaatagtctgcccctgggaggcagcggcggcggcgccctggtgacatttgaggacgtcgccgtgcggttcacccaggaggaatgggctctgctggatccttctcagaaaatcctgtaccgggacgtgatgagagagacataccggaatctgacctccgtgggcatcaactgggaatgttgggaccttgaagcctgcttcagaagcctgggaagaaacctgagagtgcaggtggtgaagagaaagtgcgagctgaccaacagcggcccctgcgccgagggcggcccaagcagcggcgcccctcctcccagcggcggcagcccagccggctccccaacctctaccgaggagggcacctctgagtccgccacccccgagagcggccctggcacctccaccgagcccagcgagggcagcgcacccggcagccctgccggcagccccacctccacagaggagggaaccagcaccgagcccagcgaaggcagcgccccaggcaccagcaccgagcctagtgagcaggagattaaacggatcaacaagatcagaagaagacttgtgaaagacagcaacaccaagaaggccggcaagacaggccccatgaaaaccctgctggttagagtgatgacacccgatctgagagagcggctggaaaacctgagaaagaagcctgaaaatatcccccagcccatcagcaatacatctagagccaacctgaataagctgctgaccgattacaccgaaatgaagaaggcgatcctgcatgtgtactgggaagagttccagaaggaccctgtgggcctgatgagccgggtggcccagcctgccagcaagaagatcgatcagaacaagctgaaacctgagatggacgagaagggcaacctgaccaccgccggctttgcctgctctcagtgtggccagcccctgttcgtgtacaagctggagcaggtgtctgagaagggcaaggcttacaccaactacttcggacggtgcaatgtggccgagcacgaaaagctgatcctgctggcccagctgaagcccgagaaggatagcgacgaagccgtgacatatagcctgggaaagtttgggcagagggccctggatttctacagcattcatgtgaccaaggagtccacccaccccgtgaagcccctggcccagatcgccggaaacagatacgcctccggacctgtgggaaaggccctgagcgacgcatgtatgggcacaatcgcctccttcctgtctaagtaccaggacatcatcatcgaacaccagaaggtggtgaagggcaaccagaagagactggagagcctgcgggagctggccggcaaggaaaacctggaataccctagcgtgaccctgccacctcagcctcacaccaaggagggcgttgatgcctacaacgaagtgatcgcccgggtgcgaatgtgggtgaacctgaacctgtggcagaagctgaagctaagcagagatgatgccaagcctctgctgagactgaagggattcccttcctttcctctggtcgagagacaggccaacgaagtggactggtgggacatggtgtgtaacgtgaagaagctgatcaacgagaaaaaggaggatggcaaggtgttttggcagaatctggctggctacaagagacaggaagccctgagaccatacctgagcagcgaggaagatcggaagaagggaaagaaattcgctcggtaccagctgggcgacctgctgctgcacctggaaaagaagcacggcgaggactggggaaaggtgtacgacgaggcctgggagcggattgacaagaaagtggaaggcctgagcaagcacatcaagctggaagaggaacggagaagcgaggacgcccagagcaaggccgccctgaccgactggctgcgggctaaggccagcttcgtgatcgagggcctgaaggaggccgacaaggacgagttctgcagatgcgagctgaagctgcagaagtggtacggggacctgcggggaaagcccttcgccatcgaagccgagaacagcatcctggacatcagcggcttcagcaagcagtacaactgtgccttcatctggcagaaggacggcgtgaagaagctgaacctgtacctgatcatcaactacttcaagggcggcaagctgcggttcaagaagatcaaacctgaagccttcgaagccaacagattctacaccgtgatcaacaaaaagagcggcgagatcgtgcccatggaggtgaacttcaacttcgacgaccccaacctgatcatcctgcctctggcctttggcaagagacagggcagagaattcatctggaacgacctgctgtccctggaaaccggcagcctgaagctggccaacggaagagtgatcgagaagacactgtacaacagaagaacccggcaggatgagcctgccctgttcgtggccctgaccttcgagcggcgggaggtcctggactcctccaatatcaaaccaatgaacctgatcggcgtggcaagaggcgaaaacatccccgccgtgatcgccctgaccgaccccgagggctgcccactgagccggtttaaggatagcctgggaaacccaacccacatcctgagaatcggcgagagctataaggagaagcagcggaccatccaggccaagaaggaggtggagcagcggagagccggcggctacagccggaagtacgccagcaaagccaagaatctggcagacgatatggtgagaaacaccgctagagatctgctgtactacgccgtgacccaggatgccatgctgatcttcgccaacctgagccggggcttcggccggcagggcaagcggaccttcatggccgagagacagtacacacggatggaggactggctgaccgccaagctggcctacgagggcctgagcaagacctacctgtccaagacactggcccagtacacctccaagacatgcagcaactgtgggtttaccatcaccagcgccgactacgacagggtgctggagaagctgaagaagacagcaacaggctggatgaccacaattaacggcaaggagctgaaggtggagggccagattacctactacaacagatacaagagacagaacgtagtcaaggacctgtccgtcgagctggatagactgagcgaagaatctgtgaacaacgacatctcctcctggacaaagggcagaagcggagaagctctgagcctcctgaagaaaagattctcccatagacccgtgcaggagaagttcgtgtgcctgaactgcggcttcgagacacacgcagccgagcaagccgccctgaacatcgccagatcctggctgttcctgcggagccaggagtacaagaaataccagacaaacaagacaaccggcaacaccgataagagagccttcgtcgagacctggcagtccttttaccggaagaagcttaaggaggtgtggaaacctgccgtgcggtctggcggatctggcggaggctccgagagcctgaccctggaggacgtggccgtggagttcacctgggaggagtggcagctgctgggccccgcccagaaggacctgtactgggacgtgatgctggagaactacaaccacctggtgagcctgggctaccaggccagcaagcccgacgccctgagcaagctggcccagggcgaggagccctgcgtgatcgagggcaagatccagaacaggaactgccccggcatcaggaaggccgacagcggcggcccaagcagcggcgcccctcctcccagcggcggcagcccagccggctccccaacctctaccgaggagggcacctctgagtccgccacccccgagagcggccctggcacctccaccgagcccagcgagggcagcgcacccggcagccctgccggcagccccacctccacagaggagggaaccagcaccgagcccagcgaaggcagcgccccaggcaccagcaccgagcctagtgagcaggagattaaacggatcaacaagatcagaagaagacttgtgaaagacagcaacaccaagaaggccggcaagacaggccccatgaaaaccctgctggttagagtgatgacacccgatctgagagagcggctggaaaacctgagaaagaagcctgaaaatatcccccagcccatcagcaatacatctagagccaacctgaataagctgctgaccgattacaccgaaatgaagaaggcgatcctgcatgtgtactgggaagagttccagaaggaccctgtgggcctgatgagccgggtggcccagcctgccagcaagaagatcgatcagaacaagctgaaacctgagatggacgagaagggcaacctgaccaccgccggctttgcctgctctcagtgtggccagcccctgttcgtgtacaagctggagcaggtgtctgagaagggcaaggcttacaccaactacttcggacggtgcaatgtggccgagcacgaaaagctgatcctgctggcccagctgaagcccgagaaggatagcgacgaagccgtgacatatagcctgggaaagtttgggcagagggccctggatttctacagcattcatgtgaccaaggagtccacccaccccgtgaagcccctggcccagatcgccggaaacagatacgcctccggacctgtgggaaaggccctgagcgacgcatgtatgggcacaatcgcctccttcctgtctaagtaccaggacatcatcatcgaacaccagaaggtggtgaagggcaaccagaagagactggagagcctgcgggagctggccggcaaggaaaacctggaataccctagcgtgaccctgccacctcagcctcacaccaaggagggcgttgatgcctacaacgaagtgatcgcccgggtgcgaatgtgggtgaacctgaacctgtggcagaagctgaagctaagcagagatgatgccaagcctctgctgagactgaagggattcccttcctttcctctggtcgagagacaggccaacgaagtggactggtgggacatggtgtgtaacgtgaagaagctgatcaacgagaaaaaggaggatggcaaggtgttttggcagaatctggctggctacaagagacaggaagccctgagaccatacctgagcagcgaggaagatcggaagaagggaaagaaattcgctcggtaccagctgggcgacctgctgctgcacctggaaaagaagcacggcgaggactggggaaaggtgtacgacgaggcctgggagcggattgacaagaaagtggaaggcctgagcaagcacatcaagctggaagaggaacggagaagcgaggacgcccagagcaaggccgccctgaccgactggctgcgggctaaggccagcttcgtgatcgagggcctgaaggaggccgacaaggacgagttctgcagatgcgagctgaagctgcagaagtggtacggggacctgcggggaaagcccttcgccatcgaagccgagaacagcatcctggacatcagcggcttcagcaagcagtacaactgtgccttcatctggcagaaggacggcgtgaagaagctgaacctgtacctgatcatcaactacttcaagggcggcaagctgcggttcaagaagatcaaacctgaagccttcgaagccaacagattctacaccgtgatcaacaaaaagagcggcgagatcgtgcccatggaggtgaacttcaacttcgacgaccccaacctgatcatcctgcctctggcctttggcaagagacagggcagagaattcatctggaacgacctgctgtccctggaaaccggcagcctgaagctggccaacggaagagtgatcgagaagacactgtacaacagaagaacccggcaggatgagcctgccctgttcgtggccctgaccttcgagcggcgggaggtcctggactcctccaatatcaaaccaatgaacctgatcggcgtggcaagaggcgaaaacatccccgccgtgatcgccctgaccgaccccgagggctgcccactgagccggtttaaggatagcctgggaaacccaacccacatcctgagaatcggcgagagctataaggagaagcagcggaccatccaggccaagaaggaggtggagcagcggagagccggcggctacagccggaagtacgccagcaaagccaagaatctggcagacgatatggtgagaaacaccgctagagatctgctgtactacgccgtgacccaggatgccatgctgatcttcgccaacctgagccggggcttcggccggcagggcaagcggaccttcatggccgagagacagtacacacggatggaggactggctgaccgccaagctggcctacgagggcctgagcaagacctacctgtccaagacactggcccagtacacctccaagacatgcagcaactgtgggtttaccatcaccagcgccgactacgacagggtgctggagaagctgaagaagacagcaacaggctggatgaccacaattaacggcaaggagctgaaggtggagggccagattacctactacaacagatacaagagacagaacgtagtcaaggacctgtccgtcgagctggatagactgagcgaagaatctgtgaacaacgacatctcctcctggacaaagggcagaagcggagaagctctgagcctcctgaagaaaagattctcccatagacccgtgcaggagaagttcgtgtgcctgaactgcggcttcgagacacacgcagccgagcaagccgccctgaacatcgccagatcctggctgttcctgcggagccaggagtacaagaaataccagacaaacaagacaaccggcaacaccgataagagagccttcgtcgagacctggcagtccttttaccggaagaagcttaaggaggtgtggaaacctgccgtgcggtctggcggatctggcggaggctcctgagagcctgaccctggaggacgtggccgtggagttcacctgggaggagtggcagctgctgggccccgcccagaaggacctgtactgggacgtgatgctggagaactacaaccacctggtgagcctgggctaccaggccagcaagcccgacgccctgagcaagctggcccagggcgaggagccctgcgtgatcgagggcaagatccagaacaggaactgccccggcatcaggaaggccgacagcggatctggctccggcagcggccccaagaaaaagagaaaagtctaagctgccttctgcggggcttgccttctggccatgcccttcttctctcccttgcacctgtacctcttggtctttgaataaagcctgagtaggaaggctagcaaaaaaaaaaaaaaaaaaaaaaaaaaaaaaaaaaaaaaaaaaaaaaaaaaaaaaaaaaaaaaaaaaaaaaaaaaaaaaaa

SEQ ID NO: 15925 - RNA, 9485 nt, synthetic construct
  source 1..9485: mol_type = other RNA
aggaaataagagagaaaagaagagtaagaagaaatataagagccaccatggcccctaagaagaagcgtaaagtgagccggatggaacgcctcgtctacgaggtgcggcagaagtgcagaaacatcgaggacatctgcatctcctgcggatctctgaacgtgaccctggagcacccactgttcatcggcggcatgtgccagaactgtaaaaactgttttctggagtgtgcctatcaatacgacgatgacggctaccagagctactgcaccatctgttgcggcggaagagaggtgctgatgtgtggaaataacaactgctgccggtgcttctgcgtggaatgcgtggacctgctggtgggccccggcgccgcccaggccgctattaaggaagatccttggaactgctacatgtgcggccacaagggcacatacggcctgctgagacggagagaggactggcctagcagactgcagatgttcttcgccaataaccacgaccaggagttcgacccccctaaggtgtaccctcccgtccccgccgagaagagaaagcccatccgggtcctgagcctgttcgatggcatcgccaccggtctgctggtgctgaaggacctgggcatccaggtggataggtacattgcctccgaggtgtgcgaggactccatcaccgtgggaatggtgcgtcatcagggcaagatcatgtacgtgggcgacgtgcggagcgtgacacagaagcatatccaggagtggggccctttcgacctggtgatcggcggcagcccttgcaatgacctgagcatcgtgaacccagcccggaagggcctgtacgagggaaccggcagactgttcttcgagttttacagactgctgcacgacgcccggcctaaggaaggcgacgaccggcccttcttttggctgttcgagaatgtggtggccatgggagtcagcgacaagcgggatattagccggttcctggagagcaaccccgtgatgatcgatgccaaggaagtgagcgccgcccaccgggccagatacttctggggcaatctgcctggcatgaacagacccctggccagcaccgtgaacgacaagctggagctgcaggagtgcctggagcacggccggatcgccaagttcagcaaggtgagaaccatcaccacccgaagcaacagcatcaaacaaggcaaggaccagcactttcctgtgttcatgaacgagaaggaggacatcctgtggtgtaccgagatggagagagtgttcgggttcccagtccactacacagatgtcagcaacatgtctagactggccagacagagactgctgggaagaagctggtccgtccctgtgatcagacacctgttcgcccctctgaaggagtacttcgcctgcgtgagcagcggcaacagcaacgccaacagccggggccccagcttctctagcggcctggtgccactgtccctgagagggagccacatgggccccatggagatctacaaaaccgtgagcgcctggaagcggcagcctgtgcgcgtgctgagcctgtttcggaatatcgataaagtcctgaaaagcctgggattcctggagagcggctctggctccggcggtggcaccctgaagtacgtggaggatgtgacaaacgtggtcagacgggatgtggagaagtggggccccttcgatctggtgtacggcagcacccaacccctgggcagctcttgtgaccggtgccctggctggtacatgtttcagttccaccggatcctgcagtacgccctgccgagacaggagtcccagcggccattcttttggattttcatggacaacttgctgctgaccgaggatgaccaggaaactaccactcggttcctgcagaccgaagccgtgaccctgcaggacgtgagaggccgggactaccagaacgccatgcgggtgtggtccaacatccctggactgaaaagcaagcacgcacctctgacccctaaagaagaggagtacctgcaggcccaggtgcggagcagaagcaagctggacgcccctaaggtggatctgctggtgaagaattgcctcctgcccctgagagagtacttcaagtatttcagccagaatagtctgcccctgggaggcagcggcggcggcgccctggtgacatttgaggacgtcgccgtgcggttcacccaggaggaatgggctctgctggatccttctcagaaaatcctgtaccgggacgtgatgagagagacataccggaatctgacctccgtgggcatcaactgggaatgttgggaccttgaagcctgcttcagaagcctgggaagaaacctgagagtgcaggtggtgaagagaaagtgcgagctgaccaacagcggcccctgcgccgagggcggcccaagcagcggcgcccctcctcccagcggcggcagcccagccggctccccaacctctaccgaggagggcacctctgagtccgccacccccgagagcggccctggcacctccaccgagcccagcgagggcagcgcacccggcagccctgccggcagccccacctccacagaggagggaaccagcaccgagcccagcgaaggcagcgccccaggcaccagcaccgagcctagtgagcaggagattaaacggatcaacaagatcagaagaagacttgtgaaagacagcaacaccaagaaggccggcaagacaggccccatgaaaaccctgctggttagagtgatgacacccgatctgagagagcggctggaaaacctgagaaagaagcctgaaaatatcccccagcccatcagcaatacatctagagccaacctgaataagctgctgaccgattacaccgaaatgaagaaggcgatcctgcatgtgtactgggaagagttccagaaggaccctgtgggcctgatgagccgggtggcccagcctgccagcaagaagatcgatcagaacaagctgaaacctgagatggacgagaagggcaacctgaccaccgccggctttgcctgctctcagtgtggccagcccctgttcgtgtacaagctggagcaggtgtctgagaagggcaaggcttacaccaactacttcggacggtgcaatgtggccgagcacgaaaagctgatcctgctggcccagctgaagcccgagaaggatagcgacgaagccgtgacatatagcctgggaaagtttgggcagagggccctggatttctacagcattcatgtgaccaaggagtccacccaccccgtgaagcccctggcccagatcgccggaaacagatacgcctccggacctgtgggaaaggccctgagcgacgcatgtatgggcacaatcgcctccttcctgtctaagtaccaggacatcatcatcgaacaccagaaggtggtgaagggcaaccagaagagactggagagcctgcgggagctggccggcaaggaaaacctggaataccctagcgtgaccctgccacctcagcctcacaccaaggagggcgttgatgcctacaacgaagtgatcgcccgggtgcgaatgtgggtgaacctgaacctgtggcagaagctgaagctaagcagagatgatgccaagcctctgctgagactgaagggattcccttcctttcctctggtcgagagacaggccaacgaagtggactggtgggacatggtgtgtaacgtgaagaagctgatcaacgagaaaaaggaggatggcaaggtgttttggcagaatctggctggctacaagagacaggaagccctgagaccatacctgagcagcgaggaagatcggaagaagggaaagaaattcgctcggtaccagctgggcgacctgctgctgcacctggaaaagaagcacggcgaggactggggaaaggtgtacgacgaggcctgggagcggattgacaagaaagtggaaggcctgagcaagcacatcaagctggaagaggaacggagaagcgaggacgcccagagcaaggccgccctgaccgactggctgcgggctaaggccagcttcgtgatcgagggcctgaaggaggccgacaaggacgagttctgcagatgcgagctgaagctgcagaagtggtacggggacctgcggggaaagcccttcgccatcgaagccgagaacagcatcctggacatcagcggcttcagcaagcagtacaactgtgccttcatctggcagaaggacggcgtgaagaagctgaacctgtacctgatcatcaactacttcaagggcggcaagctgcggttcaagaagatcaaacctgaagccttcgaagccaacagattctacaccgtgatcaacaaaaagagcggcgagatcgtgcccatggaggtgaacttcaacttcgacgaccccaacctgatcatcctgcctctggcctttggcaagagacagggcagagaattcatctggaacgacctgctgtccctggaaaccggcagcctgaagctggccaacggaagagtgatcgagaagacactgtacaacagaagaacccggcaggatgagcctgccctgttcgtggccctgaccttcgagcggcgggaggtcctggactcctccaatatcaaaccaatgaacctgatcggcgtggcaagaggcgaaaacatccccgccgtgatcgccctgaccgaccccgagggctgcccactgagccggtttaaggatagcctgggaaacccaacccacatcctgagaatcggcgagagctataaggagaagcagcggaccatccaggccaagaaggaggtggagcagcggagagccggcggctacagccggaagtacgccagcaaagccaagaatctggcagacgatatggtgagaaacaccgctagagatctgctgtactacgccgtgacccaggatgccatgctgatcttcgccaacctgagccggggcttcggccggcagggcaagcggaccttcatggccgagagacagtacacacggatggaggactggctgaccgccaagctggcctacgagggcctgagcaagacctacctgtccaagacactggcccagtacacctccaagacatgcagcaactgtgggtttaccatcaccagcgccgactacgacagggtgctggagaagctgaagaagacagcaacaggctggatgaccacaattaacggcaaggagctgaaggtggagggccagattacctactacaacagatacaagagacagaacgtagtcaaggacctgtccgtcgagctggatagactgagcgaagaatctgtgaacaacgacatctcctcctggacaaagggcagaagcggagaagctctgagcctcctgaagaaaagattctcccatagacccgtgcaggagaagttcgtgtgcctgaactgcggcttcgagacacacgcagccgagcaagccgccctgaacatcgccagatcctggctgttcctgcggagccaggagtacaagaaataccagacaaacaagacaaccggcaacaccgataagagagccttcgtcgagacctggcagtccttttaccggaagaagcttaaggaggtgtggaaacctgccgtgcggtctggcggatctggcggaggctccatgaccctgctgaccttcagggacgtggccatcgagttcagcctggaggagtggaagtgcctggacctggcccagcagaacctgtacagggacgtgatgctggagaactacaggaacctgttcagcgtgggcctgaccgtgagcaagcccggcctgatcacctgcctggagcagaggaaggagccctggaacgtgaagaggcaggaggccgccgacggccaccccggctggagcgccgtggtgggcggcccaagcagcggcgcccctcctcccagcggcggcagcccagccggctccccaacctctaccgaggagggcacctctgagtccgccacccccgagagcggccctggcacctccaccgagcccagcgagggcagcgcacccggcagccctgccggcagccccacctccacagaggagggaaccagcaccgagcccagcgaaggcagcgccccaggcaccagcaccgagcctagtgagcaggagattaaacggatcaacaagatcagaagaagacttgtgaaagacagcaacaccaagaaggccggcaagacaggccccatgaaaaccctgctggttagagtgatgacacccgatctgagagagcggctggaaaacctgagaaagaagcctgaaaatatcccccagcccatcagcaatacatctagagccaacctgaataagctgctgaccgattacaccgaaatgaagaaggcgatcctgcatgtgtactgggaagagttccagaaggaccctgtgggcctgatgagccgggtggcccagcctgccagcaagaagatcgatcagaacaagctgaaacctgagatggacgagaagggcaacctgaccaccgccggctttgcctgctctcagtgtggccagcccctgttcgtgtacaagctggagcaggtgtctgagaagggcaaggcttacaccaactacttcggacggtgcaatgtggccgagcacgaaaagctgatcctgctggcccagctgaagcccgagaaggatagcgacgaagccgtgacatatagcctgggaaagtttgggcagagggccctggatttctacagcattcatgtgaccaaggagtccacccaccccgtgaagcccctggcccagatcgccggaaacagatacgcctccggacctgtgggaaaggccctgagcgacgcatgtatgggcacaatcgcctccttcctgtctaagtaccaggacatcatcatcgaacaccagaaggtggtgaagggcaaccagaagagactggagagcctgcgggagctggccggcaaggaaaacctggaataccctagcgtgaccctgccacctcagcctcacaccaaggagggcgttgatgcctacaacgaagtgatcgcccgggtgcgaatgtgggtgaacctgaacctgtggcagaagctgaagctaagcagagatgatgccaagcctctgctgagactgaagggattcccttcctttcctctggtcgagagacaggccaacgaagtggactggtgggacatggtgtgtaacgtgaagaagctgatcaacgagaaaaaggaggatggcaaggtgttttggcagaatctggctggctacaagagacaggaagccctgagaccatacctgagcagcgaggaagatcggaagaagggaaagaaattcgctcggtaccagctgggcgacctgctgctgcacctggaaaagaagcacggcgaggactggggaaaggtgtacgacgaggcctgggagcggattgacaagaaagtggaaggcctgagcaagcacatcaagctggaagaggaacggagaagcgaggacgcccagagcaaggccgccctgaccgactggctgcgggctaaggccagcttcgtgatcgagggcctgaaggaggccgacaaggacgagttctgcagatgcgagctgaagctgcagaagtggtacggggacctgcggggaaagcccttcgccatcgaagccgagaacagcatcctggacatcagcggcttcagcaagcagtacaactgtgccttcatctggcagaaggacggcgtgaagaagctgaacctgtacctgatcatcaactacttcaagggcggcaagctgcggttcaagaagatcaaacctgaagccttcgaagccaacagattctacaccgtgatcaacaaaaagagcggcgagatcgtgcccatggaggtgaacttcaacttcgacgaccccaacctgatcatcctgcctctggcctttggcaagagacagggcagagaattcatctggaacgacctgctgtccctggaaaccggcagcctgaagctggccaacggaagagtgatcgagaagacactgtacaacagaagaacccggcaggatgagcctgccctgttcgtggccctgaccttcgagcggcgggaggtcctggactcctccaatatcaaaccaatgaacctgatcggcgtggcaagaggcgaaaacatccccgccgtgatcgccctgaccgaccccgagggctgcccactgagccggtttaaggatagcctgggaaacccaacccacatcctgagaatcggcgagagctataaggagaagcagcggaccatccaggccaagaaggaggtggagcagcggagagccggcggctacagccggaagtacgccagcaaagccaagaatctggcagacgatatggtgagaaacaccgctagagatctgctgtactacgccgtgacccaggatgccatgctgatcttcgccaacctgagccggggcttcggccggcagggcaagcggaccttcatggccgagagacagtacacacggatggaggactggctgaccgccaagctggcctacgagggcctgagcaagacctacctgtccaagacactggcccagtacacctccaagacatgcagcaactgtgggtttaccatcaccagcgccgactacgacagggtgctggagaagctgaagaagacagcaacaggctggatgaccacaattaacggcaaggagctgaaggtggagggccagattacctactacaacagatacaagagacagaacgtagtcaaggacctgtccgtcgagctggatagactgagcgaagaatctgtgaacaacgacatctcctcctggacaaagggcagaagcggagaagctctgagcctcctgaagaaaagattctcccatagacccgtgcaggagaagttcgtgtgcctgaactgcggcttcgagacacacgcagccgagcaagccgccctgaacatcgccagatcctggctgttcctgcggagccaggagtacaagaaataccagacaaacaagacaaccggcaacaccgataagagagccttcgtcgagacctggcagtccttttaccggaagaagcttaaggaggtgtggaaacctgccgtgcggtctggcggatctggcggaggctcctatgaccctgctgaccttcagggacgtggccatcgagttcagcctggaggagtggaagtgcctggacctggcccagcagaacctgtacagggacgtgatgctggagaactacaggaacctgttcagcgtgggcctgaccgtgagcaagcccggcctgatcacctgcctggagcagaggaaggagccctggaacgtgaagaggcaggaggccgccgacggccaccccggctggagcgccgtggtgggatctggctccggcagcggccccaagaaaaagagaaaagtctaagctgccttctgcggggcttgccttctggccatgcccttcttctctcccttgcacctgtacctcttggtctttgaataaagcctgagtaggaaggctagcaaaaaaaaaaaaaaaaaaaaaaaaaaaaaaaaaaaaaaaaaaaaaaaaaaaaaaaaaaaaaaaaaaaaaaaaaaaaaaaa

SEQ ID NO: 15926 - RNA, 9485 nt, synthetic construct
  source 1..9485: mol_type = other RNA
aggaaataagagagaaaagaagagtaagaagaaatataagagccaccatggcccctaagaagaagcgtaaagtgagccggatggaacgcctcgtctacgaggtgcggcagaagtgcagaaacatcgaggacatctgcatctcctgcggatctctgaacgtgaccctggagcacccactgttcatcggcggcatgtgccagaactgtaaaaactgttttctggagtgtgcctatcaatacgacgatgacggctaccagagctactgcaccatctgttgcggcggaagagaggtgctgatgtgtggaaataacaactgctgccggtgcttctgcgtggaatgcgtggacctgctggtgggccccggcgccgcccaggccgctattaaggaagatccttggaactgctacatgtgcggccacaagggcacatacggcctgctgagacggagagaggactggcctagcagactgcagatgttcttcgccaataaccacgaccaggagttcgacccccctaaggtgtaccctcccgtccccgccgagaagagaaagcccatccgggtcctgagcctgttcgatggcatcgccaccggtctgctggtgctgaaggacctgggcatccaggtggataggtacattgcctccgaggtgtgcgaggactccatcaccgtgggaatggtgcgtcatcagggcaagatcatgtacgtgggcgacgtgcggagcgtgacacagaagcatatccaggagtggggccctttcgacctggtgatcggcggcagcccttgcaatgacctgagcatcgtgaacccagcccggaagggcctgtacgagggaaccggcagactgttcttcgagttttacagactgctgcacgacgcccggcctaaggaaggcgacgaccggcccttcttttggctgttcgagaatgtggtggccatgggagtcagcgacaagcgggatattagccggttcctggagagcaaccccgtgatgatcgatgccaaggaagtgagcgccgcccaccgggccagatacttctggggcaatctgcctggcatgaacagacccctggccagcaccgtgaacgacaagctggagctgcaggagtgcctggagcacggccggatcgccaagttcagcaaggtgagaaccatcaccacccgaagcaacagcatcaaacaaggcaaggaccagcactttcctgtgttcatgaacgagaaggaggacatcctgtggtgtaccgagatggagagagtgttcgggttcccagtccactacacagatgtcagcaacatgtctagactggccagacagagactgctgggaagaagctggtccgtccctgtgatcagacacctgttcgcccctctgaaggagtacttcgcctgcgtgagcagcggcaacagcaacgccaacagccggggccccagcttctctagcggcctggtgccactgtccctgagagggagccacatgggccccatggagatctacaaaaccgtgagcgcctggaagcggcagcctgtgcgcgtgctgagcctgtttcggaatatcgataaagtcctgaaaagcctgggattcctggagagcggctctggctccggcggtggcaccctgaagtacgtggaggatgtgacaaacgtggtcagacgggatgtggagaagtggggccccttcgatctggtgtacggcagcacccaacccctgggcagctcttgtgaccggtgccctggctggtacatgtttcagttccaccggatcctgcagtacgccctgccgagacaggagtcccagcggccattcttttggattttcatggacaacttgctgctgaccgaggatgaccaggaaactaccactcggttcctgcagaccgaagccgtgaccctgcaggacgtgagaggccgggactaccagaacgccatgcgggtgtggtccaacatccctggactgaaaagcaagcacgcacctctgacccctaaagaagaggagtacctgcaggcccaggtgcggagcagaagcaagctggacgcccctaaggtggatctgctggtgaagaattgcctcctgcccctgagagagtacttcaagtatttcagccagaatagtctgcccctgggaggcagcggcggcggcgccctggtgacatttgaggacgtcgccgtgcggttcacccaggaggaatgggctctgctggatccttctcagaaaatcctgtaccgggacgtgatgagagagacataccggaatctgacctccgtgggcatcaactgggaatgttgggaccttgaagcctgcttcagaagcctgggaagaaacctgagagtgcaggtggtgaagagaaagtgcgagctgaccaacagcggcccctgcgccgagggcggcccaagcagcggcgcccctcctcccagcggcggcagcccagccggctccccaacctctaccgaggagggcacctctgagtccgccacccccgagagcggccctggcacctccaccgagcccagcgagggcagcgcacccggcagccctgccggcagccccacctccacagaggagggaaccagcaccgagcccagcgaaggcagcgccccaggcaccagcaccgagcctagtgagcaggagattaaacggatcaacaagatcagaagaagacttgtgaaagacagcaacaccaagaaggccggcaagacaggccccatgaaaaccctgctggttagagtgatgacacccgatctgagagagcggctggaaaacctgagaaagaagcctgaaaatatcccccagcccatcagcaatacatctagagccaacctgaataagctgctgaccgattacaccgaaatgaagaaggcgatcctgcatgtgtactgggaagagttccagaaggaccctgtgggcctgatgagccgggtggcccagcctgccagcaagaagatcgatcagaacaagctgaaacctgagatggacgagaagggcaacctgaccaccgccggctttgcctgctctcagtgtggccagcccctgttcgtgtacaagctggagcaggtgtctgagaagggcaaggcttacaccaactacttcggacggtgcaatgtggccgagcacgaaaagctgatcctgctggcccagctgaagcccgagaaggatagcgacgaagccgtgacatatagcctgggaaagtttgggcagagggccctggatttctacagcattcatgtgaccaaggagtccacccaccccgtgaagcccctggcccagatcgccggaaacagatacgcctccggacctgtgggaaaggccctgagcgacgcatgtatgggcacaatcgcctccttcctgtctaagtaccaggacatcatcatcgaacaccagaaggtggtgaagggcaaccagaagagactggagagcctgcgggagctggccggcaaggaaaacctggaataccctagcgtgaccctgccacctcagcctcacaccaaggagggcgttgatgcctacaacgaagtgatcgcccgggtgcgaatgtgggtgaacctgaacctgtggcagaagctgaagctaagcagagatgatgccaagcctctgctgagactgaagggattcccttcctttcctctggtcgagagacaggccaacgaagtggactggtgggacatggtgtgtaacgtgaagaagctgatcaacgagaaaaaggaggatggcaaggtgttttggcagaatctggctggctacaagagacaggaagccctgagaccatacctgagcagcgaggaagatcggaagaagggaaagaaattcgctcggtaccagctgggcgacctgctgctgcacctggaaaagaagcacggcgaggactggggaaaggtgtacgacgaggcctgggagcggattgacaagaaagtggaaggcctgagcaagcacatcaagctggaagaggaacggagaagcgaggacgcccagagcaaggccgccctgaccgactggctgcgggctaaggccagcttcgtgatcgagggcctgaaggaggccgacaaggacgagttctgcagatgcgagctgaagctgcagaagtggtacggggacctgcggggaaagcccttcgccatcgaagccgagaacagcatcctggacatcagcggcttcagcaagcagtacaactgtgccttcatctggcagaaggacggcgtgaagaagctgaacctgtacctgatcatcaactacttcaagggcggcaagctgcggttcaagaagatcaaacctgaagccttcgaagccaacagattctacaccgtgatcaacaaaaagagcggcgagatcgtgcccatggaggtgaacttcaacttcgacgaccccaacctgatcatcctgcctctggcctttggcaagagacagggcagagaattcatctggaacgacctgctgtccctggaaaccggcagcctgaagctggccaacggaagagtgatcgagaagacactgtacaacagaagaacccggcaggatgagcctgccctgttcgtggccctgaccttcgagcggcgggaggtcctggactcctccaatatcaaaccaatgaacctgatcggcgtggcaagaggcgaaaacatccccgccgtgatcgccctgaccgaccccgagggctgcccactgagccggtttaaggatagcctgggaaacccaacccacatcctgagaatcggcgagagctataaggagaagcagcggaccatccaggccaagaaggaggtggagcagcggagagccggcggctacagccggaagtacgccagcaaagccaagaatctggcagacgatatggtgagaaacaccgctagagatctgctgtactacgccgtgacccaggatgccatgctgatcttcgccaacctgagccggggcttcggccggcagggcaagcggaccttcatggccgagagacagtacacacggatggaggactggctgaccgccaagctggcctacgagggcctgagcaagacctacctgtccaagacactggcccagtacacctccaagacatgcagcaactgtgggtttaccatcaccagcgccgactacgacagggtgctggagaagctgaagaagacagcaacaggctggatgaccacaattaacggcaaggagctgaaggtggagggccagattacctactacaacagatacaagagacagaacgtagtcaaggacctgtccgtcgagctggatagactgagcgaagaatctgtgaacaacgacatctcctcctggacaaagggcagaagcggagaagctctgagcctcctgaagaaaagattctcccatagacccgtgcaggagaagttcgtgtgcctgaactgcggcttcgagacacacgcagccgagcaagccgccctgaacatcgccagatcctggctgttcctgcggagccaggagtacaagaaataccagacaaacaagacaaccggcaacaccgataagagagccttcgtcgagacctggcagtccttttaccggaagaagcttaaggaggtgtggaaacctgccgtgcggtctggcggatctggcggaggctccagccaggagctgctgaccttcaaggacgtgagcgtggacttcacccaggaggagtggggccagctggcccccgcccacaggaacctgtacagggaggtgatgctggagaactacggcaacctggtgagcgtgggctgccagctgagcaagcccggcgtgatcagccagctggagaagggcgaggagccctggctgatggagagggacatcagcggcgtgcccagcagcgacctgaagagcaagggcggcccaagcagcggcgcccctcctcccagcggcggcagcccagccggctccccaacctctaccgaggagggcacctctgagtccgccacccccgagagcggccctggcacctccaccgagcccagcgagggcagcgcacccggcagccctgccggcagccccacctccacagaggagggaaccagcaccgagcccagcgaaggcagcgccccaggcaccagcaccgagcctagtgagcaggagattaaacggatcaacaagatcagaagaagacttgtgaaagacagcaacaccaagaaggccggcaagacaggccccatgaaaaccctgctggttagagtgatgacacccgatctgagagagcggctggaaaacctgagaaagaagcctgaaaatatcccccagcccatcagcaatacatctagagccaacctgaataagctgctgaccgattacaccgaaatgaagaaggcgatcctgcatgtgtactgggaagagttccagaaggaccctgtgggcctgatgagccgggtggcccagcctgccagcaagaagatcgatcagaacaagctgaaacctgagatggacgagaagggcaacctgaccaccgccggctttgcctgctctcagtgtggccagcccctgttcgtgtacaagctggagcaggtgtctgagaagggcaaggcttacaccaactacttcggacggtgcaatgtggccgagcacgaaaagctgatcctgctggcccagctgaagcccgagaaggatagcgacgaagccgtgacatatagcctgggaaagtttgggcagagggccctggatttctacagcattcatgtgaccaaggagtccacccaccccgtgaagcccctggcccagatcgccggaaacagatacgcctccggacctgtgggaaaggccctgagcgacgcatgtatgggcacaatcgcctccttcctgtctaagtaccaggacatcatcatcgaacaccagaaggtggtgaagggcaaccagaagagactggagagcctgcgggagctggccggcaaggaaaacctggaataccctagcgtgaccctgccacctcagcctcacaccaaggagggcgttgatgcctacaacgaagtgatcgcccgggtgcgaatgtgggtgaacctgaacctgtggcagaagctgaagctaagcagagatgatgccaagcctctgctgagactgaagggattcccttcctttcctctggtcgagagacaggccaacgaagtggactggtgggacatggtgtgtaacgtgaagaagctgatcaacgagaaaaaggaggatggcaaggtgttttggcagaatctggctggctacaagagacaggaagccctgagaccatacctgagcagcgaggaagatcggaagaagggaaagaaattcgctcggtaccagctgggcgacctgctgctgcacctggaaaagaagcacggcgaggactggggaaaggtgtacgacgaggcctgggagcggattgacaagaaagtggaaggcctgagcaagcacatcaagctggaagaggaacggagaagcgaggacgcccagagcaaggccgccctgaccgactggctgcgggctaaggccagcttcgtgatcgagggcctgaaggaggccgacaaggacgagttctgcagatgcgagctgaagctgcagaagtggtacggggacctgcggggaaagcccttcgccatcgaagccgagaacagcatcctggacatcagcggcttcagcaagcagtacaactgtgccttcatctggcagaaggacggcgtgaagaagctgaacctgtacctgatcatcaactacttcaagggcggcaagctgcggttcaagaagatcaaacctgaagccttcgaagccaacagattctacaccgtgatcaacaaaaagagcggcgagatcgtgcccatggaggtgaacttcaacttcgacgaccccaacctgatcatcctgcctctggcctttggcaagagacagggcagagaattcatctggaacgacctgctgtccctggaaaccggcagcctgaagctggccaacggaagagtgatcgagaagacactgtacaacagaagaacccggcaggatgagcctgccctgttcgtggccctgaccttcgagcggcgggaggtcctggactcctccaatatcaaaccaatgaacctgatcggcgtggcaagaggcgaaaacatccccgccgtgatcgccctgaccgaccccgagggctgcccactgagccggtttaaggatagcctgggaaacccaacccacatcctgagaatcggcgagagctataaggagaagcagcggaccatccaggccaagaaggaggtggagcagcggagagccggcggctacagccggaagtacgccagcaaagccaagaatctggcagacgatatggtgagaaacaccgctagagatctgctgtactacgccgtgacccaggatgccatgctgatcttcgccaacctgagccggggcttcggccggcagggcaagcggaccttcatggccgagagacagtacacacggatggaggactggctgaccgccaagctggcctacgagggcctgagcaagacctacctgtccaagacactggcccagtacacctccaagacatgcagcaactgtgggtttaccatcaccagcgccgactacgacagggtgctggagaagctgaagaagacagcaacaggctggatgaccacaattaacggcaaggagctgaaggtggagggccagattacctactacaacagatacaagagacagaacgtagtcaaggacctgtccgtcgagctggatagactgagcgaagaatctgtgaacaacgacatctcctcctggacaaagggcagaagcggagaagctctgagcctcctgaagaaaagattctcccatagacccgtgcaggagaagttcgtgtgcctgaactgcggcttcgagacacacgcagccgagcaagccgccctgaacatcgccagatcctggctgttcctgcggagccaggagtacaagaaataccagacaaacaagacaaccggcaacaccgataagagagccttcgtcgagacctggcagtccttttaccggaagaagcttaaggaggtgtggaaacctgccgtgcggtctggcggatctggcggaggctcctagccaggagctgctgaccttcaaggacgtgagcgtggacttcacccaggaggagtggggccagctggcccccgcccacaggaacctgtacagggaggtgatgctggagaactacggcaacctggtgagcgtgggctgccagctgagcaagcccggcgtgatcagccagctggagaagggcgaggagccctggctgatggagagggacatcagcggcgtgcccagcagcgacctgaagagcaagggatctggctccggcagcggccccaagaaaaagagaaaagtctaagctgccttctgcggggcttgccttctggccatgcccttcttctctcccttgcacctgtacctcttggtctttgaataaagcctgagtaggaaggctagcaaaaaaaaaaaaaaaaaaaaaaaaaaaaaaaaaaaaaaaaaaaaaaaaaaaaaaaaaaaaaaaaaaaaaaaaaaaaaaaa

SEQ ID NO: 15927 - RNA, 9485 nt, synthetic construct
  source 1..9485: mol_type = other RNA
aggaaataagagagaaaagaagagtaagaagaaatataagagccaccatggcccctaagaagaagcgtaaagtgagccggatggaacgcctcgtctacgaggtgcggcagaagtgcagaaacatcgaggacatctgcatctcctgcggatctctgaacgtgaccctggagcacccactgttcatcggcggcatgtgccagaactgtaaaaactgttttctggagtgtgcctatcaatacgacgatgacggctaccagagctactgcaccatctgttgcggcggaagagaggtgctgatgtgtggaaataacaactgctgccggtgcttctgcgtggaatgcgtggacctgctggtgggccccggcgccgcccaggccgctattaaggaagatccttggaactgctacatgtgcggccacaagggcacatacggcctgctgagacggagagaggactggcctagcagactgcagatgttcttcgccaataaccacgaccaggagttcgacccccctaaggtgtaccctcccgtccccgccgagaagagaaagcccatccgggtcctgagcctgttcgatggcatcgccaccggtctgctggtgctgaaggacctgggcatccaggtggataggtacattgcctccgaggtgtgcgaggactccatcaccgtgggaatggtgcgtcatcagggcaagatcatgtacgtgggcgacgtgcggagcgtgacacagaagcatatccaggagtggggccctttcgacctggtgatcggcggcagcccttgcaatgacctgagcatcgtgaacccagcccggaagggcctgtacgagggaaccggcagactgttcttcgagttttacagactgctgcacgacgcccggcctaaggaaggcgacgaccggcccttcttttggctgttcgagaatgtggtggccatgggagtcagcgacaagcgggatattagccggttcctggagagcaaccccgtgatgatcgatgccaaggaagtgagcgccgcccaccgggccagatacttctggggcaatctgcctggcatgaacagacccctggccagcaccgtgaacgacaagctggagctgcaggagtgcctggagcacggccggatcgccaagttcagcaaggtgagaaccatcaccacccgaagcaacagcatcaaacaaggcaaggaccagcactttcctgtgttcatgaacgagaaggaggacatcctgtggtgtaccgagatggagagagtgttcgggttcccagtccactacacagatgtcagcaacatgtctagactggccagacagagactgctgggaagaagctggtccgtccctgtgatcagacacctgttcgcccctctgaaggagtacttcgcctgcgtgagcagcggcaacagcaacgccaacagccggggccccagcttctctagcggcctggtgccactgtccctgagagggagccacatgggccccatggagatctacaaaaccgtgagcgcctggaagcggcagcctgtgcgcgtgctgagcctgtttcggaatatcgataaagtcctgaaaagcctgggattcctggagagcggctctggctccggcggtggcaccctgaagtacgtggaggatgtgacaaacgtggtcagacgggatgtggagaagtggggccccttcgatctggtgtacggcagcacccaacccctgggcagctcttgtgaccggtgccctggctggtacatgtttcagttccaccggatcctgcagtacgccctgccgagacaggagtcccagcggccattcttttggattttcatggacaacttgctgctgaccgaggatgaccaggaaactaccactcggttcctgcagaccgaagccgtgaccctgcaggacgtgagaggccgggactaccagaacgccatgcgggtgtggtccaacatccctggactgaaaagcaagcacgcacctctgacccctaaagaagaggagtacctgcaggcccaggtgcggagcagaagcaagctggacgcccctaaggtggatctgctggtgaagaattgcctcctgcccctgagagagtacttcaagtatttcagccagaatagtctgcccctgggaggcagcggcggcggcgccctggtgacatttgaggacgtcgccgtgcggttcacccaggaggaatgggctctgctggatccttctcagaaaatcctgtaccgggacgtgatgagagagacataccggaatctgacctccgtgggcatcaactgggaatgttgggaccttgaagcctgcttcagaagcctgggaagaaacctgagagtgcaggtggtgaagagaaagtgcgagctgaccaacagcggcccctgcgccgagggcggcccaagcagcggcgcccctcctcccagcggcggcagcccagccggctccccaacctctaccgaggagggcacctctgagtccgccacccccgagagcggccctggcacctccaccgagcccagcgagggcagcgcacccggcagccctgccggcagccccacctccacagaggagggaaccagcaccgagcccagcgaaggcagcgccccaggcaccagcaccgagcctagtgagcaggagattaaacggatcaacaagatcagaagaagacttgtgaaagacagcaacaccaagaaggccggcaagacaggccccatgaaaaccctgctggttagagtgatgacacccgatctgagagagcggctggaaaacctgagaaagaagcctgaaaatatcccccagcccatcagcaatacatctagagccaacctgaataagctgctgaccgattacaccgaaatgaagaaggcgatcctgcatgtgtactgggaagagttccagaaggaccctgtgggcctgatgagccgggtggcccagcctgccagcaagaagatcgatcagaacaagctgaaacctgagatggacgagaagggcaacctgaccaccgccggctttgcctgctctcagtgtggccagcccctgttcgtgtacaagctggagcaggtgtctgagaagggcaaggcttacaccaactacttcggacggtgcaatgtggccgagcacgaaaagctgatcctgctggcccagctgaagcccgagaaggatagcgacgaagccgtgacatatagcctgggaaagtttgggcagagggccctggatttctacagcattcatgtgaccaaggagtccacccaccccgtgaagcccctggcccagatcgccggaaacagatacgcctccggacctgtgggaaaggccctgagcgacgcatgtatgggcacaatcgcctccttcctgtctaagtaccaggacatcatcatcgaacaccagaaggtggtgaagggcaaccagaagagactggagagcctgcgggagctggccggcaaggaaaacctggaataccctagcgtgaccctgccacctcagcctcacaccaaggagggcgttgatgcctacaacgaagtgatcgcccgggtgcgaatgtgggtgaacctgaacctgtggcagaagctgaagctaagcagagatgatgccaagcctctgctgagactgaagggattcccttcctttcctctggtcgagagacaggccaacgaagtggactggtgggacatggtgtgtaacgtgaagaagctgatcaacgagaaaaaggaggatggcaaggtgttttggcagaatctggctggctacaagagacaggaagccctgagaccatacctgagcagcgaggaagatcggaagaagggaaagaaattcgctcggtaccagctgggcgacctgctgctgcacctggaaaagaagcacggcgaggactggggaaaggtgtacgacgaggcctgggagcggattgacaagaaagtggaaggcctgagcaagcacatcaagctggaagaggaacggagaagcgaggacgcccagagcaaggccgccctgaccgactggctgcgggctaaggccagcttcgtgatcgagggcctgaaggaggccgacaaggacgagttctgcagatgcgagctgaagctgcagaagtggtacggggacctgcggggaaagcccttcgccatcgaagccgagaacagcatcctggacatcagcggcttcagcaagcagtacaactgtgccttcatctggcagaaggacggcgtgaagaagctgaacctgtacctgatcatcaactacttcaagggcggcaagctgcggttcaagaagatcaaacctgaagccttcgaagccaacagattctacaccgtgatcaacaaaaagagcggcgagatcgtgcccatggaggtgaacttcaacttcgacgaccccaacctgatcatcctgcctctggcctttggcaagagacagggcagagaattcatctggaacgacctgctgtccctggaaaccggcagcctgaagctggccaacggaagagtgatcgagaagacactgtacaacagaagaacccggcaggatgagcctgccctgttcgtggccctgaccttcgagcggcgggaggtcctggactcctccaatatcaaaccaatgaacctgatcggcgtggcaagaggcgaaaacatccccgccgtgatcgccctgaccgaccccgagggctgcccactgagccggtttaaggatagcctgggaaacccaacccacatcctgagaatcggcgagagctataaggagaagcagcggaccatccaggccaagaaggaggtggagcagcggagagccggcggctacagccggaagtacgccagcaaagccaagaatctggcagacgatatggtgagaaacaccgctagagatctgctgtactacgccgtgacccaggatgccatgctgatcttcgccaacctgagccggggcttcggccggcagggcaagcggaccttcatggccgagagacagtacacacggatggaggactggctgaccgccaagctggcctacgagggcctgagcaagacctacctgtccaagacactggcccagtacacctccaagacatgcagcaactgtgggtttaccatcaccagcgccgactacgacagggtgctggagaagctgaagaagacagcaacaggctggatgaccacaattaacggcaaggagctgaaggtggagggccagattacctactacaacagatacaagagacagaacgtagtcaaggacctgtccgtcgagctggatagactgagcgaagaatctgtgaacaacgacatctcctcctggacaaagggcagaagcggagaagctctgagcctcctgaagaaaagattctcccatagacccgtgcaggagaagttcgtgtgcctgaactgcggcttcgagacacacgcagccgagcaagccgccctgaacatcgccagatcctggctgttcctgcggagccaggagtacaagaaataccagacaaacaagacaaccggcaacaccgataagagagccttcgtcgagacctggcagtccttttaccggaagaagcttaaggaggtgtggaaacctgccgtgcggtctggcggatctggcggaggctccatggccaacgccaccggcagcggcgtggagcagaagttccagggcagcgtgagcttcaaggacgtgaccgtgggcttcacccaggaggagtggcagcacctggaccccagccagagggccctgtacagggacgtgatgctggagaactacagcaacctggtgagcgtgggctactgcgtgcacaagcccgaggtgatcttcaggctggagcagggcgaggagccctggaagctggaggaggagggcggcccaagcagcggcgcccctcctcccagcggcggcagcccagccggctccccaacctctaccgaggagggcacctctgagtccgccacccccgagagcggccctggcacctccaccgagcccagcgagggcagcgcacccggcagccctgccggcagccccacctccacagaggagggaaccagcaccgagcccagcgaaggcagcgccccaggcaccagcaccgagcctagtgagcaggagattaaacggatcaacaagatcagaagaagacttgtgaaagacagcaacaccaagaaggccggcaagacaggccccatgaaaaccctgctggttagagtgatgacacccgatctgagagagcggctggaaaacctgagaaagaagcctgaaaatatcccccagcccatcagcaatacatctagagccaacctgaataagctgctgaccgattacaccgaaatgaagaaggcgatcctgcatgtgtactgggaagagttccagaaggaccctgtgggcctgatgagccgggtggcccagcctgccagcaagaagatcgatcagaacaagctgaaacctgagatggacgagaagggcaacctgaccaccgccggctttgcctgctctcagtgtggccagcccctgttcgtgtacaagctggagcaggtgtctgagaagggcaaggcttacaccaactacttcggacggtgcaatgtggccgagcacgaaaagctgatcctgctggcccagctgaagcccgagaaggatagcgacgaagccgtgacatatagcctgggaaagtttgggcagagggccctggatttctacagcattcatgtgaccaaggagtccacccaccccgtgaagcccctggcccagatcgccggaaacagatacgcctccggacctgtgggaaaggccctgagcgacgcatgtatgggcacaatcgcctccttcctgtctaagtaccaggacatcatcatcgaacaccagaaggtggtgaagggcaaccagaagagactggagagcctgcgggagctggccggcaaggaaaacctggaataccctagcgtgaccctgccacctcagcctcacaccaaggagggcgttgatgcctacaacgaagtgatcgcccgggtgcgaatgtgggtgaacctgaacctgtggcagaagctgaagctaagcagagatgatgccaagcctctgctgagactgaagggattcccttcctttcctctggtcgagagacaggccaacgaagtggactggtgggacatggtgtgtaacgtgaagaagctgatcaacgagaaaaaggaggatggcaaggtgttttggcagaatctggctggctacaagagacaggaagccctgagaccatacctgagcagcgaggaagatcggaagaagggaaagaaattcgctcggtaccagctgggcgacctgctgctgcacctggaaaagaagcacggcgaggactggggaaaggtgtacgacgaggcctgggagcggattgacaagaaagtggaaggcctgagcaagcacatcaagctggaagaggaacggagaagcgaggacgcccagagcaaggccgccctgaccgactggctgcgggctaaggccagcttcgtgatcgagggcctgaaggaggccgacaaggacgagttctgcagatgcgagctgaagctgcagaagtggtacggggacctgcggggaaagcccttcgccatcgaagccgagaacagcatcctggacatcagcggcttcagcaagcagtacaactgtgccttcatctggcagaaggacggcgtgaagaagctgaacctgtacctgatcatcaactacttcaagggcggcaagctgcggttcaagaagatcaaacctgaagccttcgaagccaacagattctacaccgtgatcaacaaaaagagcggcgagatcgtgcccatggaggtgaacttcaacttcgacgaccccaacctgatcatcctgcctctggcctttggcaagagacagggcagagaattcatctggaacgacctgctgtccctggaaaccggcagcctgaagctggccaacggaagagtgatcgagaagacactgtacaacagaagaacccggcaggatgagcctgccctgttcgtggccctgaccttcgagcggcgggaggtcctggactcctccaatatcaaaccaatgaacctgatcggcgtggcaagaggcgaaaacatccccgccgtgatcgccctgaccgaccccgagggctgcccactgagccggtttaaggatagcctgggaaacccaacccacatcctgagaatcggcgagagctataaggagaagcagcggaccatccaggccaagaaggaggtggagcagcggagagccggcggctacagccggaagtacgccagcaaagccaagaatctggcagacgatatggtgagaaacaccgctagagatctgctgtactacgccgtgacccaggatgccatgctgatcttcgccaacctgagccggggcttcggccggcagggcaagcggaccttcatggccgagagacagtacacacggatggaggactggctgaccgccaagctggcctacgagggcctgagcaagacctacctgtccaagacactggcccagtacacctccaagacatgcagcaactgtgggtttaccatcaccagcgccgactacgacagggtgctggagaagctgaagaagacagcaacaggctggatgaccacaattaacggcaaggagctgaaggtggagggccagattacctactacaacagatacaagagacagaacgtagtcaaggacctgtccgtcgagctggatagactgagcgaagaatctgtgaacaacgacatctcctcctggacaaagggcagaagcggagaagctctgagcctcctgaagaaaagattctcccatagacccgtgcaggagaagttcgtgtgcctgaactgcggcttcgagacacacgcagccgagcaagccgccctgaacatcgccagatcctggctgttcctgcggagccaggagtacaagaaataccagacaaacaagacaaccggcaacaccgataagagagccttcgtcgagacctggcagtccttttaccggaagaagcttaaggaggtgtggaaacctgccgtgcggtctggcggatctggcggaggctcctatggccaacgccaccggcagcggcgtggagcagaagttccagggcagcgtgagcttcaaggacgtgaccgtgggcttcacccaggaggagtggcagcacctggaccccagccagagggccctgtacagggacgtgatgctggagaactacagcaacctggtgagcgtgggctactgcgtgcacaagcccgaggtgatcttcaggctggagcagggcgaggagccctggaagctggaggaggagggatctggctccggcagcggccccaagaaaaagagaaaagtctaagctgccttctgcggggcttgccttctggccatgcccttcttctctcccttgcacctgtacctcttggtctttgaataaagcctgagtaggaaggctagcaaaaaaaaaaaaaaaaaaaaaaaaaaaaaaaaaaaaaaaaaaaaaaaaaaaaaaaaaaaaaaaaaaaaaaaaaaaaaaaa

SEQ ID NO: 15928 - RNA, 9485 nt, synthetic construct
  source 1..9485: mol_type = other RNA
aggaaataagagagaaaagaagagtaagaagaaatataagagccaccatggcccctaagaagaagcgtaaagtgagccggatggaacgcctcgtctacgaggtgcggcagaagtgcagaaacatcgaggacatctgcatctcctgcggatctctgaacgtgaccctggagcacccactgttcatcggcggcatgtgccagaactgtaaaaactgttttctggagtgtgcctatcaatacgacgatgacggctaccagagctactgcaccatctgttgcggcggaagagaggtgctgatgtgtggaaataacaactgctgccggtgcttctgcgtggaatgcgtggacctgctggtgggccccggcgccgcccaggccgctattaaggaagatccttggaactgctacatgtgcggccacaagggcacatacggcctgctgagacggagagaggactggcctagcagactgcagatgttcttcgccaataaccacgaccaggagttcgacccccctaaggtgtaccctcccgtccccgccgagaagagaaagcccatccgggtcctgagcctgttcgatggcatcgccaccggtctgctggtgctgaaggacctgggcatccaggtggataggtacattgcctccgaggtgtgcgaggactccatcaccgtgggaatggtgcgtcatcagggcaagatcatgtacgtgggcgacgtgcggagcgtgacacagaagcatatccaggagtggggccctttcgacctggtgatcggcggcagcccttgcaatgacctgagcatcgtgaacccagcccggaagggcctgtacgagggaaccggcagactgttcttcgagttttacagactgctgcacgacgcccggcctaaggaaggcgacgaccggcccttcttttggctgttcgagaatgtggtggccatgggagtcagcgacaagcgggatattagccggttcctggagagcaaccccgtgatgatcgatgccaaggaagtgagcgccgcccaccgggccagatacttctggggcaatctgcctggcatgaacagacccctggccagcaccgtgaacgacaagctggagctgcaggagtgcctggagcacggccggatcgccaagttcagcaaggtgagaaccatcaccacccgaagcaacagcatcaaacaaggcaaggaccagcactttcctgtgttcatgaacgagaaggaggacatcctgtggtgtaccgagatggagagagtgttcgggttcccagtccactacacagatgtcagcaacatgtctagactggccagacagagactgctgggaagaagctggtccgtccctgtgatcagacacctgttcgcccctctgaaggagtacttcgcctgcgtgagcagcggcaacagcaacgccaacagccggggccccagcttctctagcggcctggtgccactgtccctgagagggagccacatgggccccatggagatctacaaaaccgtgagcgcctggaagcggcagcctgtgcgcgtgctgagcctgtttcggaatatcgataaagtcctgaaaagcctgggattcctggagagcggctctggctccggcggtggcaccctgaagtacgtggaggatgtgacaaacgtggtcagacgggatgtggagaagtggggccccttcgatctggtgtacggcagcacccaacccctgggcagctcttgtgaccggtgccctggctggtacatgtttcagttccaccggatcctgcagtacgccctgccgagacaggagtcccagcggccattcttttggattttcatggacaacttgctgctgaccgaggatgaccaggaaactaccactcggttcctgcagaccgaagccgtgaccctgcaggacgtgagaggccgggactaccagaacgccatgcgggtgtggtccaacatccctggactgaaaagcaagcacgcacctctgacccctaaagaagaggagtacctgcaggcccaggtgcggagcagaagcaagctggacgcccctaaggtggatctgctggtgaagaattgcctcctgcccctgagagagtacttcaagtatttcagccagaatagtctgcccctgggaggcagcggcggcggcgccctggtgacatttgaggacgtcgccgtgcggttcacccaggaggaatgggctctgctggatccttctcagaaaatcctgtaccgggacgtgatgagagagacataccggaatctgacctccgtgggcatcaactgggaatgttgggaccttgaagcctgcttcagaagcctgggaagaaacctgagagtgcaggtggtgaagagaaagtgcgagctgaccaacagcggcccctgcgccgagggcggcccaagcagcggcgcccctcctcccagcggcggcagcccagccggctccccaacctctaccgaggagggcacctctgagtccgccacccccgagagcggccctggcacctccaccgagcccagcgagggcagcgcacccggcagccctgccggcagccccacctccacagaggagggaaccagcaccgagcccagcgaaggcagcgccccaggcaccagcaccgagcctagtgagcaggagattaaacggatcaacaagatcagaagaagacttgtgaaagacagcaacaccaagaaggccggcaagacaggccccatgaaaaccctgctggttagagtgatgacacccgatctgagagagcggctggaaaacctgagaaagaagcctgaaaatatcccccagcccatcagcaatacatctagagccaacctgaataagctgctgaccgattacaccgaaatgaagaaggcgatcctgcatgtgtactgggaagagttccagaaggaccctgtgggcctgatgagccgggtggcccagcctgccagcaagaagatcgatcagaacaagctgaaacctgagatggacgagaagggcaacctgaccaccgccggctttgcctgctctcagtgtggccagcccctgttcgtgtacaagctggagcaggtgtctgagaagggcaaggcttacaccaactacttcggacggtgcaatgtggccgagcacgaaaagctgatcctgctggcccagctgaagcccgagaaggatagcgacgaagccgtgacatatagcctgggaaagtttgggcagagggccctggatttctacagcattcatgtgaccaaggagtccacccaccccgtgaagcccctggcccagatcgccggaaacagatacgcctccggacctgtgggaaaggccctgagcgacgcatgtatgggcacaatcgcctccttcctgtctaagtaccaggacatcatcatcgaacaccagaaggtggtgaagggcaaccagaagagactggagagcctgcgggagctggccggcaaggaaaacctggaataccctagcgtgaccctgccacctcagcctcacaccaaggagggcgttgatgcctacaacgaagtgatcgcccgggtgcgaatgtgggtgaacctgaacctgtggcagaagctgaagctaagcagagatgatgccaagcctctgctgagactgaagggattcccttcctttcctctggtcgagagacaggccaacgaagtggactggtgggacatggtgtgtaacgtgaagaagctgatcaacgagaaaaaggaggatggcaaggtgttttggcagaatctggctggctacaagagacaggaagccctgagaccatacctgagcagcgaggaagatcggaagaagggaaagaaattcgctcggtaccagctgggcgacctgctgctgcacctggaaaagaagcacggcgaggactggggaaaggtgtacgacgaggcctgggagcggattgacaagaaagtggaaggcctgagcaagcacatcaagctggaagaggaacggagaagcgaggacgcccagagcaaggccgccctgaccgactggctgcgggctaaggccagcttcgtgatcgagggcctgaaggaggccgacaaggacgagttctgcagatgcgagctgaagctgcagaagtggtacggggacctgcggggaaagcccttcgccatcgaagccgagaacagcatcctggacatcagcggcttcagcaagcagtacaactgtgccttcatctggcagaaggacggcgtgaagaagctgaacctgtacctgatcatcaactacttcaagggcggcaagctgcggttcaagaagatcaaacctgaagccttcgaagccaacagattctacaccgtgatcaacaaaaagagcggcgagatcgtgcccatggaggtgaacttcaacttcgacgaccccaacctgatcatcctgcctctggcctttggcaagagacagggcagagaattcatctggaacgacctgctgtccctggaaaccggcagcctgaagctggccaacggaagagtgatcgagaagacactgtacaacagaagaacccggcaggatgagcctgccctgttcgtggccctgaccttcgagcggcgggaggtcctggactcctccaatatcaaaccaatgaacctgatcggcgtggcaagaggcgaaaacatccccgccgtgatcgccctgaccgaccccgagggctgcccactgagccggtttaaggatagcctgggaaacccaacccacatcctgagaatcggcgagagctataaggagaagcagcggaccatccaggccaagaaggaggtggagcagcggagagccggcggctacagccggaagtacgccagcaaagccaagaatctggcagacgatatggtgagaaacaccgctagagatctgctgtactacgccgtgacccaggatgccatgctgatcttcgccaacctgagccggggcttcggccggcagggcaagcggaccttcatggccgagagacagtacacacggatggaggactggctgaccgccaagctggcctacgagggcctgagcaagacctacctgtccaagacactggcccagtacacctccaagacatgcagcaactgtgggtttaccatcaccagcgccgactacgacagggtgctggagaagctgaagaagacagcaacaggctggatgaccacaattaacggcaaggagctgaaggtggagggccagattacctactacaacagatacaagagacagaacgtagtcaaggacctgtccgtcgagctggatagactgagcgaagaatctgtgaacaacgacatctcctcctggacaaagggcagaagcggagaagctctgagcctcctgaagaaaagattctcccatagacccgtgcaggagaagttcgtgtgcctgaactgcggcttcgagacacacgcagccgagcaagccgccctgaacatcgccagatcctggctgttcctgcggagccaggagtacaagaaataccagacaaacaagacaaccggcaacaccgataagagagccttcgtcgagacctggcagtccttttaccggaagaagcttaaggaggtgtggaaacctgccgtgcggtctggcggatctggcggaggctccgaggaggtgcccgtggtgttcgaggacgtggccgtgtacttcaccagggacgagtggggcaccctggacaagaggcagaaggagctgtacagggacgtgatgcagatgaactacgagctgctggccagcctgggccccgccgccgccaagcccgacctgatcagcaagctggagcagagggccgccccctggatcaaggacccccacggccccacctggggcaagggcaggccccccggcaagggcggcccaagcagcggcgcccctcctcccagcggcggcagcccagccggctccccaacctctaccgaggagggcacctctgagtccgccacccccgagagcggccctggcacctccaccgagcccagcgagggcagcgcacccggcagccctgccggcagccccacctccacagaggagggaaccagcaccgagcccagcgaaggcagcgccccaggcaccagcaccgagcctagtgagcaggagattaaacggatcaacaagatcagaagaagacttgtgaaagacagcaacaccaagaaggccggcaagacaggccccatgaaaaccctgctggttagagtgatgacacccgatctgagagagcggctggaaaacctgagaaagaagcctgaaaatatcccccagcccatcagcaatacatctagagccaacctgaataagctgctgaccgattacaccgaaatgaagaaggcgatcctgcatgtgtactgggaagagttccagaaggaccctgtgggcctgatgagccgggtggcccagcctgccagcaagaagatcgatcagaacaagctgaaacctgagatggacgagaagggcaacctgaccaccgccggctttgcctgctctcagtgtggccagcccctgttcgtgtacaagctggagcaggtgtctgagaagggcaaggcttacaccaactacttcggacggtgcaatgtggccgagcacgaaaagctgatcctgctggcccagctgaagcccgagaaggatagcgacgaagccgtgacatatagcctgggaaagtttgggcagagggccctggatttctacagcattcatgtgaccaaggagtccacccaccccgtgaagcccctggcccagatcgccggaaacagatacgcctccggacctgtgggaaaggccctgagcgacgcatgtatgggcacaatcgcctccttcctgtctaagtaccaggacatcatcatcgaacaccagaaggtggtgaagggcaaccagaagagactggagagcctgcgggagctggccggcaaggaaaacctggaataccctagcgtgaccctgccacctcagcctcacaccaaggagggcgttgatgcctacaacgaagtgatcgcccgggtgcgaatgtgggtgaacctgaacctgtggcagaagctgaagctaagcagagatgatgccaagcctctgctgagactgaagggattcccttcctttcctctggtcgagagacaggccaacgaagtggactggtgggacatggtgtgtaacgtgaagaagctgatcaacgagaaaaaggaggatggcaaggtgttttggcagaatctggctggctacaagagacaggaagccctgagaccatacctgagcagcgaggaagatcggaagaagggaaagaaattcgctcggtaccagctgggcgacctgctgctgcacctggaaaagaagcacggcgaggactggggaaaggtgtacgacgaggcctgggagcggattgacaagaaagtggaaggcctgagcaagcacatcaagctggaagaggaacggagaagcgaggacgcccagagcaaggccgccctgaccgactggctgcgggctaaggccagcttcgtgatcgagggcctgaaggaggccgacaaggacgagttctgcagatgcgagctgaagctgcagaagtggtacggggacctgcggggaaagcccttcgccatcgaagccgagaacagcatcctggacatcagcggcttcagcaagcagtacaactgtgccttcatctggcagaaggacggcgtgaagaagctgaacctgtacctgatcatcaactacttcaagggcggcaagctgcggttcaagaagatcaaacctgaagccttcgaagccaacagattctacaccgtgatcaacaaaaagagcggcgagatcgtgcccatggaggtgaacttcaacttcgacgaccccaacctgatcatcctgcctctggcctttggcaagagacagggcagagaattcatctggaacgacctgctgtccctggaaaccggcagcctgaagctggccaacggaagagtgatcgagaagacactgtacaacagaagaacccggcaggatgagcctgccctgttcgtggccctgaccttcgagcggcgggaggtcctggactcctccaatatcaaaccaatgaacctgatcggcgtggcaagaggcgaaaacatccccgccgtgatcgccctgaccgaccccgagggctgcccactgagccggtttaaggatagcctgggaaacccaacccacatcctgagaatcggcgagagctataaggagaagcagcggaccatccaggccaagaaggaggtggagcagcggagagccggcggctacagccggaagtacgccagcaaagccaagaatctggcagacgatatggtgagaaacaccgctagagatctgctgtactacgccgtgacccaggatgccatgctgatcttcgccaacctgagccggggcttcggccggcagggcaagcggaccttcatggccgagagacagtacacacggatggaggactggctgaccgccaagctggcctacgagggcctgagcaagacctacctgtccaagacactggcccagtacacctccaagacatgcagcaactgtgggtttaccatcaccagcgccgactacgacagggtgctggagaagctgaagaagacagcaacaggctggatgaccacaattaacggcaaggagctgaaggtggagggccagattacctactacaacagatacaagagacagaacgtagtcaaggacctgtccgtcgagctggatagactgagcgaagaatctgtgaacaacgacatctcctcctggacaaagggcagaagcggagaagctctgagcctcctgaagaaaagattctcccatagacccgtgcaggagaagttcgtgtgcctgaactgcggcttcgagacacacgcagccgagcaagccgccctgaacatcgccagatcctggctgttcctgcggagccaggagtacaagaaataccagacaaacaagacaaccggcaacaccgataagagagccttcgtcgagacctggcagtccttttaccggaagaagcttaaggaggtgtggaaacctgccgtgcggtctggcggatctggcggaggctcctgaggaggtgcccgtggtgttcgaggacgtggccgtgtacttcaccagggacgagtggggcaccctggacaagaggcagaaggagctgtacagggacgtgatgcagatgaactacgagctgctggccagcctgggccccgccgccgccaagcccgacctgatcagcaagctggagcagagggccgccccctggatcaaggacccccacggccccacctggggcaagggcaggccccccggcaagggatctggctccggcagcggccccaagaaaaagagaaaagtctaagctgccttctgcggggcttgccttctggccatgcccttcttctctcccttgcacctgtacctcttggtctttgaataaagcctgagtaggaaggctagcaaaaaaaaaaaaaaaaaaaaaaaaaaaaaaaaaaaaaaaaaaaaaaaaaaaaaaaaaaaaaaaaaaaaaaaaaaaaaaaa

SEQ ID NO: 15929 - RNA, 9485 nt, synthetic construct
  source 1..9485: mol_type = other RNA
aggaaataagagagaaaagaagagtaagaagaaatataagagccaccatggcccctaagaagaagcgtaaagtgagccggatggaacgcctcgtctacgaggtgcggcagaagtgcagaaacatcgaggacatctgcatctcctgcggatctctgaacgtgaccctggagcacccactgttcatcggcggcatgtgccagaactgtaaaaactgttttctggagtgtgcctatcaatacgacgatgacggctaccagagctactgcaccatctgttgcggcggaagagaggtgctgatgtgtggaaataacaactgctgccggtgcttctgcgtggaatgcgtggacctgctggtgggccccggcgccgcccaggccgctattaaggaagatccttggaactgctacatgtgcggccacaagggcacatacggcctgctgagacggagagaggactggcctagcagactgcagatgttcttcgccaataaccacgaccaggagttcgacccccctaaggtgtaccctcccgtccccgccgagaagagaaagcccatccgggtcctgagcctgttcgatggcatcgccaccggtctgctggtgctgaaggacctgggcatccaggtggataggtacattgcctccgaggtgtgcgaggactccatcaccgtgggaatggtgcgtcatcagggcaagatcatgtacgtgggcgacgtgcggagcgtgacacagaagcatatccaggagtggggccctttcgacctggtgatcggcggcagcccttgcaatgacctgagcatcgtgaacccagcccggaagggcctgtacgagggaaccggcagactgttcttcgagttttacagactgctgcacgacgcccggcctaaggaaggcgacgaccggcccttcttttggctgttcgagaatgtggtggccatgggagtcagcgacaagcgggatattagccggttcctggagagcaaccccgtgatgatcgatgccaaggaagtgagcgccgcccaccgggccagatacttctggggcaatctgcctggcatgaacagacccctggccagcaccgtgaacgacaagctggagctgcaggagtgcctggagcacggccggatcgccaagttcagcaaggtgagaaccatcaccacccgaagcaacagcatcaaacaaggcaaggaccagcactttcctgtgttcatgaacgagaaggaggacatcctgtggtgtaccgagatggagagagtgttcgggttcccagtccactacacagatgtcagcaacatgtctagactggccagacagagactgctgggaagaagctggtccgtccctgtgatcagacacctgttcgcccctctgaaggagtacttcgcctgcgtgagcagcggcaacagcaacgccaacagccggggccccagcttctctagcggcctggtgccactgtccctgagagggagccacatgggccccatggagatctacaaaaccgtgagcgcctggaagcggcagcctgtgcgcgtgctgagcctgtttcggaatatcgataaagtcctgaaaagcctgggattcctggagagcggctctggctccggcggtggcaccctgaagtacgtggaggatgtgacaaacgtggtcagacgggatgtggagaagtggggccccttcgatctggtgtacggcagcacccaacccctgggcagctcttgtgaccggtgccctggctggtacatgtttcagttccaccggatcctgcagtacgccctgccgagacaggagtcccagcggccattcttttggattttcatggacaacttgctgctgaccgaggatgaccaggaaactaccactcggttcctgcagaccgaagccgtgaccctgcaggacgtgagaggccgggactaccagaacgccatgcgggtgtggtccaacatccctggactgaaaagcaagcacgcacctctgacccctaaagaagaggagtacctgcaggcccaggtgcggagcagaagcaagctggacgcccctaaggtggatctgctggtgaagaattgcctcctgcccctgagagagtacttcaagtatttcagccagaatagtctgcccctgggaggcagcggcggcggcgccctggtgacatttgaggacgtcgccgtgcggttcacccaggaggaatgggctctgctggatccttctcagaaaatcctgtaccgggacgtgatgagagagacataccggaatctgacctccgtgggcatcaactgggaatgttgggaccttgaagcctgcttcagaagcctgggaagaaacctgagagtgcaggtggtgaagagaaagtgcgagctgaccaacagcggcccctgcgccgagggcggcccaagcagcggcgcccctcctcccagcggcggcagcccagccggctccccaacctctaccgaggagggcacctctgagtccgccacccccgagagcggccctggcacctccaccgagcccagcgagggcagcgcacccggcagccctgccggcagccccacctccacagaggagggaaccagcaccgagcccagcgaaggcagcgccccaggcaccagcaccgagcctagtgagcaggagattaaacggatcaacaagatcagaagaagacttgtgaaagacagcaacaccaagaaggccggcaagacaggccccatgaaaaccctgctggttagagtgatgacacccgatctgagagagcggctggaaaacctgagaaagaagcctgaaaatatcccccagcccatcagcaatacatctagagccaacctgaataagctgctgaccgattacaccgaaatgaagaaggcgatcctgcatgtgtactgggaagagttccagaaggaccctgtgggcctgatgagccgggtggcccagcctgccagcaagaagatcgatcagaacaagctgaaacctgagatggacgagaagggcaacctgaccaccgccggctttgcctgctctcagtgtggccagcccctgttcgtgtacaagctggagcaggtgtctgagaagggcaaggcttacaccaactacttcggacggtgcaatgtggccgagcacgaaaagctgatcctgctggcccagctgaagcccgagaaggatagcgacgaagccgtgacatatagcctgggaaagtttgggcagagggccctggatttctacagcattcatgtgaccaaggagtccacccaccccgtgaagcccctggcccagatcgccggaaacagatacgcctccggacctgtgggaaaggccctgagcgacgcatgtatgggcacaatcgcctccttcctgtctaagtaccaggacatcatcatcgaacaccagaaggtggtgaagggcaaccagaagagactggagagcctgcgggagctggccggcaaggaaaacctggaataccctagcgtgaccctgccacctcagcctcacaccaaggagggcgttgatgcctacaacgaagtgatcgcccgggtgcgaatgtgggtgaacctgaacctgtggcagaagctgaagctaagcagagatgatgccaagcctctgctgagactgaagggattcccttcctttcctctggtcgagagacaggccaacgaagtggactggtgggacatggtgtgtaacgtgaagaagctgatcaacgagaaaaaggaggatggcaaggtgttttggcagaatctggctggctacaagagacaggaagccctgagaccatacctgagcagcgaggaagatcggaagaagggaaagaaattcgctcggtaccagctgggcgacctgctgctgcacctggaaaagaagcacggcgaggactggggaaaggtgtacgacgaggcctgggagcggattgacaagaaagtggaaggcctgagcaagcacatcaagctggaagaggaacggagaagcgaggacgcccagagcaaggccgccctgaccgactggctgcgggctaaggccagcttcgtgatcgagggcctgaaggaggccgacaaggacgagttctgcagatgcgagctgaagctgcagaagtggtacggggacctgcggggaaagcccttcgccatcgaagccgagaacagcatcctggacatcagcggcttcagcaagcagtacaactgtgccttcatctggcagaaggacggcgtgaagaagctgaacctgtacctgatcatcaactacttcaagggcggcaagctgcggttcaagaagatcaaacctgaagccttcgaagccaacagattctacaccgtgatcaacaaaaagagcggcgagatcgtgcccatggaggtgaacttcaacttcgacgaccccaacctgatcatcctgcctctggcctttggcaagagacagggcagagaattcatctggaacgacctgctgtccctggaaaccggcagcctgaagctggccaacggaagagtgatcgagaagacactgtacaacagaagaacccggcaggatgagcctgccctgttcgtggccctgaccttcgagcggcgggaggtcctggactcctccaatatcaaaccaatgaacctgatcggcgtggcaagaggcgaaaacatccccgccgtgatcgccctgaccgaccccgagggctgcccactgagccggtttaaggatagcctgggaaacccaacccacatcctgagaatcggcgagagctataaggagaagcagcggaccatccaggccaagaaggaggtggagcagcggagagccggcggctacagccggaagtacgccagcaaagccaagaatctggcagacgatatggtgagaaacaccgctagagatctgctgtactacgccgtgacccaggatgccatgctgatcttcgccaacctgagccggggcttcggccggcagggcaagcggaccttcatggccgagagacagtacacacggatggaggactggctgaccgccaagctggcctacgagggcctgagcaagacctacctgtccaagacactggcccagtacacctccaagacatgcagcaactgtgggtttaccatcaccagcgccgactacgacagggtgctggagaagctgaagaagacagcaacaggctggatgaccacaattaacggcaaggagctgaaggtggagggccagattacctactacaacagatacaagagacagaacgtagtcaaggacctgtccgtcgagctggatagactgagcgaagaatctgtgaacaacgacatctcctcctggacaaagggcagaagcggagaagctctgagcctcctgaagaaaagattctcccatagacccgtgcaggagaagttcgtgtgcctgaactgcggcttcgagacacacgcagccgagcaagccgccctgaacatcgccagatcctggctgttcctgcggagccaggagtacaagaaataccagacaaacaagacaaccggcaacaccgataagagagccttcgtcgagacctggcagtccttttaccggaagaagcttaaggaggtgtggaaacctgccgtgcggtctggcggatctggcggaggctccttcgaggagagcgtgaccttcgaggacgtggccgtgtacttcagcgagaacgagtggaccggcctggcccccgcccagagggtgctgtacagggacgtgatgctggagaactacggcgccgtggccagcctggccttccccttccccaagcccgccctgatcagccagctggagaggggcgaggccccctggtgcaaggccccccagggcgccctggacggcggcggccccaggggcatcagcggcggcccaagcagcggcgcccctcctcccagcggcggcagcccagccggctccccaacctctaccgaggagggcacctctgagtccgccacccccgagagcggccctggcacctccaccgagcccagcgagggcagcgcacccggcagccctgccggcagccccacctccacagaggagggaaccagcaccgagcccagcgaaggcagcgccccaggcaccagcaccgagcctagtgagcaggagattaaacggatcaacaagatcagaagaagacttgtgaaagacagcaacaccaagaaggccggcaagacaggccccatgaaaaccctgctggttagagtgatgacacccgatctgagagagcggctggaaaacctgagaaagaagcctgaaaatatcccccagcccatcagcaatacatctagagccaacctgaataagctgctgaccgattacaccgaaatgaagaaggcgatcctgcatgtgtactgggaagagttccagaaggaccctgtgggcctgatgagccgggtggcccagcctgccagcaagaagatcgatcagaacaagctgaaacctgagatggacgagaagggcaacctgaccaccgccggctttgcctgctctcagtgtggccagcccctgttcgtgtacaagctggagcaggtgtctgagaagggcaaggcttacaccaactacttcggacggtgcaatgtggccgagcacgaaaagctgatcctgctggcccagctgaagcccgagaaggatagcgacgaagccgtgacatatagcctgggaaagtttgggcagagggccctggatttctacagcattcatgtgaccaaggagtccacccaccccgtgaagcccctggcccagatcgccggaaacagatacgcctccggacctgtgggaaaggccctgagcgacgcatgtatgggcacaatcgcctccttcctgtctaagtaccaggacatcatcatcgaacaccagaaggtggtgaagggcaaccagaagagactggagagcctgcgggagctggccggcaaggaaaacctggaataccctagcgtgaccctgccacctcagcctcacaccaaggagggcgttgatgcctacaacgaagtgatcgcccgggtgcgaatgtgggtgaacctgaacctgtggcagaagctgaagctaagcagagatgatgccaagcctctgctgagactgaagggattcccttcctttcctctggtcgagagacaggccaacgaagtggactggtgggacatggtgtgtaacgtgaagaagctgatcaacgagaaaaaggaggatggcaaggtgttttggcagaatctggctggctacaagagacaggaagccctgagaccatacctgagcagcgaggaagatcggaagaagggaaagaaattcgctcggtaccagctgggcgacctgctgctgcacctggaaaagaagcacggcgaggactggggaaaggtgtacgacgaggcctgggagcggattgacaagaaagtggaaggcctgagcaagcacatcaagctggaagaggaacggagaagcgaggacgcccagagcaaggccgccctgaccgactggctgcgggctaaggccagcttcgtgatcgagggcctgaaggaggccgacaaggacgagttctgcagatgcgagctgaagctgcagaagtggtacggggacctgcggggaaagcccttcgccatcgaagccgagaacagcatcctggacatcagcggcttcagcaagcagtacaactgtgccttcatctggcagaaggacggcgtgaagaagctgaacctgtacctgatcatcaactacttcaagggcggcaagctgcggttcaagaagatcaaacctgaagccttcgaagccaacagattctacaccgtgatcaacaaaaagagcggcgagatcgtgcccatggaggtgaacttcaacttcgacgaccccaacctgatcatcctgcctctggcctttggcaagagacagggcagagaattcatctggaacgacctgctgtccctggaaaccggcagcctgaagctggccaacggaagagtgatcgagaagacactgtacaacagaagaacccggcaggatgagcctgccctgttcgtggccctgaccttcgagcggcgggaggtcctggactcctccaatatcaaaccaatgaacctgatcggcgtggcaagaggcgaaaacatccccgccgtgatcgccctgaccgaccccgagggctgcccactgagccggtttaaggatagcctgggaaacccaacccacatcctgagaatcggcgagagctataaggagaagcagcggaccatccaggccaagaaggaggtggagcagcggagagccggcggctacagccggaagtacgccagcaaagccaagaatctggcagacgatatggtgagaaacaccgctagagatctgctgtactacgccgtgacccaggatgccatgctgatcttcgccaacctgagccggggcttcggccggcagggcaagcggaccttcatggccgagagacagtacacacggatggaggactggctgaccgccaagctggcctacgagggcctgagcaagacctacctgtccaagacactggcccagtacacctccaagacatgcagcaactgtgggtttaccatcaccagcgccgactacgacagggtgctggagaagctgaagaagacagcaacaggctggatgaccacaattaacggcaaggagctgaaggtggagggccagattacctactacaacagatacaagagacagaacgtagtcaaggacctgtccgtcgagctggatagactgagcgaagaatctgtgaacaacgacatctcctcctggacaaagggcagaagcggagaagctctgagcctcctgaagaaaagattctcccatagacccgtgcaggagaagttcgtgtgcctgaactgcggcttcgagacacacgcagccgagcaagccgccctgaacatcgccagatcctggctgttcctgcggagccaggagtacaagaaataccagacaaacaagacaaccggcaacaccgataagagagccttcgtcgagacctggcagtccttttaccggaagaagcttaaggaggtgtggaaacctgccgtgcggtctggcggatctggcggaggctcctttcgaggagagcgtgaccttcgaggacgtggccgtgtacttcagcgagaacgagtggaccggcctggcccccgcccagagggtgctgtacagggacgtgatgctggagaactacggcgccgtggccagcctggccttccccttccccaagcccgccctgatcagccagctggagaggggcgaggccccctggtgcaaggccccccagggcgccctggacggcggcggccccaggggcatcagcggatctggctccggcagcggccccaagaaaaagagaaaagtctaagctgccttctgcggggcttgccttctggccatgcccttcttctctcccttgcacctgtacctcttggtctttgaataaagcctgagtaggaaggctagcaaaaaaaaaaaaaaaaaaaaaaaaaaaaaaaaaaaaaaaaaaaaaaaaaaaaaaaaaaaaaaaaaaaaaaaaaaaaaaaa

SEQ ID NO: 15930 - RNA, 9485 nt, synthetic construct
  source 1..9485: mol_type = other RNA
aggaaataagagagaaaagaagagtaagaagaaatataagagccaccatggcccctaagaagaagcgtaaagtgagccggatggaacgcctcgtctacgaggtgcggcagaagtgcagaaacatcgaggacatctgcatctcctgcggatctctgaacgtgaccctggagcacccactgttcatcggcggcatgtgccagaactgtaaaaactgttttctggagtgtgcctatcaatacgacgatgacggctaccagagctactgcaccatctgttgcggcggaagagaggtgctgatgtgtggaaataacaactgctgccggtgcttctgcgtggaatgcgtggacctgctggtgggccccggcgccgcccaggccgctattaaggaagatccttggaactgctacatgtgcggccacaagggcacatacggcctgctgagacggagagaggactggcctagcagactgcagatgttcttcgccaataaccacgaccaggagttcgacccccctaaggtgtaccctcccgtccccgccgagaagagaaagcccatccgggtcctgagcctgttcgatggcatcgccaccggtctgctggtgctgaaggacctgggcatccaggtggataggtacattgcctccgaggtgtgcgaggactccatcaccgtgggaatggtgcgtcatcagggcaagatcatgtacgtgggcgacgtgcggagcgtgacacagaagcatatccaggagtggggccctttcgacctggtgatcggcggcagcccttgcaatgacctgagcatcgtgaacccagcccggaagggcctgtacgagggaaccggcagactgttcttcgagttttacagactgctgcacgacgcccggcctaaggaaggcgacgaccggcccttcttttggctgttcgagaatgtggtggccatgggagtcagcgacaagcgggatattagccggttcctggagagcaaccccgtgatgatcgatgccaaggaagtgagcgccgcccaccgggccagatacttctggggcaatctgcctggcatgaacagacccctggccagcaccgtgaacgacaagctggagctgcaggagtgcctggagcacggccggatcgccaagttcagcaaggtgagaaccatcaccacccgaagcaacagcatcaaacaaggcaaggaccagcactttcctgtgttcatgaacgagaaggaggacatcctgtggtgtaccgagatggagagagtgttcgggttcccagtccactacacagatgtcagcaacatgtctagactggccagacagagactgctgggaagaagctggtccgtccctgtgatcagacacctgttcgcccctctgaaggagtacttcgcctgcgtgagcagcggcaacagcaacgccaacagccggggccccagcttctctagcggcctggtgccactgtccctgagagggagccacatgggccccatggagatctacaaaaccgtgagcgcctggaagcggcagcctgtgcgcgtgctgagcctgtttcggaatatcgataaagtcctgaaaagcctgggattcctggagagcggctctggctccggcggtggcaccctgaagtacgtggaggatgtgacaaacgtggtcagacgggatgtggagaagtggggccccttcgatctggtgtacggcagcacccaacccctgggcagctcttgtgaccggtgccctggctggtacatgtttcagttccaccggatcctgcagtacgccctgccgagacaggagtcccagcggccattcttttggattttcatggacaacttgctgctgaccgaggatgaccaggaaactaccactcggttcctgcagaccgaagccgtgaccctgcaggacgtgagaggccgggactaccagaacgccatgcgggtgtggtccaacatccctggactgaaaagcaagcacgcacctctgacccctaaagaagaggagtacctgcaggcccaggtgcggagcagaagcaagctggacgcccctaaggtggatctgctggtgaagaattgcctcctgcccctgagagagtacttcaagtatttcagccagaatagtctgcccctgggaggcagcggcggcggcgccctggtgacatttgaggacgtcgccgtgcggttcacccaggaggaatgggctctgctggatccttctcagaaaatcctgtaccgggacgtgatgagagagacataccggaatctgacctccgtgggcatcaactgggaatgttgggaccttgaagcctgcttcagaagcctgggaagaaacctgagagtgcaggtggtgaagagaaagtgcgagctgaccaacagcggcccctgcgccgagggcggcccaagcagcggcgcccctcctcccagcggcggcagcccagccggctccccaacctctaccgaggagggcacctctgagtccgccacccccgagagcggccctggcacctccaccgagcccagcgagggcagcgcacccggcagccctgccggcagccccacctccacagaggagggaaccagcaccgagcccagcgaaggcagcgccccaggcaccagcaccgagcctagtgagcaggagattaaacggatcaacaagatcagaagaagacttgtgaaagacagcaacaccaagaaggccggcaagacaggccccatgaaaaccctgctggttagagtgatgacacccgatctgagagagcggctggaaaacctgagaaagaagcctgaaaatatcccccagcccatcagcaatacatctagagccaacctgaataagctgctgaccgattacaccgaaatgaagaaggcgatcctgcatgtgtactgggaagagttccagaaggaccctgtgggcctgatgagccgggtggcccagcctgccagcaagaagatcgatcagaacaagctgaaacctgagatggacgagaagggcaacctgaccaccgccggctttgcctgctctcagtgtggccagcccctgttcgtgtacaagctggagcaggtgtctgagaagggcaaggcttacaccaactacttcggacggtgcaatgtggccgagcacgaaaagctgatcctgctggcccagctgaagcccgagaaggatagcgacgaagccgtgacatatagcctgggaaagtttgggcagagggccctggatttctacagcattcatgtgaccaaggagtccacccaccccgtgaagcccctggcccagatcgccggaaacagatacgcctccggacctgtgggaaaggccctgagcgacgcatgtatgggcacaatcgcctccttcctgtctaagtaccaggacatcatcatcgaacaccagaaggtggtgaagggcaaccagaagagactggagagcctgcgggagctggccggcaaggaaaacctggaataccctagcgtgaccctgccacctcagcctcacaccaaggagggcgttgatgcctacaacgaagtgatcgcccgggtgcgaatgtgggtgaacctgaacctgtggcagaagctgaagctaagcagagatgatgccaagcctctgctgagactgaagggattcccttcctttcctctggtcgagagacaggccaacgaagtggactggtgggacatggtgtgtaacgtgaagaagctgatcaacgagaaaaaggaggatggcaaggtgttttggcagaatctggctggctacaagagacaggaagccctgagaccatacctgagcagcgaggaagatcggaagaagggaaagaaattcgctcggtaccagctgggcgacctgctgctgcacctggaaaagaagcacggcgaggactggggaaaggtgtacgacgaggcctgggagcggattgacaagaaagtggaaggcctgagcaagcacatcaagctggaagaggaacggagaagcgaggacgcccagagcaaggccgccctgaccgactggctgcgggctaaggccagcttcgtgatcgagggcctgaaggaggccgacaaggacgagttctgcagatgcgagctgaagctgcagaagtggtacggggacctgcggggaaagcccttcgccatcgaagccgagaacagcatcctggacatcagcggcttcagcaagcagtacaactgtgccttcatctggcagaaggacggcgtgaagaagctgaacctgtacctgatcatcaactacttcaagggcggcaagctgcggttcaagaagatcaaacctgaagccttcgaagccaacagattctacaccgtgatcaacaaaaagagcggcgagatcgtgcccatggaggtgaacttcaacttcgacgaccccaacctgatcatcctgcctctggcctttggcaagagacagggcagagaattcatctggaacgacctgctgtccctggaaaccggcagcctgaagctggccaacggaagagtgatcgagaagacactgtacaacagaagaacccggcaggatgagcctgccctgttcgtggccctgaccttcgagcggcgggaggtcctggactcctccaatatcaaaccaatgaacctgatcggcgtggcaagaggcgaaaacatccccgccgtgatcgccctgaccgaccccgagggctgcccactgagccggtttaaggatagcctgggaaacccaacccacatcctgagaatcggcgagagctataaggagaagcagcggaccatccaggccaagaaggaggtggagcagcggagagccggcggctacagccggaagtacgccagcaaagccaagaatctggcagacgatatggtgagaaacaccgctagagatctgctgtactacgccgtgacccaggatgccatgctgatcttcgccaacctgagccggggcttcggccggcagggcaagcggaccttcatggccgagagacagtacacacggatggaggactggctgaccgccaagctggcctacgagggcctgagcaagacctacctgtccaagacactggcccagtacacctccaagacatgcagcaactgtgggtttaccatcaccagcgccgactacgacagggtgctggagaagctgaagaagacagcaacaggctggatgaccacaattaacggcaaggagctgaaggtggagggccagattacctactacaacagatacaagagacagaacgtagtcaaggacctgtccgtcgagctggatagactgagcgaagaatctgtgaacaacgacatctcctcctggacaaagggcagaagcggagaagctctgagcctcctgaagaaaagattctcccatagacccgtgcaggagaagttcgtgtgcctgaactgcggcttcgagacacacgcagccgagcaagccgccctgaacatcgccagatcctggctgttcctgcggagccaggagtacaagaaataccagacaaacaagacaaccggcaacaccgataagagagccttcgtcgagacctggcagtccttttaccggaagaagcttaaggaggtgtggaaacctgccgtgcggtctggcggatctggcggaggctcccaggccgaggtgaccttcgaggacgtggccgtgctgttcagcagggaggagtggggcaggctgggccccacccagaggggcctgtacagggacgtgatgctggagacctacaggaacctggtgagcctgggcgccggcagggccggccccaagcccggcgtgatcacccagctggagaggggcgacgagccctgggtgctggacgcccagggcgccaagggcaagggcaggcccagggtgagcggcggcccaagcagcggcgcccctcctcccagcggcggcagcccagccggctccccaacctctaccgaggagggcacctctgagtccgccacccccgagagcggccctggcacctccaccgagcccagcgagggcagcgcacccggcagccctgccggcagccccacctccacagaggagggaaccagcaccgagcccagcgaaggcagcgccccaggcaccagcaccgagcctagtgagcaggagattaaacggatcaacaagatcagaagaagacttgtgaaagacagcaacaccaagaaggccggcaagacaggccccatgaaaaccctgctggttagagtgatgacacccgatctgagagagcggctggaaaacctgagaaagaagcctgaaaatatcccccagcccatcagcaatacatctagagccaacctgaataagctgctgaccgattacaccgaaatgaagaaggcgatcctgcatgtgtactgggaagagttccagaaggaccctgtgggcctgatgagccgggtggcccagcctgccagcaagaagatcgatcagaacaagctgaaacctgagatggacgagaagggcaacctgaccaccgccggctttgcctgctctcagtgtggccagcccctgttcgtgtacaagctggagcaggtgtctgagaagggcaaggcttacaccaactacttcggacggtgcaatgtggccgagcacgaaaagctgatcctgctggcccagctgaagcccgagaaggatagcgacgaagccgtgacatatagcctgggaaagtttgggcagagggccctggatttctacagcattcatgtgaccaaggagtccacccaccccgtgaagcccctggcccagatcgccggaaacagatacgcctccggacctgtgggaaaggccctgagcgacgcatgtatgggcacaatcgcctccttcctgtctaagtaccaggacatcatcatcgaacaccagaaggtggtgaagggcaaccagaagagactggagagcctgcgggagctggccggcaaggaaaacctggaataccctagcgtgaccctgccacctcagcctcacaccaaggagggcgttgatgcctacaacgaagtgatcgcccgggtgcgaatgtgggtgaacctgaacctgtggcagaagctgaagctaagcagagatgatgccaagcctctgctgagactgaagggattcccttcctttcctctggtcgagagacaggccaacgaagtggactggtgggacatggtgtgtaacgtgaagaagctgatcaacgagaaaaaggaggatggcaaggtgttttggcagaatctggctggctacaagagacaggaagccctgagaccatacctgagcagcgaggaagatcggaagaagggaaagaaattcgctcggtaccagctgggcgacctgctgctgcacctggaaaagaagcacggcgaggactggggaaaggtgtacgacgaggcctgggagcggattgacaagaaagtggaaggcctgagcaagcacatcaagctggaagaggaacggagaagcgaggacgcccagagcaaggccgccctgaccgactggctgcgggctaaggccagcttcgtgatcgagggcctgaaggaggccgacaaggacgagttctgcagatgcgagctgaagctgcagaagtggtacggggacctgcggggaaagcccttcgccatcgaagccgagaacagcatcctggacatcagcggcttcagcaagcagtacaactgtgccttcatctggcagaaggacggcgtgaagaagctgaacctgtacctgatcatcaactacttcaagggcggcaagctgcggttcaagaagatcaaacctgaagccttcgaagccaacagattctacaccgtgatcaacaaaaagagcggcgagatcgtgcccatggaggtgaacttcaacttcgacgaccccaacctgatcatcctgcctctggcctttggcaagagacagggcagagaattcatctggaacgacctgctgtccctggaaaccggcagcctgaagctggccaacggaagagtgatcgagaagacactgtacaacagaagaacccggcaggatgagcctgccctgttcgtggccctgaccttcgagcggcgggaggtcctggactcctccaatatcaaaccaatgaacctgatcggcgtggcaagaggcgaaaacatccccgccgtgatcgccctgaccgaccccgagggctgcccactgagccggtttaaggatagcctgggaaacccaacccacatcctgagaatcggcgagagctataaggagaagcagcggaccatccaggccaagaaggaggtggagcagcggagagccggcggctacagccggaagtacgccagcaaagccaagaatctggcagacgatatggtgagaaacaccgctagagatctgctgtactacgccgtgacccaggatgccatgctgatcttcgccaacctgagccggggcttcggccggcagggcaagcggaccttcatggccgagagacagtacacacggatggaggactggctgaccgccaagctggcctacgagggcctgagcaagacctacctgtccaagacactggcccagtacacctccaagacatgcagcaactgtgggtttaccatcaccagcgccgactacgacagggtgctggagaagctgaagaagacagcaacaggctggatgaccacaattaacggcaaggagctgaaggtggagggccagattacctactacaacagatacaagagacagaacgtagtcaaggacctgtccgtcgagctggatagactgagcgaagaatctgtgaacaacgacatctcctcctggacaaagggcagaagcggagaagctctgagcctcctgaagaaaagattctcccatagacccgtgcaggagaagttcgtgtgcctgaactgcggcttcgagacacacgcagccgagcaagccgccctgaacatcgccagatcctggctgttcctgcggagccaggagtacaagaaataccagacaaacaagacaaccggcaacaccgataagagagccttcgtcgagacctggcagtccttttaccggaagaagcttaaggaggtgtggaaacctgccgtgcggtctggcggatctggcggaggctcctcaggccgaggtgaccttcgaggacgtggccgtgctgttcagcagggaggagtggggcaggctgggccccacccagaggggcctgtacagggacgtgatgctggagacctacaggaacctggtgagcctgggcgccggcagggccggccccaagcccggcgtgatcacccagctggagaggggcgacgagccctgggtgctggacgcccagggcgccaagggcaagggcaggcccagggtgagcggatctggctccggcagcggccccaagaaaaagagaaaagtctaagctgccttctgcggggcttgccttctggccatgcccttcttctctcccttgcacctgtacctcttggtctttgaataaagcctgagtaggaaggctagcaaaaaaaaaaaaaaaaaaaaaaaaaaaaaaaaaaaaaaaaaaaaaaaaaaaaaaaaaaaaaaaaaaaaaaaaaaaaaaaa

SEQ ID NO: 15931 - RNA, 9485 nt, synthetic construct
  source 1..9485: mol_type = other RNA
aggaaataagagagaaaagaagagtaagaagaaatataagagccaccatggcccctaagaagaagcgtaaagtgagccggatggaacgcctcgtctacgaggtgcggcagaagtgcagaaacatcgaggacatctgcatctcctgcggatctctgaacgtgaccctggagcacccactgttcatcggcggcatgtgccagaactgtaaaaactgttttctggagtgtgcctatcaatacgacgatgacggctaccagagctactgcaccatctgttgcggcggaagagaggtgctgatgtgtggaaataacaactgctgccggtgcttctgcgtggaatgcgtggacctgctggtgggccccggcgccgcccaggccgctattaaggaagatccttggaactgctacatgtgcggccacaagggcacatacggcctgctgagacggagagaggactggcctagcagactgcagatgttcttcgccaataaccacgaccaggagttcgacccccctaaggtgtaccctcccgtccccgccgagaagagaaagcccatccgggtcctgagcctgttcgatggcatcgccaccggtctgctggtgctgaaggacctgggcatccaggtggataggtacattgcctccgaggtgtgcgaggactccatcaccgtgggaatggtgcgtcatcagggcaagatcatgtacgtgggcgacgtgcggagcgtgacacagaagcatatccaggagtggggccctttcgacctggtgatcggcggcagcccttgcaatgacctgagcatcgtgaacccagcccggaagggcctgtacgagggaaccggcagactgttcttcgagttttacagactgctgcacgacgcccggcctaaggaaggcgacgaccggcccttcttttggctgttcgagaatgtggtggccatgggagtcagcgacaagcgggatattagccggttcctggagagcaaccccgtgatgatcgatgccaaggaagtgagcgccgcccaccgggccagatacttctggggcaatctgcctggcatgaacagacccctggccagcaccgtgaacgacaagctggagctgcaggagtgcctggagcacggccggatcgccaagttcagcaaggtgagaaccatcaccacccgaagcaacagcatcaaacaaggcaaggaccagcactttcctgtgttcatgaacgagaaggaggacatcctgtggtgtaccgagatggagagagtgttcgggttcccagtccactacacagatgtcagcaacatgtctagactggccagacagagactgctgggaagaagctggtccgtccctgtgatcagacacctgttcgcccctctgaaggagtacttcgcctgcgtgagcagcggcaacagcaacgccaacagccggggccccagcttctctagcggcctggtgccactgtccctgagagggagccacatgggccccatggagatctacaaaaccgtgagcgcctggaagcggcagcctgtgcgcgtgctgagcctgtttcggaatatcgataaagtcctgaaaagcctgggattcctggagagcggctctggctccggcggtggcaccctgaagtacgtggaggatgtgacaaacgtggtcagacgggatgtggagaagtggggccccttcgatctggtgtacggcagcacccaacccctgggcagctcttgtgaccggtgccctggctggtacatgtttcagttccaccggatcctgcagtacgccctgccgagacaggagtcccagcggccattcttttggattttcatggacaacttgctgctgaccgaggatgaccaggaaactaccactcggttcctgcagaccgaagccgtgaccctgcaggacgtgagaggccgggactaccagaacgccatgcgggtgtggtccaacatccctggactgaaaagcaagcacgcacctctgacccctaaagaagaggagtacctgcaggcccaggtgcggagcagaagcaagctggacgcccctaaggtggatctgctggtgaagaattgcctcctgcccctgagagagtacttcaagtatttcagccagaatagtctgcccctgggaggcagcggcggcggcgccctggtgacatttgaggacgtcgccgtgcggttcacccaggaggaatgggctctgctggatccttctcagaaaatcctgtaccgggacgtgatgagagagacataccggaatctgacctccgtgggcatcaactgggaatgttgggaccttgaagcctgcttcagaagcctgggaagaaacctgagagtgcaggtggtgaagagaaagtgcgagctgaccaacagcggcccctgcgccgagggcggcccaagcagcggcgcccctcctcccagcggcggcagcccagccggctccccaacctctaccgaggagggcacctctgagtccgccacccccgagagcggccctggcacctccaccgagcccagcgagggcagcgcacccggcagccctgccggcagccccacctccacagaggagggaaccagcaccgagcccagcgaaggcagcgccccaggcaccagcaccgagcctagtgagcaggagattaaacggatcaacaagatcagaagaagacttgtgaaagacagcaacaccaagaaggccggcaagacaggccccatgaaaaccctgctggttagagtgatgacacccgatctgagagagcggctggaaaacctgagaaagaagcctgaaaatatcccccagcccatcagcaatacatctagagccaacctgaataagctgctgaccgattacaccgaaatgaagaaggcgatcctgcatgtgtactgggaagagttccagaaggaccctgtgggcctgatgagccgggtggcccagcctgccagcaagaagatcgatcagaacaagctgaaacctgagatggacgagaagggcaacctgaccaccgccggctttgcctgctctcagtgtggccagcccctgttcgtgtacaagctggagcaggtgtctgagaagggcaaggcttacaccaactacttcggacggtgcaatgtggccgagcacgaaaagctgatcctgctggcccagctgaagcccgagaaggatagcgacgaagccgtgacatatagcctgggaaagtttgggcagagggccctggatttctacagcattcatgtgaccaaggagtccacccaccccgtgaagcccctggcccagatcgccggaaacagatacgcctccggacctgtgggaaaggccctgagcgacgcatgtatgggcacaatcgcctccttcctgtctaagtaccaggacatcatcatcgaacaccagaaggtggtgaagggcaaccagaagagactggagagcctgcgggagctggccggcaaggaaaacctggaataccctagcgtgaccctgccacctcagcctcacaccaaggagggcgttgatgcctacaacgaagtgatcgcccgggtgcgaatgtgggtgaacctgaacctgtggcagaagctgaagctaagcagagatgatgccaagcctctgctgagactgaagggattcccttcctttcctctggtcgagagacaggccaacgaagtggactggtgggacatggtgtgtaacgtgaagaagctgatcaacgagaaaaaggaggatggcaaggtgttttggcagaatctggctggctacaagagacaggaagccctgagaccatacctgagcagcgaggaagatcggaagaagggaaagaaattcgctcggtaccagctgggcgacctgctgctgcacctggaaaagaagcacggcgaggactggggaaaggtgtacgacgaggcctgggagcggattgacaagaaagtggaaggcctgagcaagcacatcaagctggaagaggaacggagaagcgaggacgcccagagcaaggccgccctgaccgactggctgcgggctaaggccagcttcgtgatcgagggcctgaaggaggccgacaaggacgagttctgcagatgcgagctgaagctgcagaagtggtacggggacctgcggggaaagcccttcgccatcgaagccgagaacagcatcctggacatcagcggcttcagcaagcagtacaactgtgccttcatctggcagaaggacggcgtgaagaagctgaacctgtacctgatcatcaactacttcaagggcggcaagctgcggttcaagaagatcaaacctgaagccttcgaagccaacagattctacaccgtgatcaacaaaaagagcggcgagatcgtgcccatggaggtgaacttcaacttcgacgaccccaacctgatcatcctgcctctggcctttggcaagagacagggcagagaattcatctggaacgacctgctgtccctggaaaccggcagcctgaagctggccaacggaagagtgatcgagaagacactgtacaacagaagaacccggcaggatgagcctgccctgttcgtggccctgaccttcgagcggcgggaggtcctggactcctccaatatcaaaccaatgaacctgatcggcgtggcaagaggcgaaaacatccccgccgtgatcgccctgaccgaccccgagggctgcccactgagccggtttaaggatagcctgggaaacccaacccacatcctgagaatcggcgagagctataaggagaagcagcggaccatccaggccaagaaggaggtggagcagcggagagccggcggctacagccggaagtacgccagcaaagccaagaatctggcagacgatatggtgagaaacaccgctagagatctgctgtactacgccgtgacccaggatgccatgctgatcttcgccaacctgagccggggcttcggccggcagggcaagcggaccttcatggccgagagacagtacacacggatggaggactggctgaccgccaagctggcctacgagggcctgagcaagacctacctgtccaagacactggcccagtacacctccaagacatgcagcaactgtgggtttaccatcaccagcgccgactacgacagggtgctggagaagctgaagaagacagcaacaggctggatgaccacaattaacggcaaggagctgaaggtggagggccagattacctactacaacagatacaagagacagaacgtagtcaaggacctgtccgtcgagctggatagactgagcgaagaatctgtgaacaacgacatctcctcctggacaaagggcagaagcggagaagctctgagcctcctgaagaaaagattctcccatagacccgtgcaggagaagttcgtgtgcctgaactgcggcttcgagacacacgcagccgagcaagccgccctgaacatcgccagatcctggctgttcctgcggagccaggagtacaagaaataccagacaaacaagacaaccggcaacaccgataagagagccttcgtcgagacctggcagtccttttaccggaagaagcttaaggaggtgtggaaacctgccgtgcggtctggcggatctggcggaggctccatggccgccggccagagggaggccaggccccaggtgagcctgaccttcgaggacgtggccgtgctgttcaccagggacgagtggaggaagctggcccccagccagaggaacctgtacagggacgtgatgctggagaactacaggaacctggtgagcctgggcctgcccttcaccaagcccaaggtgatcagcctgctgcagcagggcgaggacccctgggaggtggagaaggacggcagcggcggcggcccaagcagcggcgcccctcctcccagcggcggcagcccagccggctccccaacctctaccgaggagggcacctctgagtccgccacccccgagagcggccctggcacctccaccgagcccagcgagggcagcgcacccggcagccctgccggcagccccacctccacagaggagggaaccagcaccgagcccagcgaaggcagcgccccaggcaccagcaccgagcctagtgagcaggagattaaacggatcaacaagatcagaagaagacttgtgaaagacagcaacaccaagaaggccggcaagacaggccccatgaaaaccctgctggttagagtgatgacacccgatctgagagagcggctggaaaacctgagaaagaagcctgaaaatatcccccagcccatcagcaatacatctagagccaacctgaataagctgctgaccgattacaccgaaatgaagaaggcgatcctgcatgtgtactgggaagagttccagaaggaccctgtgggcctgatgagccgggtggcccagcctgccagcaagaagatcgatcagaacaagctgaaacctgagatggacgagaagggcaacctgaccaccgccggctttgcctgctctcagtgtggccagcccctgttcgtgtacaagctggagcaggtgtctgagaagggcaaggcttacaccaactacttcggacggtgcaatgtggccgagcacgaaaagctgatcctgctggcccagctgaagcccgagaaggatagcgacgaagccgtgacatatagcctgggaaagtttgggcagagggccctggatttctacagcattcatgtgaccaaggagtccacccaccccgtgaagcccctggcccagatcgccggaaacagatacgcctccggacctgtgggaaaggccctgagcgacgcatgtatgggcacaatcgcctccttcctgtctaagtaccaggacatcatcatcgaacaccagaaggtggtgaagggcaaccagaagagactggagagcctgcgggagctggccggcaaggaaaacctggaataccctagcgtgaccctgccacctcagcctcacaccaaggagggcgttgatgcctacaacgaagtgatcgcccgggtgcgaatgtgggtgaacctgaacctgtggcagaagctgaagctaagcagagatgatgccaagcctctgctgagactgaagggattcccttcctttcctctggtcgagagacaggccaacgaagtggactggtgggacatggtgtgtaacgtgaagaagctgatcaacgagaaaaaggaggatggcaaggtgttttggcagaatctggctggctacaagagacaggaagccctgagaccatacctgagcagcgaggaagatcggaagaagggaaagaaattcgctcggtaccagctgggcgacctgctgctgcacctggaaaagaagcacggcgaggactggggaaaggtgtacgacgaggcctgggagcggattgacaagaaagtggaaggcctgagcaagcacatcaagctggaagaggaacggagaagcgaggacgcccagagcaaggccgccctgaccgactggctgcgggctaaggccagcttcgtgatcgagggcctgaaggaggccgacaaggacgagttctgcagatgcgagctgaagctgcagaagtggtacggggacctgcggggaaagcccttcgccatcgaagccgagaacagcatcctggacatcagcggcttcagcaagcagtacaactgtgccttcatctggcagaaggacggcgtgaagaagctgaacctgtacctgatcatcaactacttcaagggcggcaagctgcggttcaagaagatcaaacctgaagccttcgaagccaacagattctacaccgtgatcaacaaaaagagcggcgagatcgtgcccatggaggtgaacttcaacttcgacgaccccaacctgatcatcctgcctctggcctttggcaagagacagggcagagaattcatctggaacgacctgctgtccctggaaaccggcagcctgaagctggccaacggaagagtgatcgagaagacactgtacaacagaagaacccggcaggatgagcctgccctgttcgtggccctgaccttcgagcggcgggaggtcctggactcctccaatatcaaaccaatgaacctgatcggcgtggcaagaggcgaaaacatccccgccgtgatcgccctgaccgaccccgagggctgcccactgagccggtttaaggatagcctgggaaacccaacccacatcctgagaatcggcgagagctataaggagaagcagcggaccatccaggccaagaaggaggtggagcagcggagagccggcggctacagccggaagtacgccagcaaagccaagaatctggcagacgatatggtgagaaacaccgctagagatctgctgtactacgccgtgacccaggatgccatgctgatcttcgccaacctgagccggggcttcggccggcagggcaagcggaccttcatggccgagagacagtacacacggatggaggactggctgaccgccaagctggcctacgagggcctgagcaagacctacctgtccaagacactggcccagtacacctccaagacatgcagcaactgtgggtttaccatcaccagcgccgactacgacagggtgctggagaagctgaagaagacagcaacaggctggatgaccacaattaacggcaaggagctgaaggtggagggccagattacctactacaacagatacaagagacagaacgtagtcaaggacctgtccgtcgagctggatagactgagcgaagaatctgtgaacaacgacatctcctcctggacaaagggcagaagcggagaagctctgagcctcctgaagaaaagattctcccatagacccgtgcaggagaagttcgtgtgcctgaactgcggcttcgagacacacgcagccgagcaagccgccctgaacatcgccagatcctggctgttcctgcggagccaggagtacaagaaataccagacaaacaagacaaccggcaacaccgataagagagccttcgtcgagacctggcagtccttttaccggaagaagcttaaggaggtgtggaaacctgccgtgcggtctggcggatctggcggaggctcctatggccgccggccagagggaggccaggccccaggtgagcctgaccttcgaggacgtggccgtgctgttcaccagggacgagtggaggaagctggcccccagccagaggaacctgtacagggacgtgatgctggagaactacaggaacctggtgagcctgggcctgcccttcaccaagcccaaggtgatcagcctgctgcagcagggcgaggacccctgggaggtggagaaggacggcagcggcggatctggctccggcagcggccccaagaaaaagagaaaagtctaagctgccttctgcggggcttgccttctggccatgcccttcttctctcccttgcacctgtacctcttggtctttgaataaagcctgagtaggaaggctagcaaaaaaaaaaaaaaaaaaaaaaaaaaaaaaaaaaaaaaaaaaaaaaaaaaaaaaaaaaaaaaaaaaaaaaaaaaaaaaaa

SEQ ID NO: 15932 - RNA, 9485 nt, synthetic construct
  source 1..9485: mol_type = other RNA
aggaaataagagagaaaagaagagtaagaagaaatataagagccaccatggcccctaagaagaagcgtaaagtgagccggatggaacgcctcgtctacgaggtgcggcagaagtgcagaaacatcgaggacatctgcatctcctgcggatctctgaacgtgaccctggagcacccactgttcatcggcggcatgtgccagaactgtaaaaactgttttctggagtgtgcctatcaatacgacgatgacggctaccagagctactgcaccatctgttgcggcggaagagaggtgctgatgtgtggaaataacaactgctgccggtgcttctgcgtggaatgcgtggacctgctggtgggccccggcgccgcccaggccgctattaaggaagatccttggaactgctacatgtgcggccacaagggcacatacggcctgctgagacggagagaggactggcctagcagactgcagatgttcttcgccaataaccacgaccaggagttcgacccccctaaggtgtaccctcccgtccccgccgagaagagaaagcccatccgggtcctgagcctgttcgatggcatcgccaccggtctgctggtgctgaaggacctgggcatccaggtggataggtacattgcctccgaggtgtgcgaggactccatcaccgtgggaatggtgcgtcatcagggcaagatcatgtacgtgggcgacgtgcggagcgtgacacagaagcatatccaggagtggggccctttcgacctggtgatcggcggcagcccttgcaatgacctgagcatcgtgaacccagcccggaagggcctgtacgagggaaccggcagactgttcttcgagttttacagactgctgcacgacgcccggcctaaggaaggcgacgaccggcccttcttttggctgttcgagaatgtggtggccatgggagtcagcgacaagcgggatattagccggttcctggagagcaaccccgtgatgatcgatgccaaggaagtgagcgccgcccaccgggccagatacttctggggcaatctgcctggcatgaacagacccctggccagcaccgtgaacgacaagctggagctgcaggagtgcctggagcacggccggatcgccaagttcagcaaggtgagaaccatcaccacccgaagcaacagcatcaaacaaggcaaggaccagcactttcctgtgttcatgaacgagaaggaggacatcctgtggtgtaccgagatggagagagtgttcgggttcccagtccactacacagatgtcagcaacatgtctagactggccagacagagactgctgggaagaagctggtccgtccctgtgatcagacacctgttcgcccctctgaaggagtacttcgcctgcgtgagcagcggcaacagcaacgccaacagccggggccccagcttctctagcggcctggtgccactgtccctgagagggagccacatgggccccatggagatctacaaaaccgtgagcgcctggaagcggcagcctgtgcgcgtgctgagcctgtttcggaatatcgataaagtcctgaaaagcctgggattcctggagagcggctctggctccggcggtggcaccctgaagtacgtggaggatgtgacaaacgtggtcagacgggatgtggagaagtggggccccttcgatctggtgtacggcagcacccaacccctgggcagctcttgtgaccggtgccctggctggtacatgtttcagttccaccggatcctgcagtacgccctgccgagacaggagtcccagcggccattcttttggattttcatggacaacttgctgctgaccgaggatgaccaggaaactaccactcggttcctgcagaccgaagccgtgaccctgcaggacgtgagaggccgggactaccagaacgccatgcgggtgtggtccaacatccctggactgaaaagcaagcacgcacctctgacccctaaagaagaggagtacctgcaggcccaggtgcggagcagaagcaagctggacgcccctaaggtggatctgctggtgaagaattgcctcctgcccctgagagagtacttcaagtatttcagccagaatagtctgcccctgggaggcagcggcggcggcgccctggtgacatttgaggacgtcgccgtgcggttcacccaggaggaatgggctctgctggatccttctcagaaaatcctgtaccgggacgtgatgagagagacataccggaatctgacctccgtgggcatcaactgggaatgttgggaccttgaagcctgcttcagaagcctgggaagaaacctgagagtgcaggtggtgaagagaaagtgcgagctgaccaacagcggcccctgcgccgagggcggcccaagcagcggcgcccctcctcccagcggcggcagcccagccggctccccaacctctaccgaggagggcacctctgagtccgccacccccgagagcggccctggcacctccaccgagcccagcgagggcagcgcacccggcagccctgccggcagccccacctccacagaggagggaaccagcaccgagcccagcgaaggcagcgccccaggcaccagcaccgagcctagtgagcaggagattaaacggatcaacaagatcagaagaagacttgtgaaagacagcaacaccaagaaggccggcaagacaggccccatgaaaaccctgctggttagagtgatgacacccgatctgagagagcggctggaaaacctgagaaagaagcctgaaaatatcccccagcccatcagcaatacatctagagccaacctgaataagctgctgaccgattacaccgaaatgaagaaggcgatcctgcatgtgtactgggaagagttccagaaggaccctgtgggcctgatgagccgggtggcccagcctgccagcaagaagatcgatcagaacaagctgaaacctgagatggacgagaagggcaacctgaccaccgccggctttgcctgctctcagtgtggccagcccctgttcgtgtacaagctggagcaggtgtctgagaagggcaaggcttacaccaactacttcggacggtgcaatgtggccgagcacgaaaagctgatcctgctggcccagctgaagcccgagaaggatagcgacgaagccgtgacatatagcctgggaaagtttgggcagagggccctggatttctacagcattcatgtgaccaaggagtccacccaccccgtgaagcccctggcccagatcgccggaaacagatacgcctccggacctgtgggaaaggccctgagcgacgcatgtatgggcacaatcgcctccttcctgtctaagtaccaggacatcatcatcgaacaccagaaggtggtgaagggcaaccagaagagactggagagcctgcgggagctggccggcaaggaaaacctggaataccctagcgtgaccctgccacctcagcctcacaccaaggagggcgttgatgcctacaacgaagtgatcgcccgggtgcgaatgtgggtgaacctgaacctgtggcagaagctgaagctaagcagagatgatgccaagcctctgctgagactgaagggattcccttcctttcctctggtcgagagacaggccaacgaagtggactggtgggacatggtgtgtaacgtgaagaagctgatcaacgagaaaaaggaggatggcaaggtgttttggcagaatctggctggctacaagagacaggaagccctgagaccatacctgagcagcgaggaagatcggaagaagggaaagaaattcgctcggtaccagctgggcgacctgctgctgcacctggaaaagaagcacggcgaggactggggaaaggtgtacgacgaggcctgggagcggattgacaagaaagtggaaggcctgagcaagcacatcaagctggaagaggaacggagaagcgaggacgcccagagcaaggccgccctgaccgactggctgcgggctaaggccagcttcgtgatcgagggcctgaaggaggccgacaaggacgagttctgcagatgcgagctgaagctgcagaagtggtacggggacctgcggggaaagcccttcgccatcgaagccgagaacagcatcctggacatcagcggcttcagcaagcagtacaactgtgccttcatctggcagaaggacggcgtgaagaagctgaacctgtacctgatcatcaactacttcaagggcggcaagctgcggttcaagaagatcaaacctgaagccttcgaagccaacagattctacaccgtgatcaacaaaaagagcggcgagatcgtgcccatggaggtgaacttcaacttcgacgaccccaacctgatcatcctgcctctggcctttggcaagagacagggcagagaattcatctggaacgacctgctgtccctggaaaccggcagcctgaagctggccaacggaagagtgatcgagaagacactgtacaacagaagaacccggcaggatgagcctgccctgttcgtggccctgaccttcgagcggcgggaggtcctggactcctccaatatcaaaccaatgaacctgatcggcgtggcaagaggcgaaaacatccccgccgtgatcgccctgaccgaccccgagggctgcccactgagccggtttaaggatagcctgggaaacccaacccacatcctgagaatcggcgagagctataaggagaagcagcggaccatccaggccaagaaggaggtggagcagcggagagccggcggctacagccggaagtacgccagcaaagccaagaatctggcagacgatatggtgagaaacaccgctagagatctgctgtactacgccgtgacccaggatgccatgctgatcttcgccaacctgagccggggcttcggccggcagggcaagcggaccttcatggccgagagacagtacacacggatggaggactggctgaccgccaagctggcctacgagggcctgagcaagacctacctgtccaagacactggcccagtacacctccaagacatgcagcaactgtgggtttaccatcaccagcgccgactacgacagggtgctggagaagctgaagaagacagcaacaggctggatgaccacaattaacggcaaggagctgaaggtggagggccagattacctactacaacagatacaagagacagaacgtagtcaaggacctgtccgtcgagctggatagactgagcgaagaatctgtgaacaacgacatctcctcctggacaaagggcagaagcggagaagctctgagcctcctgaagaaaagattctcccatagacccgtgcaggagaagttcgtgtgcctgaactgcggcttcgagacacacgcagccgagcaagccgccctgaacatcgccagatcctggctgttcctgcggagccaggagtacaagaaataccagacaaacaagacaaccggcaacaccgataagagagccttcgtcgagacctggcagtccttttaccggaagaagcttaaggaggtgtggaaacctgccgtgcggtctggcggatctggcggaggctccatccagaggctgctgaccttcggcgacgtggccgtggccttcaccaggatcgagtggaggcacctggacgccgcccagagggccctgtacagggacgtgatgctggagaactacggcaacctggtgagcgtgggcctgctgagcagcaagcccaagctgatcgcccagctggagcagggcgccgagccctggatggaggccagggagacccccagcggcaccagggccgtgcccgactactggggcggcccaagcagcggcgcccctcctcccagcggcggcagcccagccggctccccaacctctaccgaggagggcacctctgagtccgccacccccgagagcggccctggcacctccaccgagcccagcgagggcagcgcacccggcagccctgccggcagccccacctccacagaggagggaaccagcaccgagcccagcgaaggcagcgccccaggcaccagcaccgagcctagtgagcaggagattaaacggatcaacaagatcagaagaagacttgtgaaagacagcaacaccaagaaggccggcaagacaggccccatgaaaaccctgctggttagagtgatgacacccgatctgagagagcggctggaaaacctgagaaagaagcctgaaaatatcccccagcccatcagcaatacatctagagccaacctgaataagctgctgaccgattacaccgaaatgaagaaggcgatcctgcatgtgtactgggaagagttccagaaggaccctgtgggcctgatgagccgggtggcccagcctgccagcaagaagatcgatcagaacaagctgaaacctgagatggacgagaagggcaacctgaccaccgccggctttgcctgctctcagtgtggccagcccctgttcgtgtacaagctggagcaggtgtctgagaagggcaaggcttacaccaactacttcggacggtgcaatgtggccgagcacgaaaagctgatcctgctggcccagctgaagcccgagaaggatagcgacgaagccgtgacatatagcctgggaaagtttgggcagagggccctggatttctacagcattcatgtgaccaaggagtccacccaccccgtgaagcccctggcccagatcgccggaaacagatacgcctccggacctgtgggaaaggccctgagcgacgcatgtatgggcacaatcgcctccttcctgtctaagtaccaggacatcatcatcgaacaccagaaggtggtgaagggcaaccagaagagactggagagcctgcgggagctggccggcaaggaaaacctggaataccctagcgtgaccctgccacctcagcctcacaccaaggagggcgttgatgcctacaacgaagtgatcgcccgggtgcgaatgtgggtgaacctgaacctgtggcagaagctgaagctaagcagagatgatgccaagcctctgctgagactgaagggattcccttcctttcctctggtcgagagacaggccaacgaagtggactggtgggacatggtgtgtaacgtgaagaagctgatcaacgagaaaaaggaggatggcaaggtgttttggcagaatctggctggctacaagagacaggaagccctgagaccatacctgagcagcgaggaagatcggaagaagggaaagaaattcgctcggtaccagctgggcgacctgctgctgcacctggaaaagaagcacggcgaggactggggaaaggtgtacgacgaggcctgggagcggattgacaagaaagtggaaggcctgagcaagcacatcaagctggaagaggaacggagaagcgaggacgcccagagcaaggccgccctgaccgactggctgcgggctaaggccagcttcgtgatcgagggcctgaaggaggccgacaaggacgagttctgcagatgcgagctgaagctgcagaagtggtacggggacctgcggggaaagcccttcgccatcgaagccgagaacagcatcctggacatcagcggcttcagcaagcagtacaactgtgccttcatctggcagaaggacggcgtgaagaagctgaacctgtacctgatcatcaactacttcaagggcggcaagctgcggttcaagaagatcaaacctgaagccttcgaagccaacagattctacaccgtgatcaacaaaaagagcggcgagatcgtgcccatggaggtgaacttcaacttcgacgaccccaacctgatcatcctgcctctggcctttggcaagagacagggcagagaattcatctggaacgacctgctgtccctggaaaccggcagcctgaagctggccaacggaagagtgatcgagaagacactgtacaacagaagaacccggcaggatgagcctgccctgttcgtggccctgaccttcgagcggcgggaggtcctggactcctccaatatcaaaccaatgaacctgatcggcgtggcaagaggcgaaaacatccccgccgtgatcgccctgaccgaccccgagggctgcccactgagccggtttaaggatagcctgggaaacccaacccacatcctgagaatcggcgagagctataaggagaagcagcggaccatccaggccaagaaggaggtggagcagcggagagccggcggctacagccggaagtacgccagcaaagccaagaatctggcagacgatatggtgagaaacaccgctagagatctgctgtactacgccgtgacccaggatgccatgctgatcttcgccaacctgagccggggcttcggccggcagggcaagcggaccttcatggccgagagacagtacacacggatggaggactggctgaccgccaagctggcctacgagggcctgagcaagacctacctgtccaagacactggcccagtacacctccaagacatgcagcaactgtgggtttaccatcaccagcgccgactacgacagggtgctggagaagctgaagaagacagcaacaggctggatgaccacaattaacggcaaggagctgaaggtggagggccagattacctactacaacagatacaagagacagaacgtagtcaaggacctgtccgtcgagctggatagactgagcgaagaatctgtgaacaacgacatctcctcctggacaaagggcagaagcggagaagctctgagcctcctgaagaaaagattctcccatagacccgtgcaggagaagttcgtgtgcctgaactgcggcttcgagacacacgcagccgagcaagccgccctgaacatcgccagatcctggctgttcctgcggagccaggagtacaagaaataccagacaaacaagacaaccggcaacaccgataagagagccttcgtcgagacctggcagtccttttaccggaagaagcttaaggaggtgtggaaacctgccgtgcggtctggcggatctggcggaggctcctatccagaggctgctgaccttcggcgacgtggccgtggccttcaccaggatcgagtggaggcacctggacgccgcccagagggccctgtacagggacgtgatgctggagaactacggcaacctggtgagcgtgggcctgctgagcagcaagcccaagctgatcgcccagctggagcagggcgccgagccctggatggaggccagggagacccccagcggcaccagggccgtgcccgactactggggatctggctccggcagcggccccaagaaaaagagaaaagtctaagctgccttctgcggggcttgccttctggccatgcccttcttctctcccttgcacctgtacctcttggtctttgaataaagcctgagtaggaaggctagcaaaaaaaaaaaaaaaaaaaaaaaaaaaaaaaaaaaaaaaaaaaaaaaaaaaaaaaaaaaaaaaaaaaaaaaaaaaaaaaa

SEQ ID NO: 15933 - RNA, 9485 nt, synthetic construct
  source 1..9485: mol_type = other RNA
aggaaataagagagaaaagaagagtaagaagaaatataagagccaccatggcccctaagaagaagcgtaaagtgagccggatggaacgcctcgtctacgaggtgcggcagaagtgcagaaacatcgaggacatctgcatctcctgcggatctctgaacgtgaccctggagcacccactgttcatcggcggcatgtgccagaactgtaaaaactgttttctggagtgtgcctatcaatacgacgatgacggctaccagagctactgcaccatctgttgcggcggaagagaggtgctgatgtgtggaaataacaactgctgccggtgcttctgcgtggaatgcgtggacctgctggtgggccccggcgccgcccaggccgctattaaggaagatccttggaactgctacatgtgcggccacaagggcacatacggcctgctgagacggagagaggactggcctagcagactgcagatgttcttcgccaataaccacgaccaggagttcgacccccctaaggtgtaccctcccgtccccgccgagaagagaaagcccatccgggtcctgagcctgttcgatggcatcgccaccggtctgctggtgctgaaggacctgggcatccaggtggataggtacattgcctccgaggtgtgcgaggactccatcaccgtgggaatggtgcgtcatcagggcaagatcatgtacgtgggcgacgtgcggagcgtgacacagaagcatatccaggagtggggccctttcgacctggtgatcggcggcagcccttgcaatgacctgagcatcgtgaacccagcccggaagggcctgtacgagggaaccggcagactgttcttcgagttttacagactgctgcacgacgcccggcctaaggaaggcgacgaccggcccttcttttggctgttcgagaatgtggtggccatgggagtcagcgacaagcgggatattagccggttcctggagagcaaccccgtgatgatcgatgccaaggaagtgagcgccgcccaccgggccagatacttctggggcaatctgcctggcatgaacagacccctggccagcaccgtgaacgacaagctggagctgcaggagtgcctggagcacggccggatcgccaagttcagcaaggtgagaaccatcaccacccgaagcaacagcatcaaacaaggcaaggaccagcactttcctgtgttcatgaacgagaaggaggacatcctgtggtgtaccgagatggagagagtgttcgggttcccagtccactacacagatgtcagcaacatgtctagactggccagacagagactgctgggaagaagctggtccgtccctgtgatcagacacctgttcgcccctctgaaggagtacttcgcctgcgtgagcagcggcaacagcaacgccaacagccggggccccagcttctctagcggcctggtgccactgtccctgagagggagccacatgggccccatggagatctacaaaaccgtgagcgcctggaagcggcagcctgtgcgcgtgctgagcctgtttcggaatatcgataaagtcctgaaaagcctgggattcctggagagcggctctggctccggcggtggcaccctgaagtacgtggaggatgtgacaaacgtggtcagacgggatgtggagaagtggggccccttcgatctggtgtacggcagcacccaacccctgggcagctcttgtgaccggtgccctggctggtacatgtttcagttccaccggatcctgcagtacgccctgccgagacaggagtcccagcggccattcttttggattttcatggacaacttgctgctgaccgaggatgaccaggaaactaccactcggttcctgcagaccgaagccgtgaccctgcaggacgtgagaggccgggactaccagaacgccatgcgggtgtggtccaacatccctggactgaaaagcaagcacgcacctctgacccctaaagaagaggagtacctgcaggcccaggtgcggagcagaagcaagctggacgcccctaaggtggatctgctggtgaagaattgcctcctgcccctgagagagtacttcaagtatttcagccagaatagtctgcccctgggaggcagcggcggcggcgccctggtgacatttgaggacgtcgccgtgcggttcacccaggaggaatgggctctgctggatccttctcagaaaatcctgtaccgggacgtgatgagagagacataccggaatctgacctccgtgggcatcaactgggaatgttgggaccttgaagcctgcttcagaagcctgggaagaaacctgagagtgcaggtggtgaagagaaagtgcgagctgaccaacagcggcccctgcgccgagggcggcccaagcagcggcgcccctcctcccagcggcggcagcccagccggctccccaacctctaccgaggagggcacctctgagtccgccacccccgagagcggccctggcacctccaccgagcccagcgagggcagcgcacccggcagccctgccggcagccccacctccacagaggagggaaccagcaccgagcccagcgaaggcagcgccccaggcaccagcaccgagcctagtgagcaggagattaaacggatcaacaagatcagaagaagacttgtgaaagacagcaacaccaagaaggccggcaagacaggccccatgaaaaccctgctggttagagtgatgacacccgatctgagagagcggctggaaaacctgagaaagaagcctgaaaatatcccccagcccatcagcaatacatctagagccaacctgaataagctgctgaccgattacaccgaaatgaagaaggcgatcctgcatgtgtactgggaagagttccagaaggaccctgtgggcctgatgagccgggtggcccagcctgccagcaagaagatcgatcagaacaagctgaaacctgagatggacgagaagggcaacctgaccaccgccggctttgcctgctctcagtgtggccagcccctgttcgtgtacaagctggagcaggtgtctgagaagggcaaggcttacaccaactacttcggacggtgcaatgtggccgagcacgaaaagctgatcctgctggcccagctgaagcccgagaaggatagcgacgaagccgtgacatatagcctgggaaagtttgggcagagggccctggatttctacagcattcatgtgaccaaggagtccacccaccccgtgaagcccctggcccagatcgccggaaacagatacgcctccggacctgtgggaaaggccctgagcgacgcatgtatgggcacaatcgcctccttcctgtctaagtaccaggacatcatcatcgaacaccagaaggtggtgaagggcaaccagaagagactggagagcctgcgggagctggccggcaaggaaaacctggaataccctagcgtgaccctgccacctcagcctcacaccaaggagggcgttgatgcctacaacgaagtgatcgcccgggtgcgaatgtgggtgaacctgaacctgtggcagaagctgaagctaagcagagatgatgccaagcctctgctgagactgaagggattcccttcctttcctctggtcgagagacaggccaacgaagtggactggtgggacatggtgtgtaacgtgaagaagctgatcaacgagaaaaaggaggatggcaaggtgttttggcagaatctggctggctacaagagacaggaagccctgagaccatacctgagcagcgaggaagatcggaagaagggaaagaaattcgctcggtaccagctgggcgacctgctgctgcacctggaaaagaagcacggcgaggactggggaaaggtgtacgacgaggcctgggagcggattgacaagaaagtggaaggcctgagcaagcacatcaagctggaagaggaacggagaagcgaggacgcccagagcaaggccgccctgaccgactggctgcgggctaaggccagcttcgtgatcgagggcctgaaggaggccgacaaggacgagttctgcagatgcgagctgaagctgcagaagtggtacggggacctgcggggaaagcccttcgccatcgaagccgagaacagcatcctggacatcagcggcttcagcaagcagtacaactgtgccttcatctggcagaaggacggcgtgaagaagctgaacctgtacctgatcatcaactacttcaagggcggcaagctgcggttcaagaagatcaaacctgaagccttcgaagccaacagattctacaccgtgatcaacaaaaagagcggcgagatcgtgcccatggaggtgaacttcaacttcgacgaccccaacctgatcatcctgcctctggcctttggcaagagacagggcagagaattcatctggaacgacctgctgtccctggaaaccggcagcctgaagctggccaacggaagagtgatcgagaagacactgtacaacagaagaacccggcaggatgagcctgccctgttcgtggccctgaccttcgagcggcgggaggtcctggactcctccaatatcaaaccaatgaacctgatcggcgtggcaagaggcgaaaacatccccgccgtgatcgccctgaccgaccccgagggctgcccactgagccggtttaaggatagcctgggaaacccaacccacatcctgagaatcggcgagagctataaggagaagcagcggaccatccaggccaagaaggaggtggagcagcggagagccggcggctacagccggaagtacgccagcaaagccaagaatctggcagacgatatggtgagaaacaccgctagagatctgctgtactacgccgtgacccaggatgccatgctgatcttcgccaacctgagccggggcttcggccggcagggcaagcggaccttcatggccgagagacagtacacacggatggaggactggctgaccgccaagctggcctacgagggcctgagcaagacctacctgtccaagacactggcccagtacacctccaagacatgcagcaactgtgggtttaccatcaccagcgccgactacgacagggtgctggagaagctgaagaagacagcaacaggctggatgaccacaattaacggcaaggagctgaaggtggagggccagattacctactacaacagatacaagagacagaacgtagtcaaggacctgtccgtcgagctggatagactgagcgaagaatctgtgaacaacgacatctcctcctggacaaagggcagaagcggagaagctctgagcctcctgaagaaaagattctcccatagacccgtgcaggagaagttcgtgtgcctgaactgcggcttcgagacacacgcagccgagcaagccgccctgaacatcgccagatcctggctgttcctgcggagccaggagtacaagaaataccagacaaacaagacaaccggcaacaccgataagagagccttcgtcgagacctggcagtccttttaccggaagaagcttaaggaggtgtggaaacctgccgtgcggtctggcggatctggcggaggctcccaggtgcccgtgaccttcgaggacatcgccatctacttctgccaggaggagtgggaggtgctggaggagtggcagaaggacctgtacaaggacgtgatgaaggagaactaccaggccctgatcagcctgggcaccggcagcctgatcgtgagccccgacatcatcagcaggatcgagaggggcgaggacccctacatcagggacgagaggggcagcaagaagagggagaccgagaacagcagcggcggcccaagcagcggcgcccctcctcccagcggcggcagcccagccggctccccaacctctaccgaggagggcacctctgagtccgccacccccgagagcggccctggcacctccaccgagcccagcgagggcagcgcacccggcagccctgccggcagccccacctccacagaggagggaaccagcaccgagcccagcgaaggcagcgccccaggcaccagcaccgagcctagtgagcaggagattaaacggatcaacaagatcagaagaagacttgtgaaagacagcaacaccaagaaggccggcaagacaggccccatgaaaaccctgctggttagagtgatgacacccgatctgagagagcggctggaaaacctgagaaagaagcctgaaaatatcccccagcccatcagcaatacatctagagccaacctgaataagctgctgaccgattacaccgaaatgaagaaggcgatcctgcatgtgtactgggaagagttccagaaggaccctgtgggcctgatgagccgggtggcccagcctgccagcaagaagatcgatcagaacaagctgaaacctgagatggacgagaagggcaacctgaccaccgccggctttgcctgctctcagtgtggccagcccctgttcgtgtacaagctggagcaggtgtctgagaagggcaaggcttacaccaactacttcggacggtgcaatgtggccgagcacgaaaagctgatcctgctggcccagctgaagcccgagaaggatagcgacgaagccgtgacatatagcctgggaaagtttgggcagagggccctggatttctacagcattcatgtgaccaaggagtccacccaccccgtgaagcccctggcccagatcgccggaaacagatacgcctccggacctgtgggaaaggccctgagcgacgcatgtatgggcacaatcgcctccttcctgtctaagtaccaggacatcatcatcgaacaccagaaggtggtgaagggcaaccagaagagactggagagcctgcgggagctggccggcaaggaaaacctggaataccctagcgtgaccctgccacctcagcctcacaccaaggagggcgttgatgcctacaacgaagtgatcgcccgggtgcgaatgtgggtgaacctgaacctgtggcagaagctgaagctaagcagagatgatgccaagcctctgctgagactgaagggattcccttcctttcctctggtcgagagacaggccaacgaagtggactggtgggacatggtgtgtaacgtgaagaagctgatcaacgagaaaaaggaggatggcaaggtgttttggcagaatctggctggctacaagagacaggaagccctgagaccatacctgagcagcgaggaagatcggaagaagggaaagaaattcgctcggtaccagctgggcgacctgctgctgcacctggaaaagaagcacggcgaggactggggaaaggtgtacgacgaggcctgggagcggattgacaagaaagtggaaggcctgagcaagcacatcaagctggaagaggaacggagaagcgaggacgcccagagcaaggccgccctgaccgactggctgcgggctaaggccagcttcgtgatcgagggcctgaaggaggccgacaaggacgagttctgcagatgcgagctgaagctgcagaagtggtacggggacctgcggggaaagcccttcgccatcgaagccgagaacagcatcctggacatcagcggcttcagcaagcagtacaactgtgccttcatctggcagaaggacggcgtgaagaagctgaacctgtacctgatcatcaactacttcaagggcggcaagctgcggttcaagaagatcaaacctgaagccttcgaagccaacagattctacaccgtgatcaacaaaaagagcggcgagatcgtgcccatggaggtgaacttcaacttcgacgaccccaacctgatcatcctgcctctggcctttggcaagagacagggcagagaattcatctggaacgacctgctgtccctggaaaccggcagcctgaagctggccaacggaagagtgatcgagaagacactgtacaacagaagaacccggcaggatgagcctgccctgttcgtggccctgaccttcgagcggcgggaggtcctggactcctccaatatcaaaccaatgaacctgatcggcgtggcaagaggcgaaaacatccccgccgtgatcgccctgaccgaccccgagggctgcccactgagccggtttaaggatagcctgggaaacccaacccacatcctgagaatcggcgagagctataaggagaagcagcggaccatccaggccaagaaggaggtggagcagcggagagccggcggctacagccggaagtacgccagcaaagccaagaatctggcagacgatatggtgagaaacaccgctagagatctgctgtactacgccgtgacccaggatgccatgctgatcttcgccaacctgagccggggcttcggccggcagggcaagcggaccttcatggccgagagacagtacacacggatggaggactggctgaccgccaagctggcctacgagggcctgagcaagacctacctgtccaagacactggcccagtacacctccaagacatgcagcaactgtgggtttaccatcaccagcgccgactacgacagggtgctggagaagctgaagaagacagcaacaggctggatgaccacaattaacggcaaggagctgaaggtggagggccagattacctactacaacagatacaagagacagaacgtagtcaaggacctgtccgtcgagctggatagactgagcgaagaatctgtgaacaacgacatctcctcctggacaaagggcagaagcggagaagctctgagcctcctgaagaaaagattctcccatagacccgtgcaggagaagttcgtgtgcctgaactgcggcttcgagacacacgcagccgagcaagccgccctgaacatcgccagatcctggctgttcctgcggagccaggagtacaagaaataccagacaaacaagacaaccggcaacaccgataagagagccttcgtcgagacctggcagtccttttaccggaagaagcttaaggaggtgtggaaacctgccgtgcggtctggcggatctggcggaggctcctcaggtgcccgtgaccttcgaggacatcgccatctacttctgccaggaggagtgggaggtgctggaggagtggcagaaggacctgtacaaggacgtgatgaaggagaactaccaggccctgatcagcctgggcaccggcagcctgatcgtgagccccgacatcatcagcaggatcgagaggggcgaggacccctacatcagggacgagaggggcagcaagaagagggagaccgagaacagcagcggatctggctccggcagcggccccaagaaaaagagaaaagtctaagctgccttctgcggggcttgccttctggccatgcccttcttctctcccttgcacctgtacctcttggtctttgaataaagcctgagtaggaaggctagcaaaaaaaaaaaaaaaaaaaaaaaaaaaaaaaaaaaaaaaaaaaaaaaaaaaaaaaaaaaaaaaaaaaaaaaaaaaaaaaa

SEQ ID NO: 15934 - RNA, 9485 nt, synthetic construct
  source 1..9485: mol_type = other RNA
aggaaataagagagaaaagaagagtaagaagaaatataagagccaccatggcccctaagaagaagcgtaaagtgagccggatggaacgcctcgtctacgaggtgcggcagaagtgcagaaacatcgaggacatctgcatctcctgcggatctctgaacgtgaccctggagcacccactgttcatcggcggcatgtgccagaactgtaaaaactgttttctggagtgtgcctatcaatacgacgatgacggctaccagagctactgcaccatctgttgcggcggaagagaggtgctgatgtgtggaaataacaactgctgccggtgcttctgcgtggaatgcgtggacctgctggtgggccccggcgccgcccaggccgctattaaggaagatccttggaactgctacatgtgcggccacaagggcacatacggcctgctgagacggagagaggactggcctagcagactgcagatgttcttcgccaataaccacgaccaggagttcgacccccctaaggtgtaccctcccgtccccgccgagaagagaaagcccatccgggtcctgagcctgttcgatggcatcgccaccggtctgctggtgctgaaggacctgggcatccaggtggataggtacattgcctccgaggtgtgcgaggactccatcaccgtgggaatggtgcgtcatcagggcaagatcatgtacgtgggcgacgtgcggagcgtgacacagaagcatatccaggagtggggccctttcgacctggtgatcggcggcagcccttgcaatgacctgagcatcgtgaacccagcccggaagggcctgtacgagggaaccggcagactgttcttcgagttttacagactgctgcacgacgcccggcctaaggaaggcgacgaccggcccttcttttggctgttcgagaatgtggtggccatgggagtcagcgacaagcgggatattagccggttcctggagagcaaccccgtgatgatcgatgccaaggaagtgagcgccgcccaccgggccagatacttctggggcaatctgcctggcatgaacagacccctggccagcaccgtgaacgacaagctggagctgcaggagtgcctggagcacggccggatcgccaagttcagcaaggtgagaaccatcaccacccgaagcaacagcatcaaacaaggcaaggaccagcactttcctgtgttcatgaacgagaaggaggacatcctgtggtgtaccgagatggagagagtgttcgggttcccagtccactacacagatgtcagcaacatgtctagactggccagacagagactgctgggaagaagctggtccgtccctgtgatcagacacctgttcgcccctctgaaggagtacttcgcctgcgtgagcagcggcaacagcaacgccaacagccggggccccagcttctctagcggcctggtgccactgtccctgagagggagccacatgggccccatggagatctacaaaaccgtgagcgcctggaagcggcagcctgtgcgcgtgctgagcctgtttcggaatatcgataaagtcctgaaaagcctgggattcctggagagcggctctggctccggcggtggcaccctgaagtacgtggaggatgtgacaaacgtggtcagacgggatgtggagaagtggggccccttcgatctggtgtacggcagcacccaacccctgggcagctcttgtgaccggtgccctggctggtacatgtttcagttccaccggatcctgcagtacgccctgccgagacaggagtcccagcggccattcttttggattttcatggacaacttgctgctgaccgaggatgaccaggaaactaccactcggttcctgcagaccgaagccgtgaccctgcaggacgtgagaggccgggactaccagaacgccatgcgggtgtggtccaacatccctggactgaaaagcaagcacgcacctctgacccctaaagaagaggagtacctgcaggcccaggtgcggagcagaagcaagctggacgcccctaaggtggatctgctggtgaagaattgcctcctgcccctgagagagtacttcaagtatttcagccagaatagtctgcccctgggaggcagcggcggcggcgccctggtgacatttgaggacgtcgccgtgcggttcacccaggaggaatgggctctgctggatccttctcagaaaatcctgtaccgggacgtgatgagagagacataccggaatctgacctccgtgggcatcaactgggaatgttgggaccttgaagcctgcttcagaagcctgggaagaaacctgagagtgcaggtggtgaagagaaagtgcgagctgaccaacagcggcccctgcgccgagggcggcccaagcagcggcgcccctcctcccagcggcggcagcccagccggctccccaacctctaccgaggagggcacctctgagtccgccacccccgagagcggccctggcacctccaccgagcccagcgagggcagcgcacccggcagccctgccggcagccccacctccacagaggagggaaccagcaccgagcccagcgaaggcagcgccccaggcaccagcaccgagcctagtgagcaggagattaaacggatcaacaagatcagaagaagacttgtgaaagacagcaacaccaagaaggccggcaagacaggccccatgaaaaccctgctggttagagtgatgacacccgatctgagagagcggctggaaaacctgagaaagaagcctgaaaatatcccccagcccatcagcaatacatctagagccaacctgaataagctgctgaccgattacaccgaaatgaagaaggcgatcctgcatgtgtactgggaagagttccagaaggaccctgtgggcctgatgagccgggtggcccagcctgccagcaagaagatcgatcagaacaagctgaaacctgagatggacgagaagggcaacctgaccaccgccggctttgcctgctctcagtgtggccagcccctgttcgtgtacaagctggagcaggtgtctgagaagggcaaggcttacaccaactacttcggacggtgcaatgtggccgagcacgaaaagctgatcctgctggcccagctgaagcccgagaaggatagcgacgaagccgtgacatatagcctgggaaagtttgggcagagggccctggatttctacagcattcatgtgaccaaggagtccacccaccccgtgaagcccctggcccagatcgccggaaacagatacgcctccggacctgtgggaaaggccctgagcgacgcatgtatgggcacaatcgcctccttcctgtctaagtaccaggacatcatcatcgaacaccagaaggtggtgaagggcaaccagaagagactggagagcctgcgggagctggccggcaaggaaaacctggaataccctagcgtgaccctgccacctcagcctcacaccaaggagggcgttgatgcctacaacgaagtgatcgcccgggtgcgaatgtgggtgaacctgaacctgtggcagaagctgaagctaagcagagatgatgccaagcctctgctgagactgaagggattcccttcctttcctctggtcgagagacaggccaacgaagtggactggtgggacatggtgtgtaacgtgaagaagctgatcaacgagaaaaaggaggatggcaaggtgttttggcagaatctggctggctacaagagacaggaagccctgagaccatacctgagcagcgaggaagatcggaagaagggaaagaaattcgctcggtaccagctgggcgacctgctgctgcacctggaaaagaagcacggcgaggactggggaaaggtgtacgacgaggcctgggagcggattgacaagaaagtggaaggcctgagcaagcacatcaagctggaagaggaacggagaagcgaggacgcccagagcaaggccgccctgaccgactggctgcgggctaaggccagcttcgtgatcgagggcctgaaggaggccgacaaggacgagttctgcagatgcgagctgaagctgcagaagtggtacggggacctgcggggaaagcccttcgccatcgaagccgagaacagcatcctggacatcagcggcttcagcaagcagtacaactgtgccttcatctggcagaaggacggcgtgaagaagctgaacctgtacctgatcatcaactacttcaagggcggcaagctgcggttcaagaagatcaaacctgaagccttcgaagccaacagattctacaccgtgatcaacaaaaagagcggcgagatcgtgcccatggaggtgaacttcaacttcgacgaccccaacctgatcatcctgcctctggcctttggcaagagacagggcagagaattcatctggaacgacctgctgtccctggaaaccggcagcctgaagctggccaacggaagagtgatcgagaagacactgtacaacagaagaacccggcaggatgagcctgccctgttcgtggccctgaccttcgagcggcgggaggtcctggactcctccaatatcaaaccaatgaacctgatcggcgtggcaagaggcgaaaacatccccgccgtgatcgccctgaccgaccccgagggctgcccactgagccggtttaaggatagcctgggaaacccaacccacatcctgagaatcggcgagagctataaggagaagcagcggaccatccaggccaagaaggaggtggagcagcggagagccggcggctacagccggaagtacgccagcaaagccaagaatctggcagacgatatggtgagaaacaccgctagagatctgctgtactacgccgtgacccaggatgccatgctgatcttcgccaacctgagccggggcttcggccggcagggcaagcggaccttcatggccgagagacagtacacacggatggaggactggctgaccgccaagctggcctacgagggcctgagcaagacctacctgtccaagacactggcccagtacacctccaagacatgcagcaactgtgggtttaccatcaccagcgccgactacgacagggtgctggagaagctgaagaagacagcaacaggctggatgaccacaattaacggcaaggagctgaaggtggagggccagattacctactacaacagatacaagagacagaacgtagtcaaggacctgtccgtcgagctggatagactgagcgaagaatctgtgaacaacgacatctcctcctggacaaagggcagaagcggagaagctctgagcctcctgaagaaaagattctcccatagacccgtgcaggagaagttcgtgtgcctgaactgcggcttcgagacacacgcagccgagcaagccgccctgaacatcgccagatcctggctgttcctgcggagccaggagtacaagaaataccagacaaacaagacaaccggcaacaccgataagagagccttcgtcgagacctggcagtccttttaccggaagaagcttaaggaggtgtggaaacctgccgtgcggtctggcggatctggcggaggctccatgatcaactaccagacccccgtgagcttcagggacgtggtggtgggcttcacccaggaggagtggcacaggctgaaccccacccagagggccctgtacagggacgtgatgctggagacctacagcaacctggtgagcgtgggctacgagggcaccaagcccgacgtgatcctgaggctggagcaggaggaggccccctggatcggcgaggccgcctgcctgggctgccactgctgggaggacggcggcccaagcagcggcgcccctcctcccagcggcggcagcccagccggctccccaacctctaccgaggagggcacctctgagtccgccacccccgagagcggccctggcacctccaccgagcccagcgagggcagcgcacccggcagccctgccggcagccccacctccacagaggagggaaccagcaccgagcccagcgaaggcagcgccccaggcaccagcaccgagcctagtgagcaggagattaaacggatcaacaagatcagaagaagacttgtgaaagacagcaacaccaagaaggccggcaagacaggccccatgaaaaccctgctggttagagtgatgacacccgatctgagagagcggctggaaaacctgagaaagaagcctgaaaatatcccccagcccatcagcaatacatctagagccaacctgaataagctgctgaccgattacaccgaaatgaagaaggcgatcctgcatgtgtactgggaagagttccagaaggaccctgtgggcctgatgagccgggtggcccagcctgccagcaagaagatcgatcagaacaagctgaaacctgagatggacgagaagggcaacctgaccaccgccggctttgcctgctctcagtgtggccagcccctgttcgtgtacaagctggagcaggtgtctgagaagggcaaggcttacaccaactacttcggacggtgcaatgtggccgagcacgaaaagctgatcctgctggcccagctgaagcccgagaaggatagcgacgaagccgtgacatatagcctgggaaagtttgggcagagggccctggatttctacagcattcatgtgaccaaggagtccacccaccccgtgaagcccctggcccagatcgccggaaacagatacgcctccggacctgtgggaaaggccctgagcgacgcatgtatgggcacaatcgcctccttcctgtctaagtaccaggacatcatcatcgaacaccagaaggtggtgaagggcaaccagaagagactggagagcctgcgggagctggccggcaaggaaaacctggaataccctagcgtgaccctgccacctcagcctcacaccaaggagggcgttgatgcctacaacgaagtgatcgcccgggtgcgaatgtgggtgaacctgaacctgtggcagaagctgaagctaagcagagatgatgccaagcctctgctgagactgaagggattcccttcctttcctctggtcgagagacaggccaacgaagtggactggtgggacatggtgtgtaacgtgaagaagctgatcaacgagaaaaaggaggatggcaaggtgttttggcagaatctggctggctacaagagacaggaagccctgagaccatacctgagcagcgaggaagatcggaagaagggaaagaaattcgctcggtaccagctgggcgacctgctgctgcacctggaaaagaagcacggcgaggactggggaaaggtgtacgacgaggcctgggagcggattgacaagaaagtggaaggcctgagcaagcacatcaagctggaagaggaacggagaagcgaggacgcccagagcaaggccgccctgaccgactggctgcgggctaaggccagcttcgtgatcgagggcctgaaggaggccgacaaggacgagttctgcagatgcgagctgaagctgcagaagtggtacggggacctgcggggaaagcccttcgccatcgaagccgagaacagcatcctggacatcagcggcttcagcaagcagtacaactgtgccttcatctggcagaaggacggcgtgaagaagctgaacctgtacctgatcatcaactacttcaagggcggcaagctgcggttcaagaagatcaaacctgaagccttcgaagccaacagattctacaccgtgatcaacaaaaagagcggcgagatcgtgcccatggaggtgaacttcaacttcgacgaccccaacctgatcatcctgcctctggcctttggcaagagacagggcagagaattcatctggaacgacctgctgtccctggaaaccggcagcctgaagctggccaacggaagagtgatcgagaagacactgtacaacagaagaacccggcaggatgagcctgccctgttcgtggccctgaccttcgagcggcgggaggtcctggactcctccaatatcaaaccaatgaacctgatcggcgtggcaagaggcgaaaacatccccgccgtgatcgccctgaccgaccccgagggctgcccactgagccggtttaaggatagcctgggaaacccaacccacatcctgagaatcggcgagagctataaggagaagcagcggaccatccaggccaagaaggaggtggagcagcggagagccggcggctacagccggaagtacgccagcaaagccaagaatctggcagacgatatggtgagaaacaccgctagagatctgctgtactacgccgtgacccaggatgccatgctgatcttcgccaacctgagccggggcttcggccggcagggcaagcggaccttcatggccgagagacagtacacacggatggaggactggctgaccgccaagctggcctacgagggcctgagcaagacctacctgtccaagacactggcccagtacacctccaagacatgcagcaactgtgggtttaccatcaccagcgccgactacgacagggtgctggagaagctgaagaagacagcaacaggctggatgaccacaattaacggcaaggagctgaaggtggagggccagattacctactacaacagatacaagagacagaacgtagtcaaggacctgtccgtcgagctggatagactgagcgaagaatctgtgaacaacgacatctcctcctggacaaagggcagaagcggagaagctctgagcctcctgaagaaaagattctcccatagacccgtgcaggagaagttcgtgtgcctgaactgcggcttcgagacacacgcagccgagcaagccgccctgaacatcgccagatcctggctgttcctgcggagccaggagtacaagaaataccagacaaacaagacaaccggcaacaccgataagagagccttcgtcgagacctggcagtccttttaccggaagaagcttaaggaggtgtggaaacctgccgtgcggtctggcggatctggcggaggctcctatgatcaactaccagacccccgtgagcttcagggacgtggtggtgggcttcacccaggaggagtggcacaggctgaaccccacccagagggccctgtacagggacgtgatgctggagacctacagcaacctggtgagcgtgggctacgagggcaccaagcccgacgtgatcctgaggctggagcaggaggaggccccctggatcggcgaggccgcctgcctgggctgccactgctgggaggacggatctggctccggcagcggccccaagaaaaagagaaaagtctaagctgccttctgcggggcttgccttctggccatgcccttcttctctcccttgcacctgtacctcttggtctttgaataaagcctgagtaggaaggctagcaaaaaaaaaaaaaaaaaaaaaaaaaaaaaaaaaaaaaaaaaaaaaaaaaaaaaaaaaaaaaaaaaaaaaaaaaaaaaaaa

SEQ ID NO: 15935 - RNA, 9485 nt, synthetic construct
  source 1..9485: mol_type = other RNA
aggaaataagagagaaaagaagagtaagaagaaatataagagccaccatggcccctaagaagaagcgtaaagtgagccggatggaacgcctcgtctacgaggtgcggcagaagtgcagaaacatcgaggacatctgcatctcctgcggatctctgaacgtgaccctggagcacccactgttcatcggcggcatgtgccagaactgtaaaaactgttttctggagtgtgcctatcaatacgacgatgacggctaccagagctactgcaccatctgttgcggcggaagagaggtgctgatgtgtggaaataacaactgctgccggtgcttctgcgtggaatgcgtggacctgctggtgggccccggcgccgcccaggccgctattaaggaagatccttggaactgctacatgtgcggccacaagggcacatacggcctgctgagacggagagaggactggcctagcagactgcagatgttcttcgccaataaccacgaccaggagttcgacccccctaaggtgtaccctcccgtccccgccgagaagagaaagcccatccgggtcctgagcctgttcgatggcatcgccaccggtctgctggtgctgaaggacctgggcatccaggtggataggtacattgcctccgaggtgtgcgaggactccatcaccgtgggaatggtgcgtcatcagggcaagatcatgtacgtgggcgacgtgcggagcgtgacacagaagcatatccaggagtggggccctttcgacctggtgatcggcggcagcccttgcaatgacctgagcatcgtgaacccagcccggaagggcctgtacgagggaaccggcagactgttcttcgagttttacagactgctgcacgacgcccggcctaaggaaggcgacgaccggcccttcttttggctgttcgagaatgtggtggccatgggagtcagcgacaagcgggatattagccggttcctggagagcaaccccgtgatgatcgatgccaaggaagtgagcgccgcccaccgggccagatacttctggggcaatctgcctggcatgaacagacccctggccagcaccgtgaacgacaagctggagctgcaggagtgcctggagcacggccggatcgccaagttcagcaaggtgagaaccatcaccacccgaagcaacagcatcaaacaaggcaaggaccagcactttcctgtgttcatgaacgagaaggaggacatcctgtggtgtaccgagatggagagagtgttcgggttcccagtccactacacagatgtcagcaacatgtctagactggccagacagagactgctgggaagaagctggtccgtccctgtgatcagacacctgttcgcccctctgaaggagtacttcgcctgcgtgagcagcggcaacagcaacgccaacagccggggccccagcttctctagcggcctggtgccactgtccctgagagggagccacatgggccccatggagatctacaaaaccgtgagcgcctggaagcggcagcctgtgcgcgtgctgagcctgtttcggaatatcgataaagtcctgaaaagcctgggattcctggagagcggctctggctccggcggtggcaccctgaagtacgtggaggatgtgacaaacgtggtcagacgggatgtggagaagtggggccccttcgatctggtgtacggcagcacccaacccctgggcagctcttgtgaccggtgccctggctggtacatgtttcagttccaccggatcctgcagtacgccctgccgagacaggagtcccagcggccattcttttggattttcatggacaacttgctgctgaccgaggatgaccaggaaactaccactcggttcctgcagaccgaagccgtgaccctgcaggacgtgagaggccgggactaccagaacgccatgcgggtgtggtccaacatccctggactgaaaagcaagcacgcacctctgacccctaaagaagaggagtacctgcaggcccaggtgcggagcagaagcaagctggacgcccctaaggtggatctgctggtgaagaattgcctcctgcccctgagagagtacttcaagtatttcagccagaatagtctgcccctgggaggcagcggcggcggcgccctggtgacatttgaggacgtcgccgtgcggttcacccaggaggaatgggctctgctggatccttctcagaaaatcctgtaccgggacgtgatgagagagacataccggaatctgacctccgtgggcatcaactgggaatgttgggaccttgaagcctgcttcagaagcctgggaagaaacctgagagtgcaggtggtgaagagaaagtgcgagctgaccaacagcggcccctgcgccgagggcggcccaagcagcggcgcccctcctcccagcggcggcagcccagccggctccccaacctctaccgaggagggcacctctgagtccgccacccccgagagcggccctggcacctccaccgagcccagcgagggcagcgcacccggcagccctgccggcagccccacctccacagaggagggaaccagcaccgagcccagcgaaggcagcgccccaggcaccagcaccgagcctagtgagcaggagattaaacggatcaacaagatcagaagaagacttgtgaaagacagcaacaccaagaaggccggcaagacaggccccatgaaaaccctgctggttagagtgatgacacccgatctgagagagcggctggaaaacctgagaaagaagcctgaaaatatcccccagcccatcagcaatacatctagagccaacctgaataagctgctgaccgattacaccgaaatgaagaaggcgatcctgcatgtgtactgggaagagttccagaaggaccctgtgggcctgatgagccgggtggcccagcctgccagcaagaagatcgatcagaacaagctgaaacctgagatggacgagaagggcaacctgaccaccgccggctttgcctgctctcagtgtggccagcccctgttcgtgtacaagctggagcaggtgtctgagaagggcaaggcttacaccaactacttcggacggtgcaatgtggccgagcacgaaaagctgatcctgctggcccagctgaagcccgagaaggatagcgacgaagccgtgacatatagcctgggaaagtttgggcagagggccctggatttctacagcattcatgtgaccaaggagtccacccaccccgtgaagcccctggcccagatcgccggaaacagatacgcctccggacctgtgggaaaggccctgagcgacgcatgtatgggcacaatcgcctccttcctgtctaagtaccaggacatcatcatcgaacaccagaaggtggtgaagggcaaccagaagagactggagagcctgcgggagctggccggcaaggaaaacctggaataccctagcgtgaccctgccacctcagcctcacaccaaggagggcgttgatgcctacaacgaagtgatcgcccgggtgcgaatgtgggtgaacctgaacctgtggcagaagctgaagctaagcagagatgatgccaagcctctgctgagactgaagggattcccttcctttcctctggtcgagagacaggccaacgaagtggactggtgggacatggtgtgtaacgtgaagaagctgatcaacgagaaaaaggaggatggcaaggtgttttggcagaatctggctggctacaagagacaggaagccctgagaccatacctgagcagcgaggaagatcggaagaagggaaagaaattcgctcggtaccagctgggcgacctgctgctgcacctggaaaagaagcacggcgaggactggggaaaggtgtacgacgaggcctgggagcggattgacaagaaagtggaaggcctgagcaagcacatcaagctggaagaggaacggagaagcgaggacgcccagagcaaggccgccctgaccgactggctgcgggctaaggccagcttcgtgatcgagggcctgaaggaggccgacaaggacgagttctgcagatgcgagctgaagctgcagaagtggtacggggacctgcggggaaagcccttcgccatcgaagccgagaacagcatcctggacatcagcggcttcagcaagcagtacaactgtgccttcatctggcagaaggacggcgtgaagaagctgaacctgtacctgatcatcaactacttcaagggcggcaagctgcggttcaagaagatcaaacctgaagccttcgaagccaacagattctacaccgtgatcaacaaaaagagcggcgagatcgtgcccatggaggtgaacttcaacttcgacgaccccaacctgatcatcctgcctctggcctttggcaagagacagggcagagaattcatctggaacgacctgctgtccctggaaaccggcagcctgaagctggccaacggaagagtgatcgagaagacactgtacaacagaagaacccggcaggatgagcctgccctgttcgtggccctgaccttcgagcggcgggaggtcctggactcctccaatatcaaaccaatgaacctgatcggcgtggcaagaggcgaaaacatccccgccgtgatcgccctgaccgaccccgagggctgcccactgagccggtttaaggatagcctgggaaacccaacccacatcctgagaatcggcgagagctataaggagaagcagcggaccatccaggccaagaaggaggtggagcagcggagagccggcggctacagccggaagtacgccagcaaagccaagaatctggcagacgatatggtgagaaacaccgctagagatctgctgtactacgccgtgacccaggatgccatgctgatcttcgccaacctgagccggggcttcggccggcagggcaagcggaccttcatggccgagagacagtacacacggatggaggactggctgaccgccaagctggcctacgagggcctgagcaagacctacctgtccaagacactggcccagtacacctccaagacatgcagcaactgtgggtttaccatcaccagcgccgactacgacagggtgctggagaagctgaagaagacagcaacaggctggatgaccacaattaacggcaaggagctgaaggtggagggccagattacctactacaacagatacaagagacagaacgtagtcaaggacctgtccgtcgagctggatagactgagcgaagaatctgtgaacaacgacatctcctcctggacaaagggcagaagcggagaagctctgagcctcctgaagaaaagattctcccatagacccgtgcaggagaagttcgtgtgcctgaactgcggcttcgagacacacgcagccgagcaagccgccctgaacatcgccagatcctggctgttcctgcggagccaggagtacaagaaataccagacaaacaagacaaccggcaacaccgataagagagccttcgtcgagacctggcagtccttttaccggaagaagcttaaggaggtgtggaaacctgccgtgcggtctggcggatctggcggaggctccaagagcgccgccgtgagcttcagcgacgtggccgtgtacttcagcctggaggagtggggctgcctgaggcccgcccagagggccctgtacagggacgtgatgagggagacctacggccacctgggcgccctgggcttccccggccccaagcccgccctgatcagctggatggagcaggagagcgaggcctggagccccgccgcccaggaccccgaggagggcgagagcctgggcggcgccctgggcggcccaagcagcggcgcccctcctcccagcggcggcagcccagccggctccccaacctctaccgaggagggcacctctgagtccgccacccccgagagcggccctggcacctccaccgagcccagcgagggcagcgcacccggcagccctgccggcagccccacctccacagaggagggaaccagcaccgagcccagcgaaggcagcgccccaggcaccagcaccgagcctagtgagcaggagattaaacggatcaacaagatcagaagaagacttgtgaaagacagcaacaccaagaaggccggcaagacaggccccatgaaaaccctgctggttagagtgatgacacccgatctgagagagcggctggaaaacctgagaaagaagcctgaaaatatcccccagcccatcagcaatacatctagagccaacctgaataagctgctgaccgattacaccgaaatgaagaaggcgatcctgcatgtgtactgggaagagttccagaaggaccctgtgggcctgatgagccgggtggcccagcctgccagcaagaagatcgatcagaacaagctgaaacctgagatggacgagaagggcaacctgaccaccgccggctttgcctgctctcagtgtggccagcccctgttcgtgtacaagctggagcaggtgtctgagaagggcaaggcttacaccaactacttcggacggtgcaatgtggccgagcacgaaaagctgatcctgctggcccagctgaagcccgagaaggatagcgacgaagccgtgacatatagcctgggaaagtttgggcagagggccctggatttctacagcattcatgtgaccaaggagtccacccaccccgtgaagcccctggcccagatcgccggaaacagatacgcctccggacctgtgggaaaggccctgagcgacgcatgtatgggcacaatcgcctccttcctgtctaagtaccaggacatcatcatcgaacaccagaaggtggtgaagggcaaccagaagagactggagagcctgcgggagctggccggcaaggaaaacctggaataccctagcgtgaccctgccacctcagcctcacaccaaggagggcgttgatgcctacaacgaagtgatcgcccgggtgcgaatgtgggtgaacctgaacctgtggcagaagctgaagctaagcagagatgatgccaagcctctgctgagactgaagggattcccttcctttcctctggtcgagagacaggccaacgaagtggactggtgggacatggtgtgtaacgtgaagaagctgatcaacgagaaaaaggaggatggcaaggtgttttggcagaatctggctggctacaagagacaggaagccctgagaccatacctgagcagcgaggaagatcggaagaagggaaagaaattcgctcggtaccagctgggcgacctgctgctgcacctggaaaagaagcacggcgaggactggggaaaggtgtacgacgaggcctgggagcggattgacaagaaagtggaaggcctgagcaagcacatcaagctggaagaggaacggagaagcgaggacgcccagagcaaggccgccctgaccgactggctgcgggctaaggccagcttcgtgatcgagggcctgaaggaggccgacaaggacgagttctgcagatgcgagctgaagctgcagaagtggtacggggacctgcggggaaagcccttcgccatcgaagccgagaacagcatcctggacatcagcggcttcagcaagcagtacaactgtgccttcatctggcagaaggacggcgtgaagaagctgaacctgtacctgatcatcaactacttcaagggcggcaagctgcggttcaagaagatcaaacctgaagccttcgaagccaacagattctacaccgtgatcaacaaaaagagcggcgagatcgtgcccatggaggtgaacttcaacttcgacgaccccaacctgatcatcctgcctctggcctttggcaagagacagggcagagaattcatctggaacgacctgctgtccctggaaaccggcagcctgaagctggccaacggaagagtgatcgagaagacactgtacaacagaagaacccggcaggatgagcctgccctgttcgtggccctgaccttcgagcggcgggaggtcctggactcctccaatatcaaaccaatgaacctgatcggcgtggcaagaggcgaaaacatccccgccgtgatcgccctgaccgaccccgagggctgcccactgagccggtttaaggatagcctgggaaacccaacccacatcctgagaatcggcgagagctataaggagaagcagcggaccatccaggccaagaaggaggtggagcagcggagagccggcggctacagccggaagtacgccagcaaagccaagaatctggcagacgatatggtgagaaacaccgctagagatctgctgtactacgccgtgacccaggatgccatgctgatcttcgccaacctgagccggggcttcggccggcagggcaagcggaccttcatggccgagagacagtacacacggatggaggactggctgaccgccaagctggcctacgagggcctgagcaagacctacctgtccaagacactggcccagtacacctccaagacatgcagcaactgtgggtttaccatcaccagcgccgactacgacagggtgctggagaagctgaagaagacagcaacaggctggatgaccacaattaacggcaaggagctgaaggtggagggccagattacctactacaacagatacaagagacagaacgtagtcaaggacctgtccgtcgagctggatagactgagcgaagaatctgtgaacaacgacatctcctcctggacaaagggcagaagcggagaagctctgagcctcctgaagaaaagattctcccatagacccgtgcaggagaagttcgtgtgcctgaactgcggcttcgagacacacgcagccgagcaagccgccctgaacatcgccagatcctggctgttcctgcggagccaggagtacaagaaataccagacaaacaagacaaccggcaacaccgataagagagccttcgtcgagacctggcagtccttttaccggaagaagcttaaggaggtgtggaaacctgccgtgcggtctggcggatctggcggaggctcctaagagcgccgccgtgagcttcagcgacgtggccgtgtacttcagcctggaggagtggggctgcctgaggcccgcccagagggccctgtacagggacgtgatgagggagacctacggccacctgggcgccctgggcttccccggccccaagcccgccctgatcagctggatggagcaggagagcgaggcctggagccccgccgcccaggaccccgaggagggcgagagcctgggcggcgccctgggatctggctccggcagcggccccaagaaaaagagaaaagtctaagctgccttctgcggggcttgccttctggccatgcccttcttctctcccttgcacctgtacctcttggtctttgaataaagcctgagtaggaaggctagcaaaaaaaaaaaaaaaaaaaaaaaaaaaaaaaaaaaaaaaaaaaaaaaaaaaaaaaaaaaaaaaaaaaaaaaaaaaaaaaa

SEQ ID NO: 15936 - RNA, 9485 nt, synthetic construct
  source 1..9485: mol_type = other RNA
aggaaataagagagaaaagaagagtaagaagaaatataagagccaccatggcccctaagaagaagcgtaaagtgagccggatggaacgcctcgtctacgaggtgcggcagaagtgcagaaacatcgaggacatctgcatctcctgcggatctctgaacgtgaccctggagcacccactgttcatcggcggcatgtgccagaactgtaaaaactgttttctggagtgtgcctatcaatacgacgatgacggctaccagagctactgcaccatctgttgcggcggaagagaggtgctgatgtgtggaaataacaactgctgccggtgcttctgcgtggaatgcgtggacctgctggtgggccccggcgccgcccaggccgctattaaggaagatccttggaactgctacatgtgcggccacaagggcacatacggcctgctgagacggagagaggactggcctagcagactgcagatgttcttcgccaataaccacgaccaggagttcgacccccctaaggtgtaccctcccgtccccgccgagaagagaaagcccatccgggtcctgagcctgttcgatggcatcgccaccggtctgctggtgctgaaggacctgggcatccaggtggataggtacattgcctccgaggtgtgcgaggactccatcaccgtgggaatggtgcgtcatcagggcaagatcatgtacgtgggcgacgtgcggagcgtgacacagaagcatatccaggagtggggccctttcgacctggtgatcggcggcagcccttgcaatgacctgagcatcgtgaacccagcccggaagggcctgtacgagggaaccggcagactgttcttcgagttttacagactgctgcacgacgcccggcctaaggaaggcgacgaccggcccttcttttggctgttcgagaatgtggtggccatgggagtcagcgacaagcgggatattagccggttcctggagagcaaccccgtgatgatcgatgccaaggaagtgagcgccgcccaccgggccagatacttctggggcaatctgcctggcatgaacagacccctggccagcaccgtgaacgacaagctggagctgcaggagtgcctggagcacggccggatcgccaagttcagcaaggtgagaaccatcaccacccgaagcaacagcatcaaacaaggcaaggaccagcactttcctgtgttcatgaacgagaaggaggacatcctgtggtgtaccgagatggagagagtgttcgggttcccagtccactacacagatgtcagcaacatgtctagactggccagacagagactgctgggaagaagctggtccgtccctgtgatcagacacctgttcgcccctctgaaggagtacttcgcctgcgtgagcagcggcaacagcaacgccaacagccggggccccagcttctctagcggcctggtgccactgtccctgagagggagccacatgggccccatggagatctacaaaaccgtgagcgcctggaagcggcagcctgtgcgcgtgctgagcctgtttcggaatatcgataaagtcctgaaaagcctgggattcctggagagcggctctggctccggcggtggcaccctgaagtacgtggaggatgtgacaaacgtggtcagacgggatgtggagaagtggggccccttcgatctggtgtacggcagcacccaacccctgggcagctcttgtgaccggtgccctggctggtacatgtttcagttccaccggatcctgcagtacgccctgccgagacaggagtcccagcggccattcttttggattttcatggacaacttgctgctgaccgaggatgaccaggaaactaccactcggttcctgcagaccgaagccgtgaccctgcaggacgtgagaggccgggactaccagaacgccatgcgggtgtggtccaacatccctggactgaaaagcaagcacgcacctctgacccctaaagaagaggagtacctgcaggcccaggtgcggagcagaagcaagctggacgcccctaaggtggatctgctggtgaagaattgcctcctgcccctgagagagtacttcaagtatttcagccagaatagtctgcccctgggaggcagcggcggcggcgccctggtgacatttgaggacgtcgccgtgcggttcacccaggaggaatgggctctgctggatccttctcagaaaatcctgtaccgggacgtgatgagagagacataccggaatctgacctccgtgggcatcaactgggaatgttgggaccttgaagcctgcttcagaagcctgggaagaaacctgagagtgcaggtggtgaagagaaagtgcgagctgaccaacagcggcccctgcgccgagggcggcccaagcagcggcgcccctcctcccagcggcggcagcccagccggctccccaacctctaccgaggagggcacctctgagtccgccacccccgagagcggccctggcacctccaccgagcccagcgagggcagcgcacccggcagccctgccggcagccccacctccacagaggagggaaccagcaccgagcccagcgaaggcagcgccccaggcaccagcaccgagcctagtgagcaggagattaaacggatcaacaagatcagaagaagacttgtgaaagacagcaacaccaagaaggccggcaagacaggccccatgaaaaccctgctggttagagtgatgacacccgatctgagagagcggctggaaaacctgagaaagaagcctgaaaatatcccccagcccatcagcaatacatctagagccaacctgaataagctgctgaccgattacaccgaaatgaagaaggcgatcctgcatgtgtactgggaagagttccagaaggaccctgtgggcctgatgagccgggtggcccagcctgccagcaagaagatcgatcagaacaagctgaaacctgagatggacgagaagggcaacctgaccaccgccggctttgcctgctctcagtgtggccagcccctgttcgtgtacaagctggagcaggtgtctgagaagggcaaggcttacaccaactacttcggacggtgcaatgtggccgagcacgaaaagctgatcctgctggcccagctgaagcccgagaaggatagcgacgaagccgtgacatatagcctgggaaagtttgggcagagggccctggatttctacagcattcatgtgaccaaggagtccacccaccccgtgaagcccctggcccagatcgccggaaacagatacgcctccggacctgtgggaaaggccctgagcgacgcatgtatgggcacaatcgcctccttcctgtctaagtaccaggacatcatcatcgaacaccagaaggtggtgaagggcaaccagaagagactggagagcctgcgggagctggccggcaaggaaaacctggaataccctagcgtgaccctgccacctcagcctcacaccaaggagggcgttgatgcctacaacgaagtgatcgcccgggtgcgaatgtgggtgaacctgaacctgtggcagaagctgaagctaagcagagatgatgccaagcctctgctgagactgaagggattcccttcctttcctctggtcgagagacaggccaacgaagtggactggtgggacatggtgtgtaacgtgaagaagctgatcaacgagaaaaaggaggatggcaaggtgttttggcagaatctggctggctacaagagacaggaagccctgagaccatacctgagcagcgaggaagatcggaagaagggaaagaaattcgctcggtaccagctgggcgacctgctgctgcacctggaaaagaagcacggcgaggactggggaaaggtgtacgacgaggcctgggagcggattgacaagaaagtggaaggcctgagcaagcacatcaagctggaagaggaacggagaagcgaggacgcccagagcaaggccgccctgaccgactggctgcgggctaaggccagcttcgtgatcgagggcctgaaggaggccgacaaggacgagttctgcagatgcgagctgaagctgcagaagtggtacggggacctgcggggaaagcccttcgccatcgaagccgagaacagcatcctggacatcagcggcttcagcaagcagtacaactgtgccttcatctggcagaaggacggcgtgaagaagctgaacctgtacctgatcatcaactacttcaagggcggcaagctgcggttcaagaagatcaaacctgaagccttcgaagccaacagattctacaccgtgatcaacaaaaagagcggcgagatcgtgcccatggaggtgaacttcaacttcgacgaccccaacctgatcatcctgcctctggcctttggcaagagacagggcagagaattcatctggaacgacctgctgtccctggaaaccggcagcctgaagctggccaacggaagagtgatcgagaagacactgtacaacagaagaacccggcaggatgagcctgccctgttcgtggccctgaccttcgagcggcgggaggtcctggactcctccaatatcaaaccaatgaacctgatcggcgtggcaagaggcgaaaacatccccgccgtgatcgccctgaccgaccccgagggctgcccactgagccggtttaaggatagcctgggaaacccaacccacatcctgagaatcggcgagagctataaggagaagcagcggaccatccaggccaagaaggaggtggagcagcggagagccggcggctacagccggaagtacgccagcaaagccaagaatctggcagacgatatggtgagaaacaccgctagagatctgctgtactacgccgtgacccaggatgccatgctgatcttcgccaacctgagccggggcttcggccggcagggcaagcggaccttcatggccgagagacagtacacacggatggaggactggctgaccgccaagctggcctacgagggcctgagcaagacctacctgtccaagacactggcccagtacacctccaagacatgcagcaactgtgggtttaccatcaccagcgccgactacgacagggtgctggagaagctgaagaagacagcaacaggctggatgaccacaattaacggcaaggagctgaaggtggagggccagattacctactacaacagatacaagagacagaacgtagtcaaggacctgtccgtcgagctggatagactgagcgaagaatctgtgaacaacgacatctcctcctggacaaagggcagaagcggagaagctctgagcctcctgaagaaaagattctcccatagacccgtgcaggagaagttcgtgtgcctgaactgcggcttcgagacacacgcagccgagcaagccgccctgaacatcgccagatcctggctgttcctgcggagccaggagtacaagaaataccagacaaacaagacaaccggcaacaccgataagagagccttcgtcgagacctggcagtccttttaccggaagaagcttaaggaggtgtggaaacctgccgtgcggtctggcggatctggcggaggctccccccaggagtgcgtgaccttcaaggacgtggccgtgaacttcacccaggaggagtggcagcagctgaaccccgcccagagggacctgtacagggaggtgatgctggagaactacaggaacctgatcagcctgggcctgcccgtgagcaagcccgacgtgatcttccagctggagcagggcgaggagccctggatgctggacctgcagaggatcgaggagggcgagatcagcaggaacatgtacggcggcccaagcagcggcgcccctcctcccagcggcggcagcccagccggctccccaacctctaccgaggagggcacctctgagtccgccacccccgagagcggccctggcacctccaccgagcccagcgagggcagcgcacccggcagccctgccggcagccccacctccacagaggagggaaccagcaccgagcccagcgaaggcagcgccccaggcaccagcaccgagcctagtgagcaggagattaaacggatcaacaagatcagaagaagacttgtgaaagacagcaacaccaagaaggccggcaagacaggccccatgaaaaccctgctggttagagtgatgacacccgatctgagagagcggctggaaaacctgagaaagaagcctgaaaatatcccccagcccatcagcaatacatctagagccaacctgaataagctgctgaccgattacaccgaaatgaagaaggcgatcctgcatgtgtactgggaagagttccagaaggaccctgtgggcctgatgagccgggtggcccagcctgccagcaagaagatcgatcagaacaagctgaaacctgagatggacgagaagggcaacctgaccaccgccggctttgcctgctctcagtgtggccagcccctgttcgtgtacaagctggagcaggtgtctgagaagggcaaggcttacaccaactacttcggacggtgcaatgtggccgagcacgaaaagctgatcctgctggcccagctgaagcccgagaaggatagcgacgaagccgtgacatatagcctgggaaagtttgggcagagggccctggatttctacagcattcatgtgaccaaggagtccacccaccccgtgaagcccctggcccagatcgccggaaacagatacgcctccggacctgtgggaaaggccctgagcgacgcatgtatgggcacaatcgcctccttcctgtctaagtaccaggacatcatcatcgaacaccagaaggtggtgaagggcaaccagaagagactggagagcctgcgggagctggccggcaaggaaaacctggaataccctagcgtgaccctgccacctcagcctcacaccaaggagggcgttgatgcctacaacgaagtgatcgcccgggtgcgaatgtgggtgaacctgaacctgtggcagaagctgaagctaagcagagatgatgccaagcctctgctgagactgaagggattcccttcctttcctctggtcgagagacaggccaacgaagtggactggtgggacatggtgtgtaacgtgaagaagctgatcaacgagaaaaaggaggatggcaaggtgttttggcagaatctggctggctacaagagacaggaagccctgagaccatacctgagcagcgaggaagatcggaagaagggaaagaaattcgctcggtaccagctgggcgacctgctgctgcacctggaaaagaagcacggcgaggactggggaaaggtgtacgacgaggcctgggagcggattgacaagaaagtggaaggcctgagcaagcacatcaagctggaagaggaacggagaagcgaggacgcccagagcaaggccgccctgaccgactggctgcgggctaaggccagcttcgtgatcgagggcctgaaggaggccgacaaggacgagttctgcagatgcgagctgaagctgcagaagtggtacggggacctgcggggaaagcccttcgccatcgaagccgagaacagcatcctggacatcagcggcttcagcaagcagtacaactgtgccttcatctggcagaaggacggcgtgaagaagctgaacctgtacctgatcatcaactacttcaagggcggcaagctgcggttcaagaagatcaaacctgaagccttcgaagccaacagattctacaccgtgatcaacaaaaagagcggcgagatcgtgcccatggaggtgaacttcaacttcgacgaccccaacctgatcatcctgcctctggcctttggcaagagacagggcagagaattcatctggaacgacctgctgtccctggaaaccggcagcctgaagctggccaacggaagagtgatcgagaagacactgtacaacagaagaacccggcaggatgagcctgccctgttcgtggccctgaccttcgagcggcgggaggtcctggactcctccaatatcaaaccaatgaacctgatcggcgtggcaagaggcgaaaacatccccgccgtgatcgccctgaccgaccccgagggctgcccactgagccggtttaaggatagcctgggaaacccaacccacatcctgagaatcggcgagagctataaggagaagcagcggaccatccaggccaagaaggaggtggagcagcggagagccggcggctacagccggaagtacgccagcaaagccaagaatctggcagacgatatggtgagaaacaccgctagagatctgctgtactacgccgtgacccaggatgccatgctgatcttcgccaacctgagccggggcttcggccggcagggcaagcggaccttcatggccgagagacagtacacacggatggaggactggctgaccgccaagctggcctacgagggcctgagcaagacctacctgtccaagacactggcccagtacacctccaagacatgcagcaactgtgggtttaccatcaccagcgccgactacgacagggtgctggagaagctgaagaagacagcaacaggctggatgaccacaattaacggcaaggagctgaaggtggagggccagattacctactacaacagatacaagagacagaacgtagtcaaggacctgtccgtcgagctggatagactgagcgaagaatctgtgaacaacgacatctcctcctggacaaagggcagaagcggagaagctctgagcctcctgaagaaaagattctcccatagacccgtgcaggagaagttcgtgtgcctgaactgcggcttcgagacacacgcagccgagcaagccgccctgaacatcgccagatcctggctgttcctgcggagccaggagtacaagaaataccagacaaacaagacaaccggcaacaccgataagagagccttcgtcgagacctggcagtccttttaccggaagaagcttaaggaggtgtggaaacctgccgtgcggtctggcggatctggcggaggctcctccccaggagtgcgtgaccttcaaggacgtggccgtgaacttcacccaggaggagtggcagcagctgaaccccgcccagagggacctgtacagggaggtgatgctggagaactacaggaacctgatcagcctgggcctgcccgtgagcaagcccgacgtgatcttccagctggagcagggcgaggagccctggatgctggacctgcagaggatcgaggagggcgagatcagcaggaacatgtacggatctggctccggcagcggccccaagaaaaagagaaaagtctaagctgccttctgcggggcttgccttctggccatgcccttcttctctcccttgcacctgtacctcttggtctttgaataaagcctgagtaggaaggctagcaaaaaaaaaaaaaaaaaaaaaaaaaaaaaaaaaaaaaaaaaaaaaaaaaaaaaaaaaaaaaaaaaaaaaaaaaaaaaaaa

SEQ ID NO: 15937 - RNA, 9485 nt, synthetic construct
  source 1..9485: mol_type = other RNA
aggaaataagagagaaaagaagagtaagaagaaatataagagccaccatggcccctaagaagaagcgtaaagtgagccggatggaacgcctcgtctacgaggtgcggcagaagtgcagaaacatcgaggacatctgcatctcctgcggatctctgaacgtgaccctggagcacccactgttcatcggcggcatgtgccagaactgtaaaaactgttttctggagtgtgcctatcaatacgacgatgacggctaccagagctactgcaccatctgttgcggcggaagagaggtgctgatgtgtggaaataacaactgctgccggtgcttctgcgtggaatgcgtggacctgctggtgggccccggcgccgcccaggccgctattaaggaagatccttggaactgctacatgtgcggccacaagggcacatacggcctgctgagacggagagaggactggcctagcagactgcagatgttcttcgccaataaccacgaccaggagttcgacccccctaaggtgtaccctcccgtccccgccgagaagagaaagcccatccgggtcctgagcctgttcgatggcatcgccaccggtctgctggtgctgaaggacctgggcatccaggtggataggtacattgcctccgaggtgtgcgaggactccatcaccgtgggaatggtgcgtcatcagggcaagatcatgtacgtgggcgacgtgcggagcgtgacacagaagcatatccaggagtggggccctttcgacctggtgatcggcggcagcccttgcaatgacctgagcatcgtgaacccagcccggaagggcctgtacgagggaaccggcagactgttcttcgagttttacagactgctgcacgacgcccggcctaaggaaggcgacgaccggcccttcttttggctgttcgagaatgtggtggccatgggagtcagcgacaagcgggatattagccggttcctggagagcaaccccgtgatgatcgatgccaaggaagtgagcgccgcccaccgggccagatacttctggggcaatctgcctggcatgaacagacccctggccagcaccgtgaacgacaagctggagctgcaggagtgcctggagcacggccggatcgccaagttcagcaaggtgagaaccatcaccacccgaagcaacagcatcaaacaaggcaaggaccagcactttcctgtgttcatgaacgagaaggaggacatcctgtggtgtaccgagatggagagagtgttcgggttcccagtccactacacagatgtcagcaacatgtctagactggccagacagagactgctgggaagaagctggtccgtccctgtgatcagacacctgttcgcccctctgaaggagtacttcgcctgcgtgagcagcggcaacagcaacgccaacagccggggccccagcttctctagcggcctggtgccactgtccctgagagggagccacatgggccccatggagatctacaaaaccgtgagcgcctggaagcggcagcctgtgcgcgtgctgagcctgtttcggaatatcgataaagtcctgaaaagcctgggattcctggagagcggctctggctccggcggtggcaccctgaagtacgtggaggatgtgacaaacgtggtcagacgggatgtggagaagtggggccccttcgatctggtgtacggcagcacccaacccctgggcagctcttgtgaccggtgccctggctggtacatgtttcagttccaccggatcctgcagtacgccctgccgagacaggagtcccagcggccattcttttggattttcatggacaacttgctgctgaccgaggatgaccaggaaactaccactcggttcctgcagaccgaagccgtgaccctgcaggacgtgagaggccgggactaccagaacgccatgcgggtgtggtccaacatccctggactgaaaagcaagcacgcacctctgacccctaaagaagaggagtacctgcaggcccaggtgcggagcagaagcaagctggacgcccctaaggtggatctgctggtgaagaattgcctcctgcccctgagagagtacttcaagtatttcagccagaatagtctgcccctgggaggcagcggcggcggcgccctggtgacatttgaggacgtcgccgtgcggttcacccaggaggaatgggctctgctggatccttctcagaaaatcctgtaccgggacgtgatgagagagacataccggaatctgacctccgtgggcatcaactgggaatgttgggaccttgaagcctgcttcagaagcctgggaagaaacctgagagtgcaggtggtgaagagaaagtgcgagctgaccaacagcggcccctgcgccgagggcggcccaagcagcggcgcccctcctcccagcggcggcagcccagccggctccccaacctctaccgaggagggcacctctgagtccgccacccccgagagcggccctggcacctccaccgagcccagcgagggcagcgcacccggcagccctgccggcagccccacctccacagaggagggaaccagcaccgagcccagcgaaggcagcgccccaggcaccagcaccgagcctagtgagcaggagattaaacggatcaacaagatcagaagaagacttgtgaaagacagcaacaccaagaaggccggcaagacaggccccatgaaaaccctgctggttagagtgatgacacccgatctgagagagcggctggaaaacctgagaaagaagcctgaaaatatcccccagcccatcagcaatacatctagagccaacctgaataagctgctgaccgattacaccgaaatgaagaaggcgatcctgcatgtgtactgggaagagttccagaaggaccctgtgggcctgatgagccgggtggcccagcctgccagcaagaagatcgatcagaacaagctgaaacctgagatggacgagaagggcaacctgaccaccgccggctttgcctgctctcagtgtggccagcccctgttcgtgtacaagctggagcaggtgtctgagaagggcaaggcttacaccaactacttcggacggtgcaatgtggccgagcacgaaaagctgatcctgctggcccagctgaagcccgagaaggatagcgacgaagccgtgacatatagcctgggaaagtttgggcagagggccctggatttctacagcattcatgtgaccaaggagtccacccaccccgtgaagcccctggcccagatcgccggaaacagatacgcctccggacctgtgggaaaggccctgagcgacgcatgtatgggcacaatcgcctccttcctgtctaagtaccaggacatcatcatcgaacaccagaaggtggtgaagggcaaccagaagagactggagagcctgcgggagctggccggcaaggaaaacctggaataccctagcgtgaccctgccacctcagcctcacaccaaggagggcgttgatgcctacaacgaagtgatcgcccgggtgcgaatgtgggtgaacctgaacctgtggcagaagctgaagctaagcagagatgatgccaagcctctgctgagactgaagggattcccttcctttcctctggtcgagagacaggccaacgaagtggactggtgggacatggtgtgtaacgtgaagaagctgatcaacgagaaaaaggaggatggcaaggtgttttggcagaatctggctggctacaagagacaggaagccctgagaccatacctgagcagcgaggaagatcggaagaagggaaagaaattcgctcggtaccagctgggcgacctgctgctgcacctggaaaagaagcacggcgaggactggggaaaggtgtacgacgaggcctgggagcggattgacaagaaagtggaaggcctgagcaagcacatcaagctggaagaggaacggagaagcgaggacgcccagagcaaggccgccctgaccgactggctgcgggctaaggccagcttcgtgatcgagggcctgaaggaggccgacaaggacgagttctgcagatgcgagctgaagctgcagaagtggtacggggacctgcggggaaagcccttcgccatcgaagccgagaacagcatcctggacatcagcggcttcagcaagcagtacaactgtgccttcatctggcagaaggacggcgtgaagaagctgaacctgtacctgatcatcaactacttcaagggcggcaagctgcggttcaagaagatcaaacctgaagccttcgaagccaacagattctacaccgtgatcaacaaaaagagcggcgagatcgtgcccatggaggtgaacttcaacttcgacgaccccaacctgatcatcctgcctctggcctttggcaagagacagggcagagaattcatctggaacgacctgctgtccctggaaaccggcagcctgaagctggccaacggaagagtgatcgagaagacactgtacaacagaagaacccggcaggatgagcctgccctgttcgtggccctgaccttcgagcggcgggaggtcctggactcctccaatatcaaaccaatgaacctgatcggcgtggcaagaggcgaaaacatccccgccgtgatcgccctgaccgaccccgagggctgcccactgagccggtttaaggatagcctgggaaacccaacccacatcctgagaatcggcgagagctataaggagaagcagcggaccatccaggccaagaaggaggtggagcagcggagagccggcggctacagccggaagtacgccagcaaagccaagaatctggcagacgatatggtgagaaacaccgctagagatctgctgtactacgccgtgacccaggatgccatgctgatcttcgccaacctgagccggggcttcggccggcagggcaagcggaccttcatggccgagagacagtacacacggatggaggactggctgaccgccaagctggcctacgagggcctgagcaagacctacctgtccaagacactggcccagtacacctccaagacatgcagcaactgtgggtttaccatcaccagcgccgactacgacagggtgctggagaagctgaagaagacagcaacaggctggatgaccacaattaacggcaaggagctgaaggtggagggccagattacctactacaacagatacaagagacagaacgtagtcaaggacctgtccgtcgagctggatagactgagcgaagaatctgtgaacaacgacatctcctcctggacaaagggcagaagcggagaagctctgagcctcctgaagaaaagattctcccatagacccgtgcaggagaagttcgtgtgcctgaactgcggcttcgagacacacgcagccgagcaagccgccctgaacatcgccagatcctggctgttcctgcggagccaggagtacaagaaataccagacaaacaagacaaccggcaacaccgataagagagccttcgtcgagacctggcagtccttttaccggaagaagcttaaggaggtgtggaaacctgccgtgcggtctggcggatctggcggaggctccgagatgggcctgctgaccttcagggacatcgccatcgagttcagcctggaggagtggcagtgcctggactgcgcccagaggaacctgtacagggacgtgatgctggagaactacaggaacctggtgagcctgggcatcgccgtgagcaagcccgacctgatcacctgcctggagcagaacaaggagagccagaacatcaagaggaacaagatggtggccaagcaccccgtgatgcacagccacggcggcccaagcagcggcgcccctcctcccagcggcggcagcccagccggctccccaacctctaccgaggagggcacctctgagtccgccacccccgagagcggccctggcacctccaccgagcccagcgagggcagcgcacccggcagccctgccggcagccccacctccacagaggagggaaccagcaccgagcccagcgaaggcagcgccccaggcaccagcaccgagcctagtgagcaggagattaaacggatcaacaagatcagaagaagacttgtgaaagacagcaacaccaagaaggccggcaagacaggccccatgaaaaccctgctggttagagtgatgacacccgatctgagagagcggctggaaaacctgagaaagaagcctgaaaatatcccccagcccatcagcaatacatctagagccaacctgaataagctgctgaccgattacaccgaaatgaagaaggcgatcctgcatgtgtactgggaagagttccagaaggaccctgtgggcctgatgagccgggtggcccagcctgccagcaagaagatcgatcagaacaagctgaaacctgagatggacgagaagggcaacctgaccaccgccggctttgcctgctctcagtgtggccagcccctgttcgtgtacaagctggagcaggtgtctgagaagggcaaggcttacaccaactacttcggacggtgcaatgtggccgagcacgaaaagctgatcctgctggcccagctgaagcccgagaaggatagcgacgaagccgtgacatatagcctgggaaagtttgggcagagggccctggatttctacagcattcatgtgaccaaggagtccacccaccccgtgaagcccctggcccagatcgccggaaacagatacgcctccggacctgtgggaaaggccctgagcgacgcatgtatgggcacaatcgcctccttcctgtctaagtaccaggacatcatcatcgaacaccagaaggtggtgaagggcaaccagaagagactggagagcctgcgggagctggccggcaaggaaaacctggaataccctagcgtgaccctgccacctcagcctcacaccaaggagggcgttgatgcctacaacgaagtgatcgcccgggtgcgaatgtgggtgaacctgaacctgtggcagaagctgaagctaagcagagatgatgccaagcctctgctgagactgaagggattcccttcctttcctctggtcgagagacaggccaacgaagtggactggtgggacatggtgtgtaacgtgaagaagctgatcaacgagaaaaaggaggatggcaaggtgttttggcagaatctggctggctacaagagacaggaagccctgagaccatacctgagcagcgaggaagatcggaagaagggaaagaaattcgctcggtaccagctgggcgacctgctgctgcacctggaaaagaagcacggcgaggactggggaaaggtgtacgacgaggcctgggagcggattgacaagaaagtggaaggcctgagcaagcacatcaagctggaagaggaacggagaagcgaggacgcccagagcaaggccgccctgaccgactggctgcgggctaaggccagcttcgtgatcgagggcctgaaggaggccgacaaggacgagttctgcagatgcgagctgaagctgcagaagtggtacggggacctgcggggaaagcccttcgccatcgaagccgagaacagcatcctggacatcagcggcttcagcaagcagtacaactgtgccttcatctggcagaaggacggcgtgaagaagctgaacctgtacctgatcatcaactacttcaagggcggcaagctgcggttcaagaagatcaaacctgaagccttcgaagccaacagattctacaccgtgatcaacaaaaagagcggcgagatcgtgcccatggaggtgaacttcaacttcgacgaccccaacctgatcatcctgcctctggcctttggcaagagacagggcagagaattcatctggaacgacctgctgtccctggaaaccggcagcctgaagctggccaacggaagagtgatcgagaagacactgtacaacagaagaacccggcaggatgagcctgccctgttcgtggccctgaccttcgagcggcgggaggtcctggactcctccaatatcaaaccaatgaacctgatcggcgtggcaagaggcgaaaacatccccgccgtgatcgccctgaccgaccccgagggctgcccactgagccggtttaaggatagcctgggaaacccaacccacatcctgagaatcggcgagagctataaggagaagcagcggaccatccaggccaagaaggaggtggagcagcggagagccggcggctacagccggaagtacgccagcaaagccaagaatctggcagacgatatggtgagaaacaccgctagagatctgctgtactacgccgtgacccaggatgccatgctgatcttcgccaacctgagccggggcttcggccggcagggcaagcggaccttcatggccgagagacagtacacacggatggaggactggctgaccgccaagctggcctacgagggcctgagcaagacctacctgtccaagacactggcccagtacacctccaagacatgcagcaactgtgggtttaccatcaccagcgccgactacgacagggtgctggagaagctgaagaagacagcaacaggctggatgaccacaattaacggcaaggagctgaaggtggagggccagattacctactacaacagatacaagagacagaacgtagtcaaggacctgtccgtcgagctggatagactgagcgaagaatctgtgaacaacgacatctcctcctggacaaagggcagaagcggagaagctctgagcctcctgaagaaaagattctcccatagacccgtgcaggagaagttcgtgtgcctgaactgcggcttcgagacacacgcagccgagcaagccgccctgaacatcgccagatcctggctgttcctgcggagccaggagtacaagaaataccagacaaacaagacaaccggcaacaccgataagagagccttcgtcgagacctggcagtccttttaccggaagaagcttaaggaggtgtggaaacctgccgtgcggtctggcggatctggcggaggctcctgagatgggcctgctgaccttcagggacatcgccatcgagttcagcctggaggagtggcagtgcctggactgcgcccagaggaacctgtacagggacgtgatgctggagaactacaggaacctggtgagcctgggcatcgccgtgagcaagcccgacctgatcacctgcctggagcagaacaaggagagccagaacatcaagaggaacaagatggtggccaagcaccccgtgatgcacagccacggatctggctccggcagcggccccaagaaaaagagaaaagtctaagctgccttctgcggggcttgccttctggccatgcccttcttctctcccttgcacctgtacctcttggtctttgaataaagcctgagtaggaaggctagcaaaaaaaaaaaaaaaaaaaaaaaaaaaaaaaaaaaaaaaaaaaaaaaaaaaaaaaaaaaaaaaaaaaaaaaaaaaaaaaa

SEQ ID NO: 15938 - RNA, 9485 nt, synthetic construct
  source 1..9485: mol_type = other RNA
aggaaataagagagaaaagaagagtaagaagaaatataagagccaccatggcccctaagaagaagcgtaaagtgagccggatggaacgcctcgtctacgaggtgcggcagaagtgcagaaacatcgaggacatctgcatctcctgcggatctctgaacgtgaccctggagcacccactgttcatcggcggcatgtgccagaactgtaaaaactgttttctggagtgtgcctatcaatacgacgatgacggctaccagagctactgcaccatctgttgcggcggaagagaggtgctgatgtgtggaaataacaactgctgccggtgcttctgcgtggaatgcgtggacctgctggtgggccccggcgccgcccaggccgctattaaggaagatccttggaactgctacatgtgcggccacaagggcacatacggcctgctgagacggagagaggactggcctagcagactgcagatgttcttcgccaataaccacgaccaggagttcgacccccctaaggtgtaccctcccgtccccgccgagaagagaaagcccatccgggtcctgagcctgttcgatggcatcgccaccggtctgctggtgctgaaggacctgggcatccaggtggataggtacattgcctccgaggtgtgcgaggactccatcaccgtgggaatggtgcgtcatcagggcaagatcatgtacgtgggcgacgtgcggagcgtgacacagaagcatatccaggagtggggccctttcgacctggtgatcggcggcagcccttgcaatgacctgagcatcgtgaacccagcccggaagggcctgtacgagggaaccggcagactgttcttcgagttttacagactgctgcacgacgcccggcctaaggaaggcgacgaccggcccttcttttggctgttcgagaatgtggtggccatgggagtcagcgacaagcgggatattagccggttcctggagagcaaccccgtgatgatcgatgccaaggaagtgagcgccgcccaccgggccagatacttctggggcaatctgcctggcatgaacagacccctggccagcaccgtgaacgacaagctggagctgcaggagtgcctggagcacggccggatcgccaagttcagcaaggtgagaaccatcaccacccgaagcaacagcatcaaacaaggcaaggaccagcactttcctgtgttcatgaacgagaaggaggacatcctgtggtgtaccgagatggagagagtgttcgggttcccagtccactacacagatgtcagcaacatgtctagactggccagacagagactgctgggaagaagctggtccgtccctgtgatcagacacctgttcgcccctctgaaggagtacttcgcctgcgtgagcagcggcaacagcaacgccaacagccggggccccagcttctctagcggcctggtgccactgtccctgagagggagccacatgggccccatggagatctacaaaaccgtgagcgcctggaagcggcagcctgtgcgcgtgctgagcctgtttcggaatatcgataaagtcctgaaaagcctgggattcctggagagcggctctggctccggcggtggcaccctgaagtacgtggaggatgtgacaaacgtggtcagacgggatgtggagaagtggggccccttcgatctggtgtacggcagcacccaacccctgggcagctcttgtgaccggtgccctggctggtacatgtttcagttccaccggatcctgcagtacgccctgccgagacaggagtcccagcggccattcttttggattttcatggacaacttgctgctgaccgaggatgaccaggaaactaccactcggttcctgcagaccgaagccgtgaccctgcaggacgtgagaggccgggactaccagaacgccatgcgggtgtggtccaacatccctggactgaaaagcaagcacgcacctctgacccctaaagaagaggagtacctgcaggcccaggtgcggagcagaagcaagctggacgcccctaaggtggatctgctggtgaagaattgcctcctgcccctgagagagtacttcaagtatttcagccagaatagtctgcccctgggaggcagcggcggcggcgccctggtgacatttgaggacgtcgccgtgcggttcacccaggaggaatgggctctgctggatccttctcagaaaatcctgtaccgggacgtgatgagagagacataccggaatctgacctccgtgggcatcaactgggaatgttgggaccttgaagcctgcttcagaagcctgggaagaaacctgagagtgcaggtggtgaagagaaagtgcgagctgaccaacagcggcccctgcgccgagggcggcccaagcagcggcgcccctcctcccagcggcggcagcccagccggctccccaacctctaccgaggagggcacctctgagtccgccacccccgagagcggccctggcacctccaccgagcccagcgagggcagcgcacccggcagccctgccggcagccccacctccacagaggagggaaccagcaccgagcccagcgaaggcagcgccccaggcaccagcaccgagcctagtgagcaggagattaaacggatcaacaagatcagaagaagacttgtgaaagacagcaacaccaagaaggccggcaagacaggccccatgaaaaccctgctggttagagtgatgacacccgatctgagagagcggctggaaaacctgagaaagaagcctgaaaatatcccccagcccatcagcaatacatctagagccaacctgaataagctgctgaccgattacaccgaaatgaagaaggcgatcctgcatgtgtactgggaagagttccagaaggaccctgtgggcctgatgagccgggtggcccagcctgccagcaagaagatcgatcagaacaagctgaaacctgagatggacgagaagggcaacctgaccaccgccggctttgcctgctctcagtgtggccagcccctgttcgtgtacaagctggagcaggtgtctgagaagggcaaggcttacaccaactacttcggacggtgcaatgtggccgagcacgaaaagctgatcctgctggcccagctgaagcccgagaaggatagcgacgaagccgtgacatatagcctgggaaagtttgggcagagggccctggatttctacagcattcatgtgaccaaggagtccacccaccccgtgaagcccctggcccagatcgccggaaacagatacgcctccggacctgtgggaaaggccctgagcgacgcatgtatgggcacaatcgcctccttcctgtctaagtaccaggacatcatcatcgaacaccagaaggtggtgaagggcaaccagaagagactggagagcctgcgggagctggccggcaaggaaaacctggaataccctagcgtgaccctgccacctcagcctcacaccaaggagggcgttgatgcctacaacgaagtgatcgcccgggtgcgaatgtgggtgaacctgaacctgtggcagaagctgaagctaagcagagatgatgccaagcctctgctgagactgaagggattcccttcctttcctctggtcgagagacaggccaacgaagtggactggtgggacatggtgtgtaacgtgaagaagctgatcaacgagaaaaaggaggatggcaaggtgttttggcagaatctggctggctacaagagacaggaagccctgagaccatacctgagcagcgaggaagatcggaagaagggaaagaaattcgctcggtaccagctgggcgacctgctgctgcacctggaaaagaagcacggcgaggactggggaaaggtgtacgacgaggcctgggagcggattgacaagaaagtggaaggcctgagcaagcacatcaagctggaagaggaacggagaagcgaggacgcccagagcaaggccgccctgaccgactggctgcgggctaaggccagcttcgtgatcgagggcctgaaggaggccgacaaggacgagttctgcagatgcgagctgaagctgcagaagtggtacggggacctgcggggaaagcccttcgccatcgaagccgagaacagcatcctggacatcagcggcttcagcaagcagtacaactgtgccttcatctggcagaaggacggcgtgaagaagctgaacctgtacctgatcatcaactacttcaagggcggcaagctgcggttcaagaagatcaaacctgaagccttcgaagccaacagattctacaccgtgatcaacaaaaagagcggcgagatcgtgcccatggaggtgaacttcaacttcgacgaccccaacctgatcatcctgcctctggcctttggcaagagacagggcagagaattcatctggaacgacctgctgtccctggaaaccggcagcctgaagctggccaacggaagagtgatcgagaagacactgtacaacagaagaacccggcaggatgagcctgccctgttcgtggccctgaccttcgagcggcgggaggtcctggactcctccaatatcaaaccaatgaacctgatcggcgtggcaagaggcgaaaacatccccgccgtgatcgccctgaccgaccccgagggctgcccactgagccggtttaaggatagcctgggaaacccaacccacatcctgagaatcggcgagagctataaggagaagcagcggaccatccaggccaagaaggaggtggagcagcggagagccggcggctacagccggaagtacgccagcaaagccaagaatctggcagacgatatggtgagaaacaccgctagagatctgctgtactacgccgtgacccaggatgccatgctgatcttcgccaacctgagccggggcttcggccggcagggcaagcggaccttcatggccgagagacagtacacacggatggaggactggctgaccgccaagctggcctacgagggcctgagcaagacctacctgtccaagacactggcccagtacacctccaagacatgcagcaactgtgggtttaccatcaccagcgccgactacgacagggtgctggagaagctgaagaagacagcaacaggctggatgaccacaattaacggcaaggagctgaaggtggagggccagattacctactacaacagatacaagagacagaacgtagtcaaggacctgtccgtcgagctggatagactgagcgaagaatctgtgaacaacgacatctcctcctggacaaagggcagaagcggagaagctctgagcctcctgaagaaaagattctcccatagacccgtgcaggagaagttcgtgtgcctgaactgcggcttcgagacacacgcagccgagcaagccgccctgaacatcgccagatcctggctgttcctgcggagccaggagtacaagaaataccagacaaacaagacaaccggcaacaccgataagagagccttcgtcgagacctggcagtccttttaccggaagaagcttaaggaggtgtggaaacctgccgtgcggtctggcggatctggcggaggctccttcgaggagctggtgaccttcgaggacgtgctggtggacttcagccccgaggagctgagcagcctgagcgccgcccagaggaacctgtacagggaggtgatgctggagaactacaggaacctggtgagcctgggccaccagttcagcaagcccgacgtgatcagcaggctggaggaggaggagagccacgccatggagaccgacagcaggcacaccgtgatctgccccggcgagagccacgacggcggcccaagcagcggcgcccctcctcccagcggcggcagcccagccggctccccaacctctaccgaggagggcacctctgagtccgccacccccgagagcggccctggcacctccaccgagcccagcgagggcagcgcacccggcagccctgccggcagccccacctccacagaggagggaaccagcaccgagcccagcgaaggcagcgccccaggcaccagcaccgagcctagtgagcaggagattaaacggatcaacaagatcagaagaagacttgtgaaagacagcaacaccaagaaggccggcaagacaggccccatgaaaaccctgctggttagagtgatgacacccgatctgagagagcggctggaaaacctgagaaagaagcctgaaaatatcccccagcccatcagcaatacatctagagccaacctgaataagctgctgaccgattacaccgaaatgaagaaggcgatcctgcatgtgtactgggaagagttccagaaggaccctgtgggcctgatgagccgggtggcccagcctgccagcaagaagatcgatcagaacaagctgaaacctgagatggacgagaagggcaacctgaccaccgccggctttgcctgctctcagtgtggccagcccctgttcgtgtacaagctggagcaggtgtctgagaagggcaaggcttacaccaactacttcggacggtgcaatgtggccgagcacgaaaagctgatcctgctggcccagctgaagcccgagaaggatagcgacgaagccgtgacatatagcctgggaaagtttgggcagagggccctggatttctacagcattcatgtgaccaaggagtccacccaccccgtgaagcccctggcccagatcgccggaaacagatacgcctccggacctgtgggaaaggccctgagcgacgcatgtatgggcacaatcgcctccttcctgtctaagtaccaggacatcatcatcgaacaccagaaggtggtgaagggcaaccagaagagactggagagcctgcgggagctggccggcaaggaaaacctggaataccctagcgtgaccctgccacctcagcctcacaccaaggagggcgttgatgcctacaacgaagtgatcgcccgggtgcgaatgtgggtgaacctgaacctgtggcagaagctgaagctaagcagagatgatgccaagcctctgctgagactgaagggattcccttcctttcctctggtcgagagacaggccaacgaagtggactggtgggacatggtgtgtaacgtgaagaagctgatcaacgagaaaaaggaggatggcaaggtgttttggcagaatctggctggctacaagagacaggaagccctgagaccatacctgagcagcgaggaagatcggaagaagggaaagaaattcgctcggtaccagctgggcgacctgctgctgcacctggaaaagaagcacggcgaggactggggaaaggtgtacgacgaggcctgggagcggattgacaagaaagtggaaggcctgagcaagcacatcaagctggaagaggaacggagaagcgaggacgcccagagcaaggccgccctgaccgactggctgcgggctaaggccagcttcgtgatcgagggcctgaaggaggccgacaaggacgagttctgcagatgcgagctgaagctgcagaagtggtacggggacctgcggggaaagcccttcgccatcgaagccgagaacagcatcctggacatcagcggcttcagcaagcagtacaactgtgccttcatctggcagaaggacggcgtgaagaagctgaacctgtacctgatcatcaactacttcaagggcggcaagctgcggttcaagaagatcaaacctgaagccttcgaagccaacagattctacaccgtgatcaacaaaaagagcggcgagatcgtgcccatggaggtgaacttcaacttcgacgaccccaacctgatcatcctgcctctggcctttggcaagagacagggcagagaattcatctggaacgacctgctgtccctggaaaccggcagcctgaagctggccaacggaagagtgatcgagaagacactgtacaacagaagaacccggcaggatgagcctgccctgttcgtggccctgaccttcgagcggcgggaggtcctggactcctccaatatcaaaccaatgaacctgatcggcgtggcaagaggcgaaaacatccccgccgtgatcgccctgaccgaccccgagggctgcccactgagccggtttaaggatagcctgggaaacccaacccacatcctgagaatcggcgagagctataaggagaagcagcggaccatccaggccaagaaggaggtggagcagcggagagccggcggctacagccggaagtacgccagcaaagccaagaatctggcagacgatatggtgagaaacaccgctagagatctgctgtactacgccgtgacccaggatgccatgctgatcttcgccaacctgagccggggcttcggccggcagggcaagcggaccttcatggccgagagacagtacacacggatggaggactggctgaccgccaagctggcctacgagggcctgagcaagacctacctgtccaagacactggcccagtacacctccaagacatgcagcaactgtgggtttaccatcaccagcgccgactacgacagggtgctggagaagctgaagaagacagcaacaggctggatgaccacaattaacggcaaggagctgaaggtggagggccagattacctactacaacagatacaagagacagaacgtagtcaaggacctgtccgtcgagctggatagactgagcgaagaatctgtgaacaacgacatctcctcctggacaaagggcagaagcggagaagctctgagcctcctgaagaaaagattctcccatagacccgtgcaggagaagttcgtgtgcctgaactgcggcttcgagacacacgcagccgagcaagccgccctgaacatcgccagatcctggctgttcctgcggagccaggagtacaagaaataccagacaaacaagacaaccggcaacaccgataagagagccttcgtcgagacctggcagtccttttaccggaagaagcttaaggaggtgtggaaacctgccgtgcggtctggcggatctggcggaggctcctttcgaggagctggtgaccttcgaggacgtgctggtggacttcagccccgaggagctgagcagcctgagcgccgcccagaggaacctgtacagggaggtgatgctggagaactacaggaacctggtgagcctgggccaccagttcagcaagcccgacgtgatcagcaggctggaggaggaggagagccacgccatggagaccgacagcaggcacaccgtgatctgccccggcgagagccacgacggatctggctccggcagcggccccaagaaaaagagaaaagtctaagctgccttctgcggggcttgccttctggccatgcccttcttctctcccttgcacctgtacctcttggtctttgaataaagcctgagtaggaaggctagcaaaaaaaaaaaaaaaaaaaaaaaaaaaaaaaaaaaaaaaaaaaaaaaaaaaaaaaaaaaaaaaaaaaaaaaaaaaaaaaa

SEQ ID NO: 15939 - RNA, 9485 nt, synthetic construct
  source 1..9485: mol_type = other RNA
aggaaataagagagaaaagaagagtaagaagaaatataagagccaccatggcccctaagaagaagcgtaaagtgagccggatggaacgcctcgtctacgaggtgcggcagaagtgcagaaacatcgaggacatctgcatctcctgcggatctctgaacgtgaccctggagcacccactgttcatcggcggcatgtgccagaactgtaaaaactgttttctggagtgtgcctatcaatacgacgatgacggctaccagagctactgcaccatctgttgcggcggaagagaggtgctgatgtgtggaaataacaactgctgccggtgcttctgcgtggaatgcgtggacctgctggtgggccccggcgccgcccaggccgctattaaggaagatccttggaactgctacatgtgcggccacaagggcacatacggcctgctgagacggagagaggactggcctagcagactgcagatgttcttcgccaataaccacgaccaggagttcgacccccctaaggtgtaccctcccgtccccgccgagaagagaaagcccatccgggtcctgagcctgttcgatggcatcgccaccggtctgctggtgctgaaggacctgggcatccaggtggataggtacattgcctccgaggtgtgcgaggactccatcaccgtgggaatggtgcgtcatcagggcaagatcatgtacgtgggcgacgtgcggagcgtgacacagaagcatatccaggagtggggccctttcgacctggtgatcggcggcagcccttgcaatgacctgagcatcgtgaacccagcccggaagggcctgtacgagggaaccggcagactgttcttcgagttttacagactgctgcacgacgcccggcctaaggaaggcgacgaccggcccttcttttggctgttcgagaatgtggtggccatgggagtcagcgacaagcgggatattagccggttcctggagagcaaccccgtgatgatcgatgccaaggaagtgagcgccgcccaccgggccagatacttctggggcaatctgcctggcatgaacagacccctggccagcaccgtgaacgacaagctggagctgcaggagtgcctggagcacggccggatcgccaagttcagcaaggtgagaaccatcaccacccgaagcaacagcatcaaacaaggcaaggaccagcactttcctgtgttcatgaacgagaaggaggacatcctgtggtgtaccgagatggagagagtgttcgggttcccagtccactacacagatgtcagcaacatgtctagactggccagacagagactgctgggaagaagctggtccgtccctgtgatcagacacctgttcgcccctctgaaggagtacttcgcctgcgtgagcagcggcaacagcaacgccaacagccggggccccagcttctctagcggcctggtgccactgtccctgagagggagccacatgggccccatggagatctacaaaaccgtgagcgcctggaagcggcagcctgtgcgcgtgctgagcctgtttcggaatatcgataaagtcctgaaaagcctgggattcctggagagcggctctggctccggcggtggcaccctgaagtacgtggaggatgtgacaaacgtggtcagacgggatgtggagaagtggggccccttcgatctggtgtacggcagcacccaacccctgggcagctcttgtgaccggtgccctggctggtacatgtttcagttccaccggatcctgcagtacgccctgccgagacaggagtcccagcggccattcttttggattttcatggacaacttgctgctgaccgaggatgaccaggaaactaccactcggttcctgcagaccgaagccgtgaccctgcaggacgtgagaggccgggactaccagaacgccatgcgggtgtggtccaacatccctggactgaaaagcaagcacgcacctctgacccctaaagaagaggagtacctgcaggcccaggtgcggagcagaagcaagctggacgcccctaaggtggatctgctggtgaagaattgcctcctgcccctgagagagtacttcaagtatttcagccagaatagtctgcccctgggaggcagcggcggcggcgccctggtgacatttgaggacgtcgccgtgcggttcacccaggaggaatgggctctgctggatccttctcagaaaatcctgtaccgggacgtgatgagagagacataccggaatctgacctccgtgggcatcaactgggaatgttgggaccttgaagcctgcttcagaagcctgggaagaaacctgagagtgcaggtggtgaagagaaagtgcgagctgaccaacagcggcccctgcgccgagggcggcccaagcagcggcgcccctcctcccagcggcggcagcccagccggctccccaacctctaccgaggagggcacctctgagtccgccacccccgagagcggccctggcacctccaccgagcccagcgagggcagcgcacccggcagccctgccggcagccccacctccacagaggagggaaccagcaccgagcccagcgaaggcagcgccccaggcaccagcaccgagcctagtgagcaggagattaaacggatcaacaagatcagaagaagacttgtgaaagacagcaacaccaagaaggccggcaagacaggccccatgaaaaccctgctggttagagtgatgacacccgatctgagagagcggctggaaaacctgagaaagaagcctgaaaatatcccccagcccatcagcaatacatctagagccaacctgaataagctgctgaccgattacaccgaaatgaagaaggcgatcctgcatgtgtactgggaagagttccagaaggaccctgtgggcctgatgagccgggtggcccagcctgccagcaagaagatcgatcagaacaagctgaaacctgagatggacgagaagggcaacctgaccaccgccggctttgcctgctctcagtgtggccagcccctgttcgtgtacaagctggagcaggtgtctgagaagggcaaggcttacaccaactacttcggacggtgcaatgtggccgagcacgaaaagctgatcctgctggcccagctgaagcccgagaaggatagcgacgaagccgtgacatatagcctgggaaagtttgggcagagggccctggatttctacagcattcatgtgaccaaggagtccacccaccccgtgaagcccctggcccagatcgccggaaacagatacgcctccggacctgtgggaaaggccctgagcgacgcatgtatgggcacaatcgcctccttcctgtctaagtaccaggacatcatcatcgaacaccagaaggtggtgaagggcaaccagaagagactggagagcctgcgggagctggccggcaaggaaaacctggaataccctagcgtgaccctgccacctcagcctcacaccaaggagggcgttgatgcctacaacgaagtgatcgcccgggtgcgaatgtgggtgaacctgaacctgtggcagaagctgaagctaagcagagatgatgccaagcctctgctgagactgaagggattcccttcctttcctctggtcgagagacaggccaacgaagtggactggtgggacatggtgtgtaacgtgaagaagctgatcaacgagaaaaaggaggatggcaaggtgttttggcagaatctggctggctacaagagacaggaagccctgagaccatacctgagcagcgaggaagatcggaagaagggaaagaaattcgctcggtaccagctgggcgacctgctgctgcacctggaaaagaagcacggcgaggactggggaaaggtgtacgacgaggcctgggagcggattgacaagaaagtggaaggcctgagcaagcacatcaagctggaagaggaacggagaagcgaggacgcccagagcaaggccgccctgaccgactggctgcgggctaaggccagcttcgtgatcgagggcctgaaggaggccgacaaggacgagttctgcagatgcgagctgaagctgcagaagtggtacggggacctgcggggaaagcccttcgccatcgaagccgagaacagcatcctggacatcagcggcttcagcaagcagtacaactgtgccttcatctggcagaaggacggcgtgaagaagctgaacctgtacctgatcatcaactacttcaagggcggcaagctgcggttcaagaagatcaaacctgaagccttcgaagccaacagattctacaccgtgatcaacaaaaagagcggcgagatcgtgcccatggaggtgaacttcaacttcgacgaccccaacctgatcatcctgcctctggcctttggcaagagacagggcagagaattcatctggaacgacctgctgtccctggaaaccggcagcctgaagctggccaacggaagagtgatcgagaagacactgtacaacagaagaacccggcaggatgagcctgccctgttcgtggccctgaccttcgagcggcgggaggtcctggactcctccaatatcaaaccaatgaacctgatcggcgtggcaagaggcgaaaacatccccgccgtgatcgccctgaccgaccccgagggctgcccactgagccggtttaaggatagcctgggaaacccaacccacatcctgagaatcggcgagagctataaggagaagcagcggaccatccaggccaagaaggaggtggagcagcggagagccggcggctacagccggaagtacgccagcaaagccaagaatctggcagacgatatggtgagaaacaccgctagagatctgctgtactacgccgtgacccaggatgccatgctgatcttcgccaacctgagccggggcttcggccggcagggcaagcggaccttcatggccgagagacagtacacacggatggaggactggctgaccgccaagctggcctacgagggcctgagcaagacctacctgtccaagacactggcccagtacacctccaagacatgcagcaactgtgggtttaccatcaccagcgccgactacgacagggtgctggagaagctgaagaagacagcaacaggctggatgaccacaattaacggcaaggagctgaaggtggagggccagattacctactacaacagatacaagagacagaacgtagtcaaggacctgtccgtcgagctggatagactgagcgaagaatctgtgaacaacgacatctcctcctggacaaagggcagaagcggagaagctctgagcctcctgaagaaaagattctcccatagacccgtgcaggagaagttcgtgtgcctgaactgcggcttcgagacacacgcagccgagcaagccgccctgaacatcgccagatcctggctgttcctgcggagccaggagtacaagaaataccagacaaacaagacaaccggcaacaccgataagagagccttcgtcgagacctggcagtccttttaccggaagaagcttaaggaggtgtggaaacctgccgtgcggtctggcggatctggcggaggctccatgatgaccgccgtgagcctgaccaccaggccccaggagagcgtggccttcgaggacgtggccgtgtacttcaccgccaaggagtgggacatcatggtgcccgccgagagggccctgtacagggacgtgatgctggagaactacgaggccgtggccttcgtggtgccccccaccagcaagcccgccctggtgagccacctggagcagggcaaggagagctgcttcaccaggccccagggcgtgggcggcccaagcagcggcgcccctcctcccagcggcggcagcccagccggctccccaacctctaccgaggagggcacctctgagtccgccacccccgagagcggccctggcacctccaccgagcccagcgagggcagcgcacccggcagccctgccggcagccccacctccacagaggagggaaccagcaccgagcccagcgaaggcagcgccccaggcaccagcaccgagcctagtgagcaggagattaaacggatcaacaagatcagaagaagacttgtgaaagacagcaacaccaagaaggccggcaagacaggccccatgaaaaccctgctggttagagtgatgacacccgatctgagagagcggctggaaaacctgagaaagaagcctgaaaatatcccccagcccatcagcaatacatctagagccaacctgaataagctgctgaccgattacaccgaaatgaagaaggcgatcctgcatgtgtactgggaagagttccagaaggaccctgtgggcctgatgagccgggtggcccagcctgccagcaagaagatcgatcagaacaagctgaaacctgagatggacgagaagggcaacctgaccaccgccggctttgcctgctctcagtgtggccagcccctgttcgtgtacaagctggagcaggtgtctgagaagggcaaggcttacaccaactacttcggacggtgcaatgtggccgagcacgaaaagctgatcctgctggcccagctgaagcccgagaaggatagcgacgaagccgtgacatatagcctgggaaagtttgggcagagggccctggatttctacagcattcatgtgaccaaggagtccacccaccccgtgaagcccctggcccagatcgccggaaacagatacgcctccggacctgtgggaaaggccctgagcgacgcatgtatgggcacaatcgcctccttcctgtctaagtaccaggacatcatcatcgaacaccagaaggtggtgaagggcaaccagaagagactggagagcctgcgggagctggccggcaaggaaaacctggaataccctagcgtgaccctgccacctcagcctcacaccaaggagggcgttgatgcctacaacgaagtgatcgcccgggtgcgaatgtgggtgaacctgaacctgtggcagaagctgaagctaagcagagatgatgccaagcctctgctgagactgaagggattcccttcctttcctctggtcgagagacaggccaacgaagtggactggtgggacatggtgtgtaacgtgaagaagctgatcaacgagaaaaaggaggatggcaaggtgttttggcagaatctggctggctacaagagacaggaagccctgagaccatacctgagcagcgaggaagatcggaagaagggaaagaaattcgctcggtaccagctgggcgacctgctgctgcacctggaaaagaagcacggcgaggactggggaaaggtgtacgacgaggcctgggagcggattgacaagaaagtggaaggcctgagcaagcacatcaagctggaagaggaacggagaagcgaggacgcccagagcaaggccgccctgaccgactggctgcgggctaaggccagcttcgtgatcgagggcctgaaggaggccgacaaggacgagttctgcagatgcgagctgaagctgcagaagtggtacggggacctgcggggaaagcccttcgccatcgaagccgagaacagcatcctggacatcagcggcttcagcaagcagtacaactgtgccttcatctggcagaaggacggcgtgaagaagctgaacctgtacctgatcatcaactacttcaagggcggcaagctgcggttcaagaagatcaaacctgaagccttcgaagccaacagattctacaccgtgatcaacaaaaagagcggcgagatcgtgcccatggaggtgaacttcaacttcgacgaccccaacctgatcatcctgcctctggcctttggcaagagacagggcagagaattcatctggaacgacctgctgtccctggaaaccggcagcctgaagctggccaacggaagagtgatcgagaagacactgtacaacagaagaacccggcaggatgagcctgccctgttcgtggccctgaccttcgagcggcgggaggtcctggactcctccaatatcaaaccaatgaacctgatcggcgtggcaagaggcgaaaacatccccgccgtgatcgccctgaccgaccccgagggctgcccactgagccggtttaaggatagcctgggaaacccaacccacatcctgagaatcggcgagagctataaggagaagcagcggaccatccaggccaagaaggaggtggagcagcggagagccggcggctacagccggaagtacgccagcaaagccaagaatctggcagacgatatggtgagaaacaccgctagagatctgctgtactacgccgtgacccaggatgccatgctgatcttcgccaacctgagccggggcttcggccggcagggcaagcggaccttcatggccgagagacagtacacacggatggaggactggctgaccgccaagctggcctacgagggcctgagcaagacctacctgtccaagacactggcccagtacacctccaagacatgcagcaactgtgggtttaccatcaccagcgccgactacgacagggtgctggagaagctgaagaagacagcaacaggctggatgaccacaattaacggcaaggagctgaaggtggagggccagattacctactacaacagatacaagagacagaacgtagtcaaggacctgtccgtcgagctggatagactgagcgaagaatctgtgaacaacgacatctcctcctggacaaagggcagaagcggagaagctctgagcctcctgaagaaaagattctcccatagacccgtgcaggagaagttcgtgtgcctgaactgcggcttcgagacacacgcagccgagcaagccgccctgaacatcgccagatcctggctgttcctgcggagccaggagtacaagaaataccagacaaacaagacaaccggcaacaccgataagagagccttcgtcgagacctggcagtccttttaccggaagaagcttaaggaggtgtggaaacctgccgtgcggtctggcggatctggcggaggctcctatgatgaccgccgtgagcctgaccaccaggccccaggagagcgtggccttcgaggacgtggccgtgtacttcaccgccaaggagtgggacatcatggtgcccgccgagagggccctgtacagggacgtgatgctggagaactacgaggccgtggccttcgtggtgccccccaccagcaagcccgccctggtgagccacctggagcagggcaaggagagctgcttcaccaggccccagggcgtgggatctggctccggcagcggccccaagaaaaagagaaaagtctaagctgccttctgcggggcttgccttctggccatgcccttcttctctcccttgcacctgtacctcttggtctttgaataaagcctgagtaggaaggctagcaaaaaaaaaaaaaaaaaaaaaaaaaaaaaaaaaaaaaaaaaaaaaaaaaaaaaaaaaaaaaaaaaaaaaaaaaaaaaaaa

SEQ ID NO: 15940 - RNA, 9485 nt, synthetic construct
  source 1..9485: mol_type = other RNA
aggaaataagagagaaaagaagagtaagaagaaatataagagccaccatggcccctaagaagaagcgtaaagtgagccggatggaacgcctcgtctacgaggtgcggcagaagtgcagaaacatcgaggacatctgcatctcctgcggatctctgaacgtgaccctggagcacccactgttcatcggcggcatgtgccagaactgtaaaaactgttttctggagtgtgcctatcaatacgacgatgacggctaccagagctactgcaccatctgttgcggcggaagagaggtgctgatgtgtggaaataacaactgctgccggtgcttctgcgtggaatgcgtggacctgctggtgggccccggcgccgcccaggccgctattaaggaagatccttggaactgctacatgtgcggccacaagggcacatacggcctgctgagacggagagaggactggcctagcagactgcagatgttcttcgccaataaccacgaccaggagttcgacccccctaaggtgtaccctcccgtccccgccgagaagagaaagcccatccgggtcctgagcctgttcgatggcatcgccaccggtctgctggtgctgaaggacctgggcatccaggtggataggtacattgcctccgaggtgtgcgaggactccatcaccgtgggaatggtgcgtcatcagggcaagatcatgtacgtgggcgacgtgcggagcgtgacacagaagcatatccaggagtggggccctttcgacctggtgatcggcggcagcccttgcaatgacctgagcatcgtgaacccagcccggaagggcctgtacgagggaaccggcagactgttcttcgagttttacagactgctgcacgacgcccggcctaaggaaggcgacgaccggcccttcttttggctgttcgagaatgtggtggccatgggagtcagcgacaagcgggatattagccggttcctggagagcaaccccgtgatgatcgatgccaaggaagtgagcgccgcccaccgggccagatacttctggggcaatctgcctggcatgaacagacccctggccagcaccgtgaacgacaagctggagctgcaggagtgcctggagcacggccggatcgccaagttcagcaaggtgagaaccatcaccacccgaagcaacagcatcaaacaaggcaaggaccagcactttcctgtgttcatgaacgagaaggaggacatcctgtggtgtaccgagatggagagagtgttcgggttcccagtccactacacagatgtcagcaacatgtctagactggccagacagagactgctgggaagaagctggtccgtccctgtgatcagacacctgttcgcccctctgaaggagtacttcgcctgcgtgagcagcggcaacagcaacgccaacagccggggccccagcttctctagcggcctggtgccactgtccctgagagggagccacatgggccccatggagatctacaaaaccgtgagcgcctggaagcggcagcctgtgcgcgtgctgagcctgtttcggaatatcgataaagtcctgaaaagcctgggattcctggagagcggctctggctccggcggtggcaccctgaagtacgtggaggatgtgacaaacgtggtcagacgggatgtggagaagtggggccccttcgatctggtgtacggcagcacccaacccctgggcagctcttgtgaccggtgccctggctggtacatgtttcagttccaccggatcctgcagtacgccctgccgagacaggagtcccagcggccattcttttggattttcatggacaacttgctgctgaccgaggatgaccaggaaactaccactcggttcctgcagaccgaagccgtgaccctgcaggacgtgagaggccgggactaccagaacgccatgcgggtgtggtccaacatccctggactgaaaagcaagcacgcacctctgacccctaaagaagaggagtacctgcaggcccaggtgcggagcagaagcaagctggacgcccctaaggtggatctgctggtgaagaattgcctcctgcccctgagagagtacttcaagtatttcagccagaatagtctgcccctgggaggcagcggcggcggcgccctggtgacatttgaggacgtcgccgtgcggttcacccaggaggaatgggctctgctggatccttctcagaaaatcctgtaccgggacgtgatgagagagacataccggaatctgacctccgtgggcatcaactgggaatgttgggaccttgaagcctgcttcagaagcctgggaagaaacctgagagtgcaggtggtgaagagaaagtgcgagctgaccaacagcggcccctgcgccgagggcggcccaagcagcggcgcccctcctcccagcggcggcagcccagccggctccccaacctctaccgaggagggcacctctgagtccgccacccccgagagcggccctggcacctccaccgagcccagcgagggcagcgcacccggcagccctgccggcagccccacctccacagaggagggaaccagcaccgagcccagcgaaggcagcgccccaggcaccagcaccgagcctagtgagcaggagattaaacggatcaacaagatcagaagaagacttgtgaaagacagcaacaccaagaaggccggcaagacaggccccatgaaaaccctgctggttagagtgatgacacccgatctgagagagcggctggaaaacctgagaaagaagcctgaaaatatcccccagcccatcagcaatacatctagagccaacctgaataagctgctgaccgattacaccgaaatgaagaaggcgatcctgcatgtgtactgggaagagttccagaaggaccctgtgggcctgatgagccgggtggcccagcctgccagcaagaagatcgatcagaacaagctgaaacctgagatggacgagaagggcaacctgaccaccgccggctttgcctgctctcagtgtggccagcccctgttcgtgtacaagctggagcaggtgtctgagaagggcaaggcttacaccaactacttcggacggtgcaatgtggccgagcacgaaaagctgatcctgctggcccagctgaagcccgagaaggatagcgacgaagccgtgacatatagcctgggaaagtttgggcagagggccctggatttctacagcattcatgtgaccaaggagtccacccaccccgtgaagcccctggcccagatcgccggaaacagatacgcctccggacctgtgggaaaggccctgagcgacgcatgtatgggcacaatcgcctccttcctgtctaagtaccaggacatcatcatcgaacaccagaaggtggtgaagggcaaccagaagagactggagagcctgcgggagctggccggcaaggaaaacctggaataccctagcgtgaccctgccacctcagcctcacaccaaggagggcgttgatgcctacaacgaagtgatcgcccgggtgcgaatgtgggtgaacctgaacctgtggcagaagctgaagctaagcagagatgatgccaagcctctgctgagactgaagggattcccttcctttcctctggtcgagagacaggccaacgaagtggactggtgggacatggtgtgtaacgtgaagaagctgatcaacgagaaaaaggaggatggcaaggtgttttggcagaatctggctggctacaagagacaggaagccctgagaccatacctgagcagcgaggaagatcggaagaagggaaagaaattcgctcggtaccagctgggcgacctgctgctgcacctggaaaagaagcacggcgaggactggggaaaggtgtacgacgaggcctgggagcggattgacaagaaagtggaaggcctgagcaagcacatcaagctggaagaggaacggagaagcgaggacgcccagagcaaggccgccctgaccgactggctgcgggctaaggccagcttcgtgatcgagggcctgaaggaggccgacaaggacgagttctgcagatgcgagctgaagctgcagaagtggtacggggacctgcggggaaagcccttcgccatcgaagccgagaacagcatcctggacatcagcggcttcagcaagcagtacaactgtgccttcatctggcagaaggacggcgtgaagaagctgaacctgtacctgatcatcaactacttcaagggcggcaagctgcggttcaagaagatcaaacctgaagccttcgaagccaacagattctacaccgtgatcaacaaaaagagcggcgagatcgtgcccatggaggtgaacttcaacttcgacgaccccaacctgatcatcctgcctctggcctttggcaagagacagggcagagaattcatctggaacgacctgctgtccctggaaaccggcagcctgaagctggccaacggaagagtgatcgagaagacactgtacaacagaagaacccggcaggatgagcctgccctgttcgtggccctgaccttcgagcggcgggaggtcctggactcctccaatatcaaaccaatgaacctgatcggcgtggcaagaggcgaaaacatccccgccgtgatcgccctgaccgaccccgagggctgcccactgagccggtttaaggatagcctgggaaacccaacccacatcctgagaatcggcgagagctataaggagaagcagcggaccatccaggccaagaaggaggtggagcagcggagagccggcggctacagccggaagtacgccagcaaagccaagaatctggcagacgatatggtgagaaacaccgctagagatctgctgtactacgccgtgacccaggatgccatgctgatcttcgccaacctgagccggggcttcggccggcagggcaagcggaccttcatggccgagagacagtacacacggatggaggactggctgaccgccaagctggcctacgagggcctgagcaagacctacctgtccaagacactggcccagtacacctccaagacatgcagcaactgtgggtttaccatcaccagcgccgactacgacagggtgctggagaagctgaagaagacagcaacaggctggatgaccacaattaacggcaaggagctgaaggtggagggccagattacctactacaacagatacaagagacagaacgtagtcaaggacctgtccgtcgagctggatagactgagcgaagaatctgtgaacaacgacatctcctcctggacaaagggcagaagcggagaagctctgagcctcctgaagaaaagattctcccatagacccgtgcaggagaagttcgtgtgcctgaactgcggcttcgagacacacgcagccgagcaagccgccctgaacatcgccagatcctggctgttcctgcggagccaggagtacaagaaataccagacaaacaagacaaccggcaacaccgataagagagccttcgtcgagacctggcagtccttttaccggaagaagcttaaggaggtgtggaaacctgccgtgcggtctggcggatctggcggaggctccatggtgcacggcagcgtgaccttcagggacgtggccatcgacttcagccaggaggagtgggagtgcctgcagcccgaccagaggaccctgtacagggacgtgatgctggagaactacagccacctgatcagcctggccggcagcagcatcagcaagcccggcgtgatcaccctgctggagcaggagaaggagccctggatggtggtgaggaaggagaccagcaggtggtaccccgacctggagggcggcccaagcagcggcgcccctcctcccagcggcggcagcccagccggctccccaacctctaccgaggagggcacctctgagtccgccacccccgagagcggccctggcacctccaccgagcccagcgagggcagcgcacccggcagccctgccggcagccccacctccacagaggagggaaccagcaccgagcccagcgaaggcagcgccccaggcaccagcaccgagcctagtgagcaggagattaaacggatcaacaagatcagaagaagacttgtgaaagacagcaacaccaagaaggccggcaagacaggccccatgaaaaccctgctggttagagtgatgacacccgatctgagagagcggctggaaaacctgagaaagaagcctgaaaatatcccccagcccatcagcaatacatctagagccaacctgaataagctgctgaccgattacaccgaaatgaagaaggcgatcctgcatgtgtactgggaagagttccagaaggaccctgtgggcctgatgagccgggtggcccagcctgccagcaagaagatcgatcagaacaagctgaaacctgagatggacgagaagggcaacctgaccaccgccggctttgcctgctctcagtgtggccagcccctgttcgtgtacaagctggagcaggtgtctgagaagggcaaggcttacaccaactacttcggacggtgcaatgtggccgagcacgaaaagctgatcctgctggcccagctgaagcccgagaaggatagcgacgaagccgtgacatatagcctgggaaagtttgggcagagggccctggatttctacagcattcatgtgaccaaggagtccacccaccccgtgaagcccctggcccagatcgccggaaacagatacgcctccggacctgtgggaaaggccctgagcgacgcatgtatgggcacaatcgcctccttcctgtctaagtaccaggacatcatcatcgaacaccagaaggtggtgaagggcaaccagaagagactggagagcctgcgggagctggccggcaaggaaaacctggaataccctagcgtgaccctgccacctcagcctcacaccaaggagggcgttgatgcctacaacgaagtgatcgcccgggtgcgaatgtgggtgaacctgaacctgtggcagaagctgaagctaagcagagatgatgccaagcctctgctgagactgaagggattcccttcctttcctctggtcgagagacaggccaacgaagtggactggtgggacatggtgtgtaacgtgaagaagctgatcaacgagaaaaaggaggatggcaaggtgttttggcagaatctggctggctacaagagacaggaagccctgagaccatacctgagcagcgaggaagatcggaagaagggaaagaaattcgctcggtaccagctgggcgacctgctgctgcacctggaaaagaagcacggcgaggactggggaaaggtgtacgacgaggcctgggagcggattgacaagaaagtggaaggcctgagcaagcacatcaagctggaagaggaacggagaagcgaggacgcccagagcaaggccgccctgaccgactggctgcgggctaaggccagcttcgtgatcgagggcctgaaggaggccgacaaggacgagttctgcagatgcgagctgaagctgcagaagtggtacggggacctgcggggaaagcccttcgccatcgaagccgagaacagcatcctggacatcagcggcttcagcaagcagtacaactgtgccttcatctggcagaaggacggcgtgaagaagctgaacctgtacctgatcatcaactacttcaagggcggcaagctgcggttcaagaagatcaaacctgaagccttcgaagccaacagattctacaccgtgatcaacaaaaagagcggcgagatcgtgcccatggaggtgaacttcaacttcgacgaccccaacctgatcatcctgcctctggcctttggcaagagacagggcagagaattcatctggaacgacctgctgtccctggaaaccggcagcctgaagctggccaacggaagagtgatcgagaagacactgtacaacagaagaacccggcaggatgagcctgccctgttcgtggccctgaccttcgagcggcgggaggtcctggactcctccaatatcaaaccaatgaacctgatcggcgtggcaagaggcgaaaacatccccgccgtgatcgccctgaccgaccccgagggctgcccactgagccggtttaaggatagcctgggaaacccaacccacatcctgagaatcggcgagagctataaggagaagcagcggaccatccaggccaagaaggaggtggagcagcggagagccggcggctacagccggaagtacgccagcaaagccaagaatctggcagacgatatggtgagaaacaccgctagagatctgctgtactacgccgtgacccaggatgccatgctgatcttcgccaacctgagccggggcttcggccggcagggcaagcggaccttcatggccgagagacagtacacacggatggaggactggctgaccgccaagctggcctacgagggcctgagcaagacctacctgtccaagacactggcccagtacacctccaagacatgcagcaactgtgggtttaccatcaccagcgccgactacgacagggtgctggagaagctgaagaagacagcaacaggctggatgaccacaattaacggcaaggagctgaaggtggagggccagattacctactacaacagatacaagagacagaacgtagtcaaggacctgtccgtcgagctggatagactgagcgaagaatctgtgaacaacgacatctcctcctggacaaagggcagaagcggagaagctctgagcctcctgaagaaaagattctcccatagacccgtgcaggagaagttcgtgtgcctgaactgcggcttcgagacacacgcagccgagcaagccgccctgaacatcgccagatcctggctgttcctgcggagccaggagtacaagaaataccagacaaacaagacaaccggcaacaccgataagagagccttcgtcgagacctggcagtccttttaccggaagaagcttaaggaggtgtggaaacctgccgtgcggtctggcggatctggcggaggctcctatggtgcacggcagcgtgaccttcagggacgtggccatcgacttcagccaggaggagtgggagtgcctgcagcccgaccagaggaccctgtacagggacgtgatgctggagaactacagccacctgatcagcctggccggcagcagcatcagcaagcccggcgtgatcaccctgctggagcaggagaaggagccctggatggtggtgaggaaggagaccagcaggtggtaccccgacctggagggatctggctccggcagcggccccaagaaaaagagaaaagtctaagctgccttctgcggggcttgccttctggccatgcccttcttctctcccttgcacctgtacctcttggtctttgaataaagcctgagtaggaaggctagcaaaaaaaaaaaaaaaaaaaaaaaaaaaaaaaaaaaaaaaaaaaaaaaaaaaaaaaaaaaaaaaaaaaaaaaaaaaaaaaa

SEQ ID NO: 15941 - RNA, 9485 nt, synthetic construct
  source 1..9485: mol_type = other RNA
aggaaataagagagaaaagaagagtaagaagaaatataagagccaccatggcccctaagaagaagcgtaaagtgagccggatggaacgcctcgtctacgaggtgcggcagaagtgcagaaacatcgaggacatctgcatctcctgcggatctctgaacgtgaccctggagcacccactgttcatcggcggcatgtgccagaactgtaaaaactgttttctggagtgtgcctatcaatacgacgatgacggctaccagagctactgcaccatctgttgcggcggaagagaggtgctgatgtgtggaaataacaactgctgccggtgcttctgcgtggaatgcgtggacctgctggtgggccccggcgccgcccaggccgctattaaggaagatccttggaactgctacatgtgcggccacaagggcacatacggcctgctgagacggagagaggactggcctagcagactgcagatgttcttcgccaataaccacgaccaggagttcgacccccctaaggtgtaccctcccgtccccgccgagaagagaaagcccatccgggtcctgagcctgttcgatggcatcgccaccggtctgctggtgctgaaggacctgggcatccaggtggataggtacattgcctccgaggtgtgcgaggactccatcaccgtgggaatggtgcgtcatcagggcaagatcatgtacgtgggcgacgtgcggagcgtgacacagaagcatatccaggagtggggccctttcgacctggtgatcggcggcagcccttgcaatgacctgagcatcgtgaacccagcccggaagggcctgtacgagggaaccggcagactgttcttcgagttttacagactgctgcacgacgcccggcctaaggaaggcgacgaccggcccttcttttggctgttcgagaatgtggtggccatgggagtcagcgacaagcgggatattagccggttcctggagagcaaccccgtgatgatcgatgccaaggaagtgagcgccgcccaccgggccagatacttctggggcaatctgcctggcatgaacagacccctggccagcaccgtgaacgacaagctggagctgcaggagtgcctggagcacggccggatcgccaagttcagcaaggtgagaaccatcaccacccgaagcaacagcatcaaacaaggcaaggaccagcactttcctgtgttcatgaacgagaaggaggacatcctgtggtgtaccgagatggagagagtgttcgggttcccagtccactacacagatgtcagcaacatgtctagactggccagacagagactgctgggaagaagctggtccgtccctgtgatcagacacctgttcgcccctctgaaggagtacttcgcctgcgtgagcagcggcaacagcaacgccaacagccggggccccagcttctctagcggcctggtgccactgtccctgagagggagccacatgggccccatggagatctacaaaaccgtgagcgcctggaagcggcagcctgtgcgcgtgctgagcctgtttcggaatatcgataaagtcctgaaaagcctgggattcctggagagcggctctggctccggcggtggcaccctgaagtacgtggaggatgtgacaaacgtggtcagacgggatgtggagaagtggggccccttcgatctggtgtacggcagcacccaacccctgggcagctcttgtgaccggtgccctggctggtacatgtttcagttccaccggatcctgcagtacgccctgccgagacaggagtcccagcggccattcttttggattttcatggacaacttgctgctgaccgaggatgaccaggaaactaccactcggttcctgcagaccgaagccgtgaccctgcaggacgtgagaggccgggactaccagaacgccatgcgggtgtggtccaacatccctggactgaaaagcaagcacgcacctctgacccctaaagaagaggagtacctgcaggcccaggtgcggagcagaagcaagctggacgcccctaaggtggatctgctggtgaagaattgcctcctgcccctgagagagtacttcaagtatttcagccagaatagtctgcccctgggaggcagcggcggcggcgccctggtgacatttgaggacgtcgccgtgcggttcacccaggaggaatgggctctgctggatccttctcagaaaatcctgtaccgggacgtgatgagagagacataccggaatctgacctccgtgggcatcaactgggaatgttgggaccttgaagcctgcttcagaagcctgggaagaaacctgagagtgcaggtggtgaagagaaagtgcgagctgaccaacagcggcccctgcgccgagggcggcccaagcagcggcgcccctcctcccagcggcggcagcccagccggctccccaacctctaccgaggagggcacctctgagtccgccacccccgagagcggccctggcacctccaccgagcccagcgagggcagcgcacccggcagccctgccggcagccccacctccacagaggagggaaccagcaccgagcccagcgaaggcagcgccccaggcaccagcaccgagcctagtgagcaggagattaaacggatcaacaagatcagaagaagacttgtgaaagacagcaacaccaagaaggccggcaagacaggccccatgaaaaccctgctggttagagtgatgacacccgatctgagagagcggctggaaaacctgagaaagaagcctgaaaatatcccccagcccatcagcaatacatctagagccaacctgaataagctgctgaccgattacaccgaaatgaagaaggcgatcctgcatgtgtactgggaagagttccagaaggaccctgtgggcctgatgagccgggtggcccagcctgccagcaagaagatcgatcagaacaagctgaaacctgagatggacgagaagggcaacctgaccaccgccggctttgcctgctctcagtgtggccagcccctgttcgtgtacaagctggagcaggtgtctgagaagggcaaggcttacaccaactacttcggacggtgcaatgtggccgagcacgaaaagctgatcctgctggcccagctgaagcccgagaaggatagcgacgaagccgtgacatatagcctgggaaagtttgggcagagggccctggatttctacagcattcatgtgaccaaggagtccacccaccccgtgaagcccctggcccagatcgccggaaacagatacgcctccggacctgtgggaaaggccctgagcgacgcatgtatgggcacaatcgcctccttcctgtctaagtaccaggacatcatcatcgaacaccagaaggtggtgaagggcaaccagaagagactggagagcctgcgggagctggccggcaaggaaaacctggaataccctagcgtgaccctgccacctcagcctcacaccaaggagggcgttgatgcctacaacgaagtgatcgcccgggtgcgaatgtgggtgaacctgaacctgtggcagaagctgaagctaagcagagatgatgccaagcctctgctgagactgaagggattcccttcctttcctctggtcgagagacaggccaacgaagtggactggtgggacatggtgtgtaacgtgaagaagctgatcaacgagaaaaaggaggatggcaaggtgttttggcagaatctggctggctacaagagacaggaagccctgagaccatacctgagcagcgaggaagatcggaagaagggaaagaaattcgctcggtaccagctgggcgacctgctgctgcacctggaaaagaagcacggcgaggactggggaaaggtgtacgacgaggcctgggagcggattgacaagaaagtggaaggcctgagcaagcacatcaagctggaagaggaacggagaagcgaggacgcccagagcaaggccgccctgaccgactggctgcgggctaaggccagcttcgtgatcgagggcctgaaggaggccgacaaggacgagttctgcagatgcgagctgaagctgcagaagtggtacggggacctgcggggaaagcccttcgccatcgaagccgagaacagcatcctggacatcagcggcttcagcaagcagtacaactgtgccttcatctggcagaaggacggcgtgaagaagctgaacctgtacctgatcatcaactacttcaagggcggcaagctgcggttcaagaagatcaaacctgaagccttcgaagccaacagattctacaccgtgatcaacaaaaagagcggcgagatcgtgcccatggaggtgaacttcaacttcgacgaccccaacctgatcatcctgcctctggcctttggcaagagacagggcagagaattcatctggaacgacctgctgtccctggaaaccggcagcctgaagctggccaacggaagagtgatcgagaagacactgtacaacagaagaacccggcaggatgagcctgccctgttcgtggccctgaccttcgagcggcgggaggtcctggactcctccaatatcaaaccaatgaacctgatcggcgtggcaagaggcgaaaacatccccgccgtgatcgccctgaccgaccccgagggctgcccactgagccggtttaaggatagcctgggaaacccaacccacatcctgagaatcggcgagagctataaggagaagcagcggaccatccaggccaagaaggaggtggagcagcggagagccggcggctacagccggaagtacgccagcaaagccaagaatctggcagacgatatggtgagaaacaccgctagagatctgctgtactacgccgtgacccaggatgccatgctgatcttcgccaacctgagccggggcttcggccggcagggcaagcggaccttcatggccgagagacagtacacacggatggaggactggctgaccgccaagctggcctacgagggcctgagcaagacctacctgtccaagacactggcccagtacacctccaagacatgcagcaactgtgggtttaccatcaccagcgccgactacgacagggtgctggagaagctgaagaagacagcaacaggctggatgaccacaattaacggcaaggagctgaaggtggagggccagattacctactacaacagatacaagagacagaacgtagtcaaggacctgtccgtcgagctggatagactgagcgaagaatctgtgaacaacgacatctcctcctggacaaagggcagaagcggagaagctctgagcctcctgaagaaaagattctcccatagacccgtgcaggagaagttcgtgtgcctgaactgcggcttcgagacacacgcagccgagcaagccgccctgaacatcgccagatcctggctgttcctgcggagccaggagtacaagaaataccagacaaacaagacaaccggcaacaccgataagagagccttcgtcgagacctggcagtccttttaccggaagaagcttaaggaggtgtggaaacctgccgtgcggtctggcggatctggcggaggctccccccaggagctggtgaccttcagggacgtggccgtggacttcacccccgaggagtggggccagctgggccccgcccagaaggagctgtaccaggaggtgatgctggagaactacaggaacctggtgtgcctgggcctgaccgtgagcaagcccgacgtgatcagccagctggagcagggcgaggccccctggaggctggagggcggcagcgccaggggcaggtgcctggactggggcatgaggggcggcccaagcagcggcgcccctcctcccagcggcggcagcccagccggctccccaacctctaccgaggagggcacctctgagtccgccacccccgagagcggccctggcacctccaccgagcccagcgagggcagcgcacccggcagccctgccggcagccccacctccacagaggagggaaccagcaccgagcccagcgaaggcagcgccccaggcaccagcaccgagcctagtgagcaggagattaaacggatcaacaagatcagaagaagacttgtgaaagacagcaacaccaagaaggccggcaagacaggccccatgaaaaccctgctggttagagtgatgacacccgatctgagagagcggctggaaaacctgagaaagaagcctgaaaatatcccccagcccatcagcaatacatctagagccaacctgaataagctgctgaccgattacaccgaaatgaagaaggcgatcctgcatgtgtactgggaagagttccagaaggaccctgtgggcctgatgagccgggtggcccagcctgccagcaagaagatcgatcagaacaagctgaaacctgagatggacgagaagggcaacctgaccaccgccggctttgcctgctctcagtgtggccagcccctgttcgtgtacaagctggagcaggtgtctgagaagggcaaggcttacaccaactacttcggacggtgcaatgtggccgagcacgaaaagctgatcctgctggcccagctgaagcccgagaaggatagcgacgaagccgtgacatatagcctgggaaagtttgggcagagggccctggatttctacagcattcatgtgaccaaggagtccacccaccccgtgaagcccctggcccagatcgccggaaacagatacgcctccggacctgtgggaaaggccctgagcgacgcatgtatgggcacaatcgcctccttcctgtctaagtaccaggacatcatcatcgaacaccagaaggtggtgaagggcaaccagaagagactggagagcctgcgggagctggccggcaaggaaaacctggaataccctagcgtgaccctgccacctcagcctcacaccaaggagggcgttgatgcctacaacgaagtgatcgcccgggtgcgaatgtgggtgaacctgaacctgtggcagaagctgaagctaagcagagatgatgccaagcctctgctgagactgaagggattcccttcctttcctctggtcgagagacaggccaacgaagtggactggtgggacatggtgtgtaacgtgaagaagctgatcaacgagaaaaaggaggatggcaaggtgttttggcagaatctggctggctacaagagacaggaagccctgagaccatacctgagcagcgaggaagatcggaagaagggaaagaaattcgctcggtaccagctgggcgacctgctgctgcacctggaaaagaagcacggcgaggactggggaaaggtgtacgacgaggcctgggagcggattgacaagaaagtggaaggcctgagcaagcacatcaagctggaagaggaacggagaagcgaggacgcccagagcaaggccgccctgaccgactggctgcgggctaaggccagcttcgtgatcgagggcctgaaggaggccgacaaggacgagttctgcagatgcgagctgaagctgcagaagtggtacggggacctgcggggaaagcccttcgccatcgaagccgagaacagcatcctggacatcagcggcttcagcaagcagtacaactgtgccttcatctggcagaaggacggcgtgaagaagctgaacctgtacctgatcatcaactacttcaagggcggcaagctgcggttcaagaagatcaaacctgaagccttcgaagccaacagattctacaccgtgatcaacaaaaagagcggcgagatcgtgcccatggaggtgaacttcaacttcgacgaccccaacctgatcatcctgcctctggcctttggcaagagacagggcagagaattcatctggaacgacctgctgtccctggaaaccggcagcctgaagctggccaacggaagagtgatcgagaagacactgtacaacagaagaacccggcaggatgagcctgccctgttcgtggccctgaccttcgagcggcgggaggtcctggactcctccaatatcaaaccaatgaacctgatcggcgtggcaagaggcgaaaacatccccgccgtgatcgccctgaccgaccccgagggctgcccactgagccggtttaaggatagcctgggaaacccaacccacatcctgagaatcggcgagagctataaggagaagcagcggaccatccaggccaagaaggaggtggagcagcggagagccggcggctacagccggaagtacgccagcaaagccaagaatctggcagacgatatggtgagaaacaccgctagagatctgctgtactacgccgtgacccaggatgccatgctgatcttcgccaacctgagccggggcttcggccggcagggcaagcggaccttcatggccgagagacagtacacacggatggaggactggctgaccgccaagctggcctacgagggcctgagcaagacctacctgtccaagacactggcccagtacacctccaagacatgcagcaactgtgggtttaccatcaccagcgccgactacgacagggtgctggagaagctgaagaagacagcaacaggctggatgaccacaattaacggcaaggagctgaaggtggagggccagattacctactacaacagatacaagagacagaacgtagtcaaggacctgtccgtcgagctggatagactgagcgaagaatctgtgaacaacgacatctcctcctggacaaagggcagaagcggagaagctctgagcctcctgaagaaaagattctcccatagacccgtgcaggagaagttcgtgtgcctgaactgcggcttcgagacacacgcagccgagcaagccgccctgaacatcgccagatcctggctgttcctgcggagccaggagtacaagaaataccagacaaacaagacaaccggcaacaccgataagagagccttcgtcgagacctggcagtccttttaccggaagaagcttaaggaggtgtggaaacctgccgtgcggtctggcggatctggcggaggctcctccccaggagctggtgaccttcagggacgtggccgtggacttcacccccgaggagtggggccagctgggccccgcccagaaggagctgtaccaggaggtgatgctggagaactacaggaacctggtgtgcctgggcctgaccgtgagcaagcccgacgtgatcagccagctggagcagggcgaggccccctggaggctggagggcggcagcgccaggggcaggtgcctggactggggcatgaggggatctggctccggcagcggccccaagaaaaagagaaaagtctaagctgccttctgcggggcttgccttctggccatgcccttcttctctcccttgcacctgtacctcttggtctttgaataaagcctgagtaggaaggctagcaaaaaaaaaaaaaaaaaaaaaaaaaaaaaaaaaaaaaaaaaaaaaaaaaaaaaaaaaaaaaaaaaaaaaaaaaaaaaaaa

SEQ ID NO: 15942 - RNA, 9485 nt, synthetic construct
  source 1..9485: mol_type = other RNA
aggaaataagagagaaaagaagagtaagaagaaatataagagccaccatggcccctaagaagaagcgtaaagtgagccggatggaacgcctcgtctacgaggtgcggcagaagtgcagaaacatcgaggacatctgcatctcctgcggatctctgaacgtgaccctggagcacccactgttcatcggcggcatgtgccagaactgtaaaaactgttttctggagtgtgcctatcaatacgacgatgacggctaccagagctactgcaccatctgttgcggcggaagagaggtgctgatgtgtggaaataacaactgctgccggtgcttctgcgtggaatgcgtggacctgctggtgggccccggcgccgcccaggccgctattaaggaagatccttggaactgctacatgtgcggccacaagggcacatacggcctgctgagacggagagaggactggcctagcagactgcagatgttcttcgccaataaccacgaccaggagttcgacccccctaaggtgtaccctcccgtccccgccgagaagagaaagcccatccgggtcctgagcctgttcgatggcatcgccaccggtctgctggtgctgaaggacctgggcatccaggtggataggtacattgcctccgaggtgtgcgaggactccatcaccgtgggaatggtgcgtcatcagggcaagatcatgtacgtgggcgacgtgcggagcgtgacacagaagcatatccaggagtggggccctttcgacctggtgatcggcggcagcccttgcaatgacctgagcatcgtgaacccagcccggaagggcctgtacgagggaaccggcagactgttcttcgagttttacagactgctgcacgacgcccggcctaaggaaggcgacgaccggcccttcttttggctgttcgagaatgtggtggccatgggagtcagcgacaagcgggatattagccggttcctggagagcaaccccgtgatgatcgatgccaaggaagtgagcgccgcccaccgggccagatacttctggggcaatctgcctggcatgaacagacccctggccagcaccgtgaacgacaagctggagctgcaggagtgcctggagcacggccggatcgccaagttcagcaaggtgagaaccatcaccacccgaagcaacagcatcaaacaaggcaaggaccagcactttcctgtgttcatgaacgagaaggaggacatcctgtggtgtaccgagatggagagagtgttcgggttcccagtccactacacagatgtcagcaacatgtctagactggccagacagagactgctgggaagaagctggtccgtccctgtgatcagacacctgttcgcccctctgaaggagtacttcgcctgcgtgagcagcggcaacagcaacgccaacagccggggccccagcttctctagcggcctggtgccactgtccctgagagggagccacatgggccccatggagatctacaaaaccgtgagcgcctggaagcggcagcctgtgcgcgtgctgagcctgtttcggaatatcgataaagtcctgaaaagcctgggattcctggagagcggctctggctccggcggtggcaccctgaagtacgtggaggatgtgacaaacgtggtcagacgggatgtggagaagtggggccccttcgatctggtgtacggcagcacccaacccctgggcagctcttgtgaccggtgccctggctggtacatgtttcagttccaccggatcctgcagtacgccctgccgagacaggagtcccagcggccattcttttggattttcatggacaacttgctgctgaccgaggatgaccaggaaactaccactcggttcctgcagaccgaagccgtgaccctgcaggacgtgagaggccgggactaccagaacgccatgcgggtgtggtccaacatccctggactgaaaagcaagcacgcacctctgacccctaaagaagaggagtacctgcaggcccaggtgcggagcagaagcaagctggacgcccctaaggtggatctgctggtgaagaattgcctcctgcccctgagagagtacttcaagtatttcagccagaatagtctgcccctgggaggcagcggcggcggcgccctggtgacatttgaggacgtcgccgtgcggttcacccaggaggaatgggctctgctggatccttctcagaaaatcctgtaccgggacgtgatgagagagacataccggaatctgacctccgtgggcatcaactgggaatgttgggaccttgaagcctgcttcagaagcctgggaagaaacctgagagtgcaggtggtgaagagaaagtgcgagctgaccaacagcggcccctgcgccgagggcggcccaagcagcggcgcccctcctcccagcggcggcagcccagccggctccccaacctctaccgaggagggcacctctgagtccgccacccccgagagcggccctggcacctccaccgagcccagcgagggcagcgcacccggcagccctgccggcagccccacctccacagaggagggaaccagcaccgagcccagcgaaggcagcgccccaggcaccagcaccgagcctagtgagcaggagattaaacggatcaacaagatcagaagaagacttgtgaaagacagcaacaccaagaaggccggcaagacaggccccatgaaaaccctgctggttagagtgatgacacccgatctgagagagcggctggaaaacctgagaaagaagcctgaaaatatcccccagcccatcagcaatacatctagagccaacctgaataagctgctgaccgattacaccgaaatgaagaaggcgatcctgcatgtgtactgggaagagttccagaaggaccctgtgggcctgatgagccgggtggcccagcctgccagcaagaagatcgatcagaacaagctgaaacctgagatggacgagaagggcaacctgaccaccgccggctttgcctgctctcagtgtggccagcccctgttcgtgtacaagctggagcaggtgtctgagaagggcaaggcttacaccaactacttcggacggtgcaatgtggccgagcacgaaaagctgatcctgctggcccagctgaagcccgagaaggatagcgacgaagccgtgacatatagcctgggaaagtttgggcagagggccctggatttctacagcattcatgtgaccaaggagtccacccaccccgtgaagcccctggcccagatcgccggaaacagatacgcctccggacctgtgggaaaggccctgagcgacgcatgtatgggcacaatcgcctccttcctgtctaagtaccaggacatcatcatcgaacaccagaaggtggtgaagggcaaccagaagagactggagagcctgcgggagctggccggcaaggaaaacctggaataccctagcgtgaccctgccacctcagcctcacaccaaggagggcgttgatgcctacaacgaagtgatcgcccgggtgcgaatgtgggtgaacctgaacctgtggcagaagctgaagctaagcagagatgatgccaagcctctgctgagactgaagggattcccttcctttcctctggtcgagagacaggccaacgaagtggactggtgggacatggtgtgtaacgtgaagaagctgatcaacgagaaaaaggaggatggcaaggtgttttggcagaatctggctggctacaagagacaggaagccctgagaccatacctgagcagcgaggaagatcggaagaagggaaagaaattcgctcggtaccagctgggcgacctgctgctgcacctggaaaagaagcacggcgaggactggggaaaggtgtacgacgaggcctgggagcggattgacaagaaagtggaaggcctgagcaagcacatcaagctggaagaggaacggagaagcgaggacgcccagagcaaggccgccctgaccgactggctgcgggctaaggccagcttcgtgatcgagggcctgaaggaggccgacaaggacgagttctgcagatgcgagctgaagctgcagaagtggtacggggacctgcggggaaagcccttcgccatcgaagccgagaacagcatcctggacatcagcggcttcagcaagcagtacaactgtgccttcatctggcagaaggacggcgtgaagaagctgaacctgtacctgatcatcaactacttcaagggcggcaagctgcggttcaagaagatcaaacctgaagccttcgaagccaacagattctacaccgtgatcaacaaaaagagcggcgagatcgtgcccatggaggtgaacttcaacttcgacgaccccaacctgatcatcctgcctctggcctttggcaagagacagggcagagaattcatctggaacgacctgctgtccctggaaaccggcagcctgaagctggccaacggaagagtgatcgagaagacactgtacaacagaagaacccggcaggatgagcctgccctgttcgtggccctgaccttcgagcggcgggaggtcctggactcctccaatatcaaaccaatgaacctgatcggcgtggcaagaggcgaaaacatccccgccgtgatcgccctgaccgaccccgagggctgcccactgagccggtttaaggatagcctgggaaacccaacccacatcctgagaatcggcgagagctataaggagaagcagcggaccatccaggccaagaaggaggtggagcagcggagagccggcggctacagccggaagtacgccagcaaagccaagaatctggcagacgatatggtgagaaacaccgctagagatctgctgtactacgccgtgacccaggatgccatgctgatcttcgccaacctgagccggggcttcggccggcagggcaagcggaccttcatggccgagagacagtacacacggatggaggactggctgaccgccaagctggcctacgagggcctgagcaagacctacctgtccaagacactggcccagtacacctccaagacatgcagcaactgtgggtttaccatcaccagcgccgactacgacagggtgctggagaagctgaagaagacagcaacaggctggatgaccacaattaacggcaaggagctgaaggtggagggccagattacctactacaacagatacaagagacagaacgtagtcaaggacctgtccgtcgagctggatagactgagcgaagaatctgtgaacaacgacatctcctcctggacaaagggcagaagcggagaagctctgagcctcctgaagaaaagattctcccatagacccgtgcaggagaagttcgtgtgcctgaactgcggcttcgagacacacgcagccgagcaagccgccctgaacatcgccagatcctggctgttcctgcggagccaggagtacaagaaataccagacaaacaagacaaccggcaacaccgataagagagccttcgtcgagacctggcagtccttttaccggaagaagcttaaggaggtgtggaaacctgccgtgcggtctggcggatctggcggaggctccaggaagaggggcagcctgaccctggaggacgtggccgtggacttcacctgggaggagtggcagctgctggcccccgcccagaaggccctgtaccaggaggtgatgctggagaactacggcaacctggtgttcgtgggctaccaggccagcaagcccgccgccctgagcaggctggagaggggcgagccctggcccgtggaggacgaggtgcacagccagctgtgccccgagatgaggaaggacggcggcccaagcagcggcgcccctcctcccagcggcggcagcccagccggctccccaacctctaccgaggagggcacctctgagtccgccacccccgagagcggccctggcacctccaccgagcccagcgagggcagcgcacccggcagccctgccggcagccccacctccacagaggagggaaccagcaccgagcccagcgaaggcagcgccccaggcaccagcaccgagcctagtgagcaggagattaaacggatcaacaagatcagaagaagacttgtgaaagacagcaacaccaagaaggccggcaagacaggccccatgaaaaccctgctggttagagtgatgacacccgatctgagagagcggctggaaaacctgagaaagaagcctgaaaatatcccccagcccatcagcaatacatctagagccaacctgaataagctgctgaccgattacaccgaaatgaagaaggcgatcctgcatgtgtactgggaagagttccagaaggaccctgtgggcctgatgagccgggtggcccagcctgccagcaagaagatcgatcagaacaagctgaaacctgagatggacgagaagggcaacctgaccaccgccggctttgcctgctctcagtgtggccagcccctgttcgtgtacaagctggagcaggtgtctgagaagggcaaggcttacaccaactacttcggacggtgcaatgtggccgagcacgaaaagctgatcctgctggcccagctgaagcccgagaaggatagcgacgaagccgtgacatatagcctgggaaagtttgggcagagggccctggatttctacagcattcatgtgaccaaggagtccacccaccccgtgaagcccctggcccagatcgccggaaacagatacgcctccggacctgtgggaaaggccctgagcgacgcatgtatgggcacaatcgcctccttcctgtctaagtaccaggacatcatcatcgaacaccagaaggtggtgaagggcaaccagaagagactggagagcctgcgggagctggccggcaaggaaaacctggaataccctagcgtgaccctgccacctcagcctcacaccaaggagggcgttgatgcctacaacgaagtgatcgcccgggtgcgaatgtgggtgaacctgaacctgtggcagaagctgaagctaagcagagatgatgccaagcctctgctgagactgaagggattcccttcctttcctctggtcgagagacaggccaacgaagtggactggtgggacatggtgtgtaacgtgaagaagctgatcaacgagaaaaaggaggatggcaaggtgttttggcagaatctggctggctacaagagacaggaagccctgagaccatacctgagcagcgaggaagatcggaagaagggaaagaaattcgctcggtaccagctgggcgacctgctgctgcacctggaaaagaagcacggcgaggactggggaaaggtgtacgacgaggcctgggagcggattgacaagaaagtggaaggcctgagcaagcacatcaagctggaagaggaacggagaagcgaggacgcccagagcaaggccgccctgaccgactggctgcgggctaaggccagcttcgtgatcgagggcctgaaggaggccgacaaggacgagttctgcagatgcgagctgaagctgcagaagtggtacggggacctgcggggaaagcccttcgccatcgaagccgagaacagcatcctggacatcagcggcttcagcaagcagtacaactgtgccttcatctggcagaaggacggcgtgaagaagctgaacctgtacctgatcatcaactacttcaagggcggcaagctgcggttcaagaagatcaaacctgaagccttcgaagccaacagattctacaccgtgatcaacaaaaagagcggcgagatcgtgcccatggaggtgaacttcaacttcgacgaccccaacctgatcatcctgcctctggcctttggcaagagacagggcagagaattcatctggaacgacctgctgtccctggaaaccggcagcctgaagctggccaacggaagagtgatcgagaagacactgtacaacagaagaacccggcaggatgagcctgccctgttcgtggccctgaccttcgagcggcgggaggtcctggactcctccaatatcaaaccaatgaacctgatcggcgtggcaagaggcgaaaacatccccgccgtgatcgccctgaccgaccccgagggctgcccactgagccggtttaaggatagcctgggaaacccaacccacatcctgagaatcggcgagagctataaggagaagcagcggaccatccaggccaagaaggaggtggagcagcggagagccggcggctacagccggaagtacgccagcaaagccaagaatctggcagacgatatggtgagaaacaccgctagagatctgctgtactacgccgtgacccaggatgccatgctgatcttcgccaacctgagccggggcttcggccggcagggcaagcggaccttcatggccgagagacagtacacacggatggaggactggctgaccgccaagctggcctacgagggcctgagcaagacctacctgtccaagacactggcccagtacacctccaagacatgcagcaactgtgggtttaccatcaccagcgccgactacgacagggtgctggagaagctgaagaagacagcaacaggctggatgaccacaattaacggcaaggagctgaaggtggagggccagattacctactacaacagatacaagagacagaacgtagtcaaggacctgtccgtcgagctggatagactgagcgaagaatctgtgaacaacgacatctcctcctggacaaagggcagaagcggagaagctctgagcctcctgaagaaaagattctcccatagacccgtgcaggagaagttcgtgtgcctgaactgcggcttcgagacacacgcagccgagcaagccgccctgaacatcgccagatcctggctgttcctgcggagccaggagtacaagaaataccagacaaacaagacaaccggcaacaccgataagagagccttcgtcgagacctggcagtccttttaccggaagaagcttaaggaggtgtggaaacctgccgtgcggtctggcggatctggcggaggctcctaggaagaggggcagcctgaccctggaggacgtggccgtggacttcacctgggaggagtggcagctgctggcccccgcccagaaggccctgtaccaggaggtgatgctggagaactacggcaacctggtgttcgtgggctaccaggccagcaagcccgccgccctgagcaggctggagaggggcgagccctggcccgtggaggacgaggtgcacagccagctgtgccccgagatgaggaaggacggatctggctccggcagcggccccaagaaaaagagaaaagtctaagctgccttctgcggggcttgccttctggccatgcccttcttctctcccttgcacctgtacctcttggtctttgaataaagcctgagtaggaaggctagcaaaaaaaaaaaaaaaaaaaaaaaaaaaaaaaaaaaaaaaaaaaaaaaaaaaaaaaaaaaaaaaaaaaaaaaaaaaaaaaa

SEQ ID NO: 15943 - RNA, 9485 nt, synthetic construct
  source 1..9485: mol_type = other RNA
aggaaataagagagaaaagaagagtaagaagaaatataagagccaccatggcccctaagaagaagcgtaaagtgagccggatggaacgcctcgtctacgaggtgcggcagaagtgcagaaacatcgaggacatctgcatctcctgcggatctctgaacgtgaccctggagcacccactgttcatcggcggcatgtgccagaactgtaaaaactgttttctggagtgtgcctatcaatacgacgatgacggctaccagagctactgcaccatctgttgcggcggaagagaggtgctgatgtgtggaaataacaactgctgccggtgcttctgcgtggaatgcgtggacctgctggtgggccccggcgccgcccaggccgctattaaggaagatccttggaactgctacatgtgcggccacaagggcacatacggcctgctgagacggagagaggactggcctagcagactgcagatgttcttcgccaataaccacgaccaggagttcgacccccctaaggtgtaccctcccgtccccgccgagaagagaaagcccatccgggtcctgagcctgttcgatggcatcgccaccggtctgctggtgctgaaggacctgggcatccaggtggataggtacattgcctccgaggtgtgcgaggactccatcaccgtgggaatggtgcgtcatcagggcaagatcatgtacgtgggcgacgtgcggagcgtgacacagaagcatatccaggagtggggccctttcgacctggtgatcggcggcagcccttgcaatgacctgagcatcgtgaacccagcccggaagggcctgtacgagggaaccggcagactgttcttcgagttttacagactgctgcacgacgcccggcctaaggaaggcgacgaccggcccttcttttggctgttcgagaatgtggtggccatgggagtcagcgacaagcgggatattagccggttcctggagagcaaccccgtgatgatcgatgccaaggaagtgagcgccgcccaccgggccagatacttctggggcaatctgcctggcatgaacagacccctggccagcaccgtgaacgacaagctggagctgcaggagtgcctggagcacggccggatcgccaagttcagcaaggtgagaaccatcaccacccgaagcaacagcatcaaacaaggcaaggaccagcactttcctgtgttcatgaacgagaaggaggacatcctgtggtgtaccgagatggagagagtgttcgggttcccagtccactacacagatgtcagcaacatgtctagactggccagacagagactgctgggaagaagctggtccgtccctgtgatcagacacctgttcgcccctctgaaggagtacttcgcctgcgtgagcagcggcaacagcaacgccaacagccggggccccagcttctctagcggcctggtgccactgtccctgagagggagccacatgggccccatggagatctacaaaaccgtgagcgcctggaagcggcagcctgtgcgcgtgctgagcctgtttcggaatatcgataaagtcctgaaaagcctgggattcctggagagcggctctggctccggcggtggcaccctgaagtacgtggaggatgtgacaaacgtggtcagacgggatgtggagaagtggggccccttcgatctggtgtacggcagcacccaacccctgggcagctcttgtgaccggtgccctggctggtacatgtttcagttccaccggatcctgcagtacgccctgccgagacaggagtcccagcggccattcttttggattttcatggacaacttgctgctgaccgaggatgaccaggaaactaccactcggttcctgcagaccgaagccgtgaccctgcaggacgtgagaggccgggactaccagaacgccatgcgggtgtggtccaacatccctggactgaaaagcaagcacgcacctctgacccctaaagaagaggagtacctgcaggcccaggtgcggagcagaagcaagctggacgcccctaaggtggatctgctggtgaagaattgcctcctgcccctgagagagtacttcaagtatttcagccagaatagtctgcccctgggaggcagcggcggcggcgccctggtgacatttgaggacgtcgccgtgcggttcacccaggaggaatgggctctgctggatccttctcagaaaatcctgtaccgggacgtgatgagagagacataccggaatctgacctccgtgggcatcaactgggaatgttgggaccttgaagcctgcttcagaagcctgggaagaaacctgagagtgcaggtggtgaagagaaagtgcgagctgaccaacagcggcccctgcgccgagggcggcccaagcagcggcgcccctcctcccagcggcggcagcccagccggctccccaacctctaccgaggagggcacctctgagtccgccacccccgagagcggccctggcacctccaccgagcccagcgagggcagcgcacccggcagccctgccggcagccccacctccacagaggagggaaccagcaccgagcccagcgaaggcagcgccccaggcaccagcaccgagcctagtgagcaggagattaaacggatcaacaagatcagaagaagacttgtgaaagacagcaacaccaagaaggccggcaagacaggccccatgaaaaccctgctggttagagtgatgacacccgatctgagagagcggctggaaaacctgagaaagaagcctgaaaatatcccccagcccatcagcaatacatctagagccaacctgaataagctgctgaccgattacaccgaaatgaagaaggcgatcctgcatgtgtactgggaagagttccagaaggaccctgtgggcctgatgagccgggtggcccagcctgccagcaagaagatcgatcagaacaagctgaaacctgagatggacgagaagggcaacctgaccaccgccggctttgcctgctctcagtgtggccagcccctgttcgtgtacaagctggagcaggtgtctgagaagggcaaggcttacaccaactacttcggacggtgcaatgtggccgagcacgaaaagctgatcctgctggcccagctgaagcccgagaaggatagcgacgaagccgtgacatatagcctgggaaagtttgggcagagggccctggatttctacagcattcatgtgaccaaggagtccacccaccccgtgaagcccctggcccagatcgccggaaacagatacgcctccggacctgtgggaaaggccctgagcgacgcatgtatgggcacaatcgcctccttcctgtctaagtaccaggacatcatcatcgaacaccagaaggtggtgaagggcaaccagaagagactggagagcctgcgggagctggccggcaaggaaaacctggaataccctagcgtgaccctgccacctcagcctcacaccaaggagggcgttgatgcctacaacgaagtgatcgcccgggtgcgaatgtgggtgaacctgaacctgtggcagaagctgaagctaagcagagatgatgccaagcctctgctgagactgaagggattcccttcctttcctctggtcgagagacaggccaacgaagtggactggtgggacatggtgtgtaacgtgaagaagctgatcaacgagaaaaaggaggatggcaaggtgttttggcagaatctggctggctacaagagacaggaagccctgagaccatacctgagcagcgaggaagatcggaagaagggaaagaaattcgctcggtaccagctgggcgacctgctgctgcacctggaaaagaagcacggcgaggactggggaaaggtgtacgacgaggcctgggagcggattgacaagaaagtggaaggcctgagcaagcacatcaagctggaagaggaacggagaagcgaggacgcccagagcaaggccgccctgaccgactggctgcgggctaaggccagcttcgtgatcgagggcctgaaggaggccgacaaggacgagttctgcagatgcgagctgaagctgcagaagtggtacggggacctgcggggaaagcccttcgccatcgaagccgagaacagcatcctggacatcagcggcttcagcaagcagtacaactgtgccttcatctggcagaaggacggcgtgaagaagctgaacctgtacctgatcatcaactacttcaagggcggcaagctgcggttcaagaagatcaaacctgaagccttcgaagccaacagattctacaccgtgatcaacaaaaagagcggcgagatcgtgcccatggaggtgaacttcaacttcgacgaccccaacctgatcatcctgcctctggcctttggcaagagacagggcagagaattcatctggaacgacctgctgtccctggaaaccggcagcctgaagctggccaacggaagagtgatcgagaagacactgtacaacagaagaacccggcaggatgagcctgccctgttcgtggccctgaccttcgagcggcgggaggtcctggactcctccaatatcaaaccaatgaacctgatcggcgtggcaagaggcgaaaacatccccgccgtgatcgccctgaccgaccccgagggctgcccactgagccggtttaaggatagcctgggaaacccaacccacatcctgagaatcggcgagagctataaggagaagcagcggaccatccaggccaagaaggaggtggagcagcggagagccggcggctacagccggaagtacgccagcaaagccaagaatctggcagacgatatggtgagaaacaccgctagagatctgctgtactacgccgtgacccaggatgccatgctgatcttcgccaacctgagccggggcttcggccggcagggcaagcggaccttcatggccgagagacagtacacacggatggaggactggctgaccgccaagctggcctacgagggcctgagcaagacctacctgtccaagacactggcccagtacacctccaagacatgcagcaactgtgggtttaccatcaccagcgccgactacgacagggtgctggagaagctgaagaagacagcaacaggctggatgaccacaattaacggcaaggagctgaaggtggagggccagattacctactacaacagatacaagagacagaacgtagtcaaggacctgtccgtcgagctggatagactgagcgaagaatctgtgaacaacgacatctcctcctggacaaagggcagaagcggagaagctctgagcctcctgaagaaaagattctcccatagacccgtgcaggagaagttcgtgtgcctgaactgcggcttcgagacacacgcagccgagcaagccgccctgaacatcgccagatcctggctgttcctgcggagccaggagtacaagaaataccagacaaacaagacaaccggcaacaccgataagagagccttcgtcgagacctggcagtccttttaccggaagaagcttaaggaggtgtggaaacctgccgtgcggtctggcggatctggcggaggctccccccaggagcaggtgaccttcagcgacgtggccgtggacttcaccgtggaggagtggggcaggctggcccccgcccagaaggagctgtacaggagcgtgatgctggagaactacaggaacctggtgtgcctgggcctggccgccagcagccccgacgtgatcggccagctggagaggggcgagggcccctggagggtggagggcaaggtgaggaagggcctgtgcgccgaccagaagaccagcggcggcccaagcagcggcgcccctcctcccagcggcggcagcccagccggctccccaacctctaccgaggagggcacctctgagtccgccacccccgagagcggccctggcacctccaccgagcccagcgagggcagcgcacccggcagccctgccggcagccccacctccacagaggagggaaccagcaccgagcccagcgaaggcagcgccccaggcaccagcaccgagcctagtgagcaggagattaaacggatcaacaagatcagaagaagacttgtgaaagacagcaacaccaagaaggccggcaagacaggccccatgaaaaccctgctggttagagtgatgacacccgatctgagagagcggctggaaaacctgagaaagaagcctgaaaatatcccccagcccatcagcaatacatctagagccaacctgaataagctgctgaccgattacaccgaaatgaagaaggcgatcctgcatgtgtactgggaagagttccagaaggaccctgtgggcctgatgagccgggtggcccagcctgccagcaagaagatcgatcagaacaagctgaaacctgagatggacgagaagggcaacctgaccaccgccggctttgcctgctctcagtgtggccagcccctgttcgtgtacaagctggagcaggtgtctgagaagggcaaggcttacaccaactacttcggacggtgcaatgtggccgagcacgaaaagctgatcctgctggcccagctgaagcccgagaaggatagcgacgaagccgtgacatatagcctgggaaagtttgggcagagggccctggatttctacagcattcatgtgaccaaggagtccacccaccccgtgaagcccctggcccagatcgccggaaacagatacgcctccggacctgtgggaaaggccctgagcgacgcatgtatgggcacaatcgcctccttcctgtctaagtaccaggacatcatcatcgaacaccagaaggtggtgaagggcaaccagaagagactggagagcctgcgggagctggccggcaaggaaaacctggaataccctagcgtgaccctgccacctcagcctcacaccaaggagggcgttgatgcctacaacgaagtgatcgcccgggtgcgaatgtgggtgaacctgaacctgtggcagaagctgaagctaagcagagatgatgccaagcctctgctgagactgaagggattcccttcctttcctctggtcgagagacaggccaacgaagtggactggtgggacatggtgtgtaacgtgaagaagctgatcaacgagaaaaaggaggatggcaaggtgttttggcagaatctggctggctacaagagacaggaagccctgagaccatacctgagcagcgaggaagatcggaagaagggaaagaaattcgctcggtaccagctgggcgacctgctgctgcacctggaaaagaagcacggcgaggactggggaaaggtgtacgacgaggcctgggagcggattgacaagaaagtggaaggcctgagcaagcacatcaagctggaagaggaacggagaagcgaggacgcccagagcaaggccgccctgaccgactggctgcgggctaaggccagcttcgtgatcgagggcctgaaggaggccgacaaggacgagttctgcagatgcgagctgaagctgcagaagtggtacggggacctgcggggaaagcccttcgccatcgaagccgagaacagcatcctggacatcagcggcttcagcaagcagtacaactgtgccttcatctggcagaaggacggcgtgaagaagctgaacctgtacctgatcatcaactacttcaagggcggcaagctgcggttcaagaagatcaaacctgaagccttcgaagccaacagattctacaccgtgatcaacaaaaagagcggcgagatcgtgcccatggaggtgaacttcaacttcgacgaccccaacctgatcatcctgcctctggcctttggcaagagacagggcagagaattcatctggaacgacctgctgtccctggaaaccggcagcctgaagctggccaacggaagagtgatcgagaagacactgtacaacagaagaacccggcaggatgagcctgccctgttcgtggccctgaccttcgagcggcgggaggtcctggactcctccaatatcaaaccaatgaacctgatcggcgtggcaagaggcgaaaacatccccgccgtgatcgccctgaccgaccccgagggctgcccactgagccggtttaaggatagcctgggaaacccaacccacatcctgagaatcggcgagagctataaggagaagcagcggaccatccaggccaagaaggaggtggagcagcggagagccggcggctacagccggaagtacgccagcaaagccaagaatctggcagacgatatggtgagaaacaccgctagagatctgctgtactacgccgtgacccaggatgccatgctgatcttcgccaacctgagccggggcttcggccggcagggcaagcggaccttcatggccgagagacagtacacacggatggaggactggctgaccgccaagctggcctacgagggcctgagcaagacctacctgtccaagacactggcccagtacacctccaagacatgcagcaactgtgggtttaccatcaccagcgccgactacgacagggtgctggagaagctgaagaagacagcaacaggctggatgaccacaattaacggcaaggagctgaaggtggagggccagattacctactacaacagatacaagagacagaacgtagtcaaggacctgtccgtcgagctggatagactgagcgaagaatctgtgaacaacgacatctcctcctggacaaagggcagaagcggagaagctctgagcctcctgaagaaaagattctcccatagacccgtgcaggagaagttcgtgtgcctgaactgcggcttcgagacacacgcagccgagcaagccgccctgaacatcgccagatcctggctgttcctgcggagccaggagtacaagaaataccagacaaacaagacaaccggcaacaccgataagagagccttcgtcgagacctggcagtccttttaccggaagaagcttaaggaggtgtggaaacctgccgtgcggtctggcggatctggcggaggctcctccccaggagcaggtgaccttcagcgacgtggccgtggacttcaccgtggaggagtggggcaggctggcccccgcccagaaggagctgtacaggagcgtgatgctggagaactacaggaacctggtgtgcctgggcctggccgccagcagccccgacgtgatcggccagctggagaggggcgagggcccctggagggtggagggcaaggtgaggaagggcctgtgcgccgaccagaagaccagcggatctggctccggcagcggccccaagaaaaagagaaaagtctaagctgccttctgcggggcttgccttctggccatgcccttcttctctcccttgcacctgtacctcttggtctttgaataaagcctgagtaggaaggctagcaaaaaaaaaaaaaaaaaaaaaaaaaaaaaaaaaaaaaaaaaaaaaaaaaaaaaaaaaaaaaaaaaaaaaaaaaaaaaaaa

SEQ ID NO: 15944 - RNA, 9485 nt, synthetic construct
  source 1..9485: mol_type = other RNA
aggaaataagagagaaaagaagagtaagaagaaatataagagccaccatggcccctaagaagaagcgtaaagtgagccggatggaacgcctcgtctacgaggtgcggcagaagtgcagaaacatcgaggacatctgcatctcctgcggatctctgaacgtgaccctggagcacccactgttcatcggcggcatgtgccagaactgtaaaaactgttttctggagtgtgcctatcaatacgacgatgacggctaccagagctactgcaccatctgttgcggcggaagagaggtgctgatgtgtggaaataacaactgctgccggtgcttctgcgtggaatgcgtggacctgctggtgggccccggcgccgcccaggccgctattaaggaagatccttggaactgctacatgtgcggccacaagggcacatacggcctgctgagacggagagaggactggcctagcagactgcagatgttcttcgccaataaccacgaccaggagttcgacccccctaaggtgtaccctcccgtccccgccgagaagagaaagcccatccgggtcctgagcctgttcgatggcatcgccaccggtctgctggtgctgaaggacctgggcatccaggtggataggtacattgcctccgaggtgtgcgaggactccatcaccgtgggaatggtgcgtcatcagggcaagatcatgtacgtgggcgacgtgcggagcgtgacacagaagcatatccaggagtggggccctttcgacctggtgatcggcggcagcccttgcaatgacctgagcatcgtgaacccagcccggaagggcctgtacgagggaaccggcagactgttcttcgagttttacagactgctgcacgacgcccggcctaaggaaggcgacgaccggcccttcttttggctgttcgagaatgtggtggccatgggagtcagcgacaagcgggatattagccggttcctggagagcaaccccgtgatgatcgatgccaaggaagtgagcgccgcccaccgggccagatacttctggggcaatctgcctggcatgaacagacccctggccagcaccgtgaacgacaagctggagctgcaggagtgcctggagcacggccggatcgccaagttcagcaaggtgagaaccatcaccacccgaagcaacagcatcaaacaaggcaaggaccagcactttcctgtgttcatgaacgagaaggaggacatcctgtggtgtaccgagatggagagagtgttcgggttcccagtccactacacagatgtcagcaacatgtctagactggccagacagagactgctgggaagaagctggtccgtccctgtgatcagacacctgttcgcccctctgaaggagtacttcgcctgcgtgagcagcggcaacagcaacgccaacagccggggccccagcttctctagcggcctggtgccactgtccctgagagggagccacatgggccccatggagatctacaaaaccgtgagcgcctggaagcggcagcctgtgcgcgtgctgagcctgtttcggaatatcgataaagtcctgaaaagcctgggattcctggagagcggctctggctccggcggtggcaccctgaagtacgtggaggatgtgacaaacgtggtcagacgggatgtggagaagtggggccccttcgatctggtgtacggcagcacccaacccctgggcagctcttgtgaccggtgccctggctggtacatgtttcagttccaccggatcctgcagtacgccctgccgagacaggagtcccagcggccattcttttggattttcatggacaacttgctgctgaccgaggatgaccaggaaactaccactcggttcctgcagaccgaagccgtgaccctgcaggacgtgagaggccgggactaccagaacgccatgcgggtgtggtccaacatccctggactgaaaagcaagcacgcacctctgacccctaaagaagaggagtacctgcaggcccaggtgcggagcagaagcaagctggacgcccctaaggtggatctgctggtgaagaattgcctcctgcccctgagagagtacttcaagtatttcagccagaatagtctgcccctgggaggcagcggcggcggcgccctggtgacatttgaggacgtcgccgtgcggttcacccaggaggaatgggctctgctggatccttctcagaaaatcctgtaccgggacgtgatgagagagacataccggaatctgacctccgtgggcatcaactgggaatgttgggaccttgaagcctgcttcagaagcctgggaagaaacctgagagtgcaggtggtgaagagaaagtgcgagctgaccaacagcggcccctgcgccgagggcggcccaagcagcggcgcccctcctcccagcggcggcagcccagccggctccccaacctctaccgaggagggcacctctgagtccgccacccccgagagcggccctggcacctccaccgagcccagcgagggcagcgcacccggcagccctgccggcagccccacctccacagaggagggaaccagcaccgagcccagcgaaggcagcgccccaggcaccagcaccgagcctagtgagcaggagattaaacggatcaacaagatcagaagaagacttgtgaaagacagcaacaccaagaaggccggcaagacaggccccatgaaaaccctgctggttagagtgatgacacccgatctgagagagcggctggaaaacctgagaaagaagcctgaaaatatcccccagcccatcagcaatacatctagagccaacctgaataagctgctgaccgattacaccgaaatgaagaaggcgatcctgcatgtgtactgggaagagttccagaaggaccctgtgggcctgatgagccgggtggcccagcctgccagcaagaagatcgatcagaacaagctgaaacctgagatggacgagaagggcaacctgaccaccgccggctttgcctgctctcagtgtggccagcccctgttcgtgtacaagctggagcaggtgtctgagaagggcaaggcttacaccaactacttcggacggtgcaatgtggccgagcacgaaaagctgatcctgctggcccagctgaagcccgagaaggatagcgacgaagccgtgacatatagcctgggaaagtttgggcagagggccctggatttctacagcattcatgtgaccaaggagtccacccaccccgtgaagcccctggcccagatcgccggaaacagatacgcctccggacctgtgggaaaggccctgagcgacgcatgtatgggcacaatcgcctccttcctgtctaagtaccaggacatcatcatcgaacaccagaaggtggtgaagggcaaccagaagagactggagagcctgcgggagctggccggcaaggaaaacctggaataccctagcgtgaccctgccacctcagcctcacaccaaggagggcgttgatgcctacaacgaagtgatcgcccgggtgcgaatgtgggtgaacctgaacctgtggcagaagctgaagctaagcagagatgatgccaagcctctgctgagactgaagggattcccttcctttcctctggtcgagagacaggccaacgaagtggactggtgggacatggtgtgtaacgtgaagaagctgatcaacgagaaaaaggaggatggcaaggtgttttggcagaatctggctggctacaagagacaggaagccctgagaccatacctgagcagcgaggaagatcggaagaagggaaagaaattcgctcggtaccagctgggcgacctgctgctgcacctggaaaagaagcacggcgaggactggggaaaggtgtacgacgaggcctgggagcggattgacaagaaagtggaaggcctgagcaagcacatcaagctggaagaggaacggagaagcgaggacgcccagagcaaggccgccctgaccgactggctgcgggctaaggccagcttcgtgatcgagggcctgaaggaggccgacaaggacgagttctgcagatgcgagctgaagctgcagaagtggtacggggacctgcggggaaagcccttcgccatcgaagccgagaacagcatcctggacatcagcggcttcagcaagcagtacaactgtgccttcatctggcagaaggacggcgtgaagaagctgaacctgtacctgatcatcaactacttcaagggcggcaagctgcggttcaagaagatcaaacctgaagccttcgaagccaacagattctacaccgtgatcaacaaaaagagcggcgagatcgtgcccatggaggtgaacttcaacttcgacgaccccaacctgatcatcctgcctctggcctttggcaagagacagggcagagaattcatctggaacgacctgctgtccctggaaaccggcagcctgaagctggccaacggaagagtgatcgagaagacactgtacaacagaagaacccggcaggatgagcctgccctgttcgtggccctgaccttcgagcggcgggaggtcctggactcctccaatatcaaaccaatgaacctgatcggcgtggcaagaggcgaaaacatccccgccgtgatcgccctgaccgaccccgagggctgcccactgagccggtttaaggatagcctgggaaacccaacccacatcctgagaatcggcgagagctataaggagaagcagcggaccatccaggccaagaaggaggtggagcagcggagagccggcggctacagccggaagtacgccagcaaagccaagaatctggcagacgatatggtgagaaacaccgctagagatctgctgtactacgccgtgacccaggatgccatgctgatcttcgccaacctgagccggggcttcggccggcagggcaagcggaccttcatggccgagagacagtacacacggatggaggactggctgaccgccaagctggcctacgagggcctgagcaagacctacctgtccaagacactggcccagtacacctccaagacatgcagcaactgtgggtttaccatcaccagcgccgactacgacagggtgctggagaagctgaagaagacagcaacaggctggatgaccacaattaacggcaaggagctgaaggtggagggccagattacctactacaacagatacaagagacagaacgtagtcaaggacctgtccgtcgagctggatagactgagcgaagaatctgtgaacaacgacatctcctcctggacaaagggcagaagcggagaagctctgagcctcctgaagaaaagattctcccatagacccgtgcaggagaagttcgtgtgcctgaactgcggcttcgagacacacgcagccgagcaagccgccctgaacatcgccagatcctggctgttcctgcggagccaggagtacaagaaataccagacaaacaagacaaccggcaacaccgataagagagccttcgtcgagacctggcagtccttttaccggaagaagcttaaggaggtgtggaaacctgccgtgcggtctggcggatctggcggaggctccatggccgccggccagagggaggccaggccccaggtgagcctgaccttcgaggacgtggccgtgctgttcaccagggacgagtggaggaagctggcccccagccagaggaacctgtacagggacgtgatgctggagaactacaggaacctgctgagcctgggcctgcccttcaccaagccccaggtgatcagcctgctgcagcagggcgaggacccctgggaggtggagaaggagggcagcggcggcggcccaagcagcggcgcccctcctcccagcggcggcagcccagccggctccccaacctctaccgaggagggcacctctgagtccgccacccccgagagcggccctggcacctccaccgagcccagcgagggcagcgcacccggcagccctgccggcagccccacctccacagaggagggaaccagcaccgagcccagcgaaggcagcgccccaggcaccagcaccgagcctagtgagcaggagattaaacggatcaacaagatcagaagaagacttgtgaaagacagcaacaccaagaaggccggcaagacaggccccatgaaaaccctgctggttagagtgatgacacccgatctgagagagcggctggaaaacctgagaaagaagcctgaaaatatcccccagcccatcagcaatacatctagagccaacctgaataagctgctgaccgattacaccgaaatgaagaaggcgatcctgcatgtgtactgggaagagttccagaaggaccctgtgggcctgatgagccgggtggcccagcctgccagcaagaagatcgatcagaacaagctgaaacctgagatggacgagaagggcaacctgaccaccgccggctttgcctgctctcagtgtggccagcccctgttcgtgtacaagctggagcaggtgtctgagaagggcaaggcttacaccaactacttcggacggtgcaatgtggccgagcacgaaaagctgatcctgctggcccagctgaagcccgagaaggatagcgacgaagccgtgacatatagcctgggaaagtttgggcagagggccctggatttctacagcattcatgtgaccaaggagtccacccaccccgtgaagcccctggcccagatcgccggaaacagatacgcctccggacctgtgggaaaggccctgagcgacgcatgtatgggcacaatcgcctccttcctgtctaagtaccaggacatcatcatcgaacaccagaaggtggtgaagggcaaccagaagagactggagagcctgcgggagctggccggcaaggaaaacctggaataccctagcgtgaccctgccacctcagcctcacaccaaggagggcgttgatgcctacaacgaagtgatcgcccgggtgcgaatgtgggtgaacctgaacctgtggcagaagctgaagctaagcagagatgatgccaagcctctgctgagactgaagggattcccttcctttcctctggtcgagagacaggccaacgaagtggactggtgggacatggtgtgtaacgtgaagaagctgatcaacgagaaaaaggaggatggcaaggtgttttggcagaatctggctggctacaagagacaggaagccctgagaccatacctgagcagcgaggaagatcggaagaagggaaagaaattcgctcggtaccagctgggcgacctgctgctgcacctggaaaagaagcacggcgaggactggggaaaggtgtacgacgaggcctgggagcggattgacaagaaagtggaaggcctgagcaagcacatcaagctggaagaggaacggagaagcgaggacgcccagagcaaggccgccctgaccgactggctgcgggctaaggccagcttcgtgatcgagggcctgaaggaggccgacaaggacgagttctgcagatgcgagctgaagctgcagaagtggtacggggacctgcggggaaagcccttcgccatcgaagccgagaacagcatcctggacatcagcggcttcagcaagcagtacaactgtgccttcatctggcagaaggacggcgtgaagaagctgaacctgtacctgatcatcaactacttcaagggcggcaagctgcggttcaagaagatcaaacctgaagccttcgaagccaacagattctacaccgtgatcaacaaaaagagcggcgagatcgtgcccatggaggtgaacttcaacttcgacgaccccaacctgatcatcctgcctctggcctttggcaagagacagggcagagaattcatctggaacgacctgctgtccctggaaaccggcagcctgaagctggccaacggaagagtgatcgagaagacactgtacaacagaagaacccggcaggatgagcctgccctgttcgtggccctgaccttcgagcggcgggaggtcctggactcctccaatatcaaaccaatgaacctgatcggcgtggcaagaggcgaaaacatccccgccgtgatcgccctgaccgaccccgagggctgcccactgagccggtttaaggatagcctgggaaacccaacccacatcctgagaatcggcgagagctataaggagaagcagcggaccatccaggccaagaaggaggtggagcagcggagagccggcggctacagccggaagtacgccagcaaagccaagaatctggcagacgatatggtgagaaacaccgctagagatctgctgtactacgccgtgacccaggatgccatgctgatcttcgccaacctgagccggggcttcggccggcagggcaagcggaccttcatggccgagagacagtacacacggatggaggactggctgaccgccaagctggcctacgagggcctgagcaagacctacctgtccaagacactggcccagtacacctccaagacatgcagcaactgtgggtttaccatcaccagcgccgactacgacagggtgctggagaagctgaagaagacagcaacaggctggatgaccacaattaacggcaaggagctgaaggtggagggccagattacctactacaacagatacaagagacagaacgtagtcaaggacctgtccgtcgagctggatagactgagcgaagaatctgtgaacaacgacatctcctcctggacaaagggcagaagcggagaagctctgagcctcctgaagaaaagattctcccatagacccgtgcaggagaagttcgtgtgcctgaactgcggcttcgagacacacgcagccgagcaagccgccctgaacatcgccagatcctggctgttcctgcggagccaggagtacaagaaataccagacaaacaagacaaccggcaacaccgataagagagccttcgtcgagacctggcagtccttttaccggaagaagcttaaggaggtgtggaaacctgccgtgcggtctggcggatctggcggaggctcctatggccgccggccagagggaggccaggccccaggtgagcctgaccttcgaggacgtggccgtgctgttcaccagggacgagtggaggaagctggcccccagccagaggaacctgtacagggacgtgatgctggagaactacaggaacctgctgagcctgggcctgcccttcaccaagccccaggtgatcagcctgctgcagcagggcgaggacccctgggaggtggagaaggagggcagcggcggatctggctccggcagcggccccaagaaaaagagaaaagtctaagctgccttctgcggggcttgccttctggccatgcccttcttctctcccttgcacctgtacctcttggtctttgaataaagcctgagtaggaaggctagcaaaaaaaaaaaaaaaaaaaaaaaaaaaaaaaaaaaaaaaaaaaaaaaaaaaaaaaaaaaaaaaaaaaaaaaaaaaaaaaa

SEQ ID NO: 15945 - RNA, 9485 nt, synthetic construct
  source 1..9485: mol_type = other RNA
aggaaataagagagaaaagaagagtaagaagaaatataagagccaccatggcccctaagaagaagcgtaaagtgagccggatggaacgcctcgtctacgaggtgcggcagaagtgcagaaacatcgaggacatctgcatctcctgcggatctctgaacgtgaccctggagcacccactgttcatcggcggcatgtgccagaactgtaaaaactgttttctggagtgtgcctatcaatacgacgatgacggctaccagagctactgcaccatctgttgcggcggaagagaggtgctgatgtgtggaaataacaactgctgccggtgcttctgcgtggaatgcgtggacctgctggtgggccccggcgccgcccaggccgctattaaggaagatccttggaactgctacatgtgcggccacaagggcacatacggcctgctgagacggagagaggactggcctagcagactgcagatgttcttcgccaataaccacgaccaggagttcgacccccctaaggtgtaccctcccgtccccgccgagaagagaaagcccatccgggtcctgagcctgttcgatggcatcgccaccggtctgctggtgctgaaggacctgggcatccaggtggataggtacattgcctccgaggtgtgcgaggactccatcaccgtgggaatggtgcgtcatcagggcaagatcatgtacgtgggcgacgtgcggagcgtgacacagaagcatatccaggagtggggccctttcgacctggtgatcggcggcagcccttgcaatgacctgagcatcgtgaacccagcccggaagggcctgtacgagggaaccggcagactgttcttcgagttttacagactgctgcacgacgcccggcctaaggaaggcgacgaccggcccttcttttggctgttcgagaatgtggtggccatgggagtcagcgacaagcgggatattagccggttcctggagagcaaccccgtgatgatcgatgccaaggaagtgagcgccgcccaccgggccagatacttctggggcaatctgcctggcatgaacagacccctggccagcaccgtgaacgacaagctggagctgcaggagtgcctggagcacggccggatcgccaagttcagcaaggtgagaaccatcaccacccgaagcaacagcatcaaacaaggcaaggaccagcactttcctgtgttcatgaacgagaaggaggacatcctgtggtgtaccgagatggagagagtgttcgggttcccagtccactacacagatgtcagcaacatgtctagactggccagacagagactgctgggaagaagctggtccgtccctgtgatcagacacctgttcgcccctctgaaggagtacttcgcctgcgtgagcagcggcaacagcaacgccaacagccggggccccagcttctctagcggcctggtgccactgtccctgagagggagccacatgggccccatggagatctacaaaaccgtgagcgcctggaagcggcagcctgtgcgcgtgctgagcctgtttcggaatatcgataaagtcctgaaaagcctgggattcctggagagcggctctggctccggcggtggcaccctgaagtacgtggaggatgtgacaaacgtggtcagacgggatgtggagaagtggggccccttcgatctggtgtacggcagcacccaacccctgggcagctcttgtgaccggtgccctggctggtacatgtttcagttccaccggatcctgcagtacgccctgccgagacaggagtcccagcggccattcttttggattttcatggacaacttgctgctgaccgaggatgaccaggaaactaccactcggttcctgcagaccgaagccgtgaccctgcaggacgtgagaggccgggactaccagaacgccatgcgggtgtggtccaacatccctggactgaaaagcaagcacgcacctctgacccctaaagaagaggagtacctgcaggcccaggtgcggagcagaagcaagctggacgcccctaaggtggatctgctggtgaagaattgcctcctgcccctgagagagtacttcaagtatttcagccagaatagtctgcccctgggaggcagcggcggcggcgccctggtgacatttgaggacgtcgccgtgcggttcacccaggaggaatgggctctgctggatccttctcagaaaatcctgtaccgggacgtgatgagagagacataccggaatctgacctccgtgggcatcaactgggaatgttgggaccttgaagcctgcttcagaagcctgggaagaaacctgagagtgcaggtggtgaagagaaagtgcgagctgaccaacagcggcccctgcgccgagggcggcccaagcagcggcgcccctcctcccagcggcggcagcccagccggctccccaacctctaccgaggagggcacctctgagtccgccacccccgagagcggccctggcacctccaccgagcccagcgagggcagcgcacccggcagccctgccggcagccccacctccacagaggagggaaccagcaccgagcccagcgaaggcagcgccccaggcaccagcaccgagcctagtgagcaggagattaaacggatcaacaagatcagaagaagacttgtgaaagacagcaacaccaagaaggccggcaagacaggccccatgaaaaccctgctggttagagtgatgacacccgatctgagagagcggctggaaaacctgagaaagaagcctgaaaatatcccccagcccatcagcaatacatctagagccaacctgaataagctgctgaccgattacaccgaaatgaagaaggcgatcctgcatgtgtactgggaagagttccagaaggaccctgtgggcctgatgagccgggtggcccagcctgccagcaagaagatcgatcagaacaagctgaaacctgagatggacgagaagggcaacctgaccaccgccggctttgcctgctctcagtgtggccagcccctgttcgtgtacaagctggagcaggtgtctgagaagggcaaggcttacaccaactacttcggacggtgcaatgtggccgagcacgaaaagctgatcctgctggcccagctgaagcccgagaaggatagcgacgaagccgtgacatatagcctgggaaagtttgggcagagggccctggatttctacagcattcatgtgaccaaggagtccacccaccccgtgaagcccctggcccagatcgccggaaacagatacgcctccggacctgtgggaaaggccctgagcgacgcatgtatgggcacaatcgcctccttcctgtctaagtaccaggacatcatcatcgaacaccagaaggtggtgaagggcaaccagaagagactggagagcctgcgggagctggccggcaaggaaaacctggaataccctagcgtgaccctgccacctcagcctcacaccaaggagggcgttgatgcctacaacgaagtgatcgcccgggtgcgaatgtgggtgaacctgaacctgtggcagaagctgaagctaagcagagatgatgccaagcctctgctgagactgaagggattcccttcctttcctctggtcgagagacaggccaacgaagtggactggtgggacatggtgtgtaacgtgaagaagctgatcaacgagaaaaaggaggatggcaaggtgttttggcagaatctggctggctacaagagacaggaagccctgagaccatacctgagcagcgaggaagatcggaagaagggaaagaaattcgctcggtaccagctgggcgacctgctgctgcacctggaaaagaagcacggcgaggactggggaaaggtgtacgacgaggcctgggagcggattgacaagaaagtggaaggcctgagcaagcacatcaagctggaagaggaacggagaagcgaggacgcccagagcaaggccgccctgaccgactggctgcgggctaaggccagcttcgtgatcgagggcctgaaggaggccgacaaggacgagttctgcagatgcgagctgaagctgcagaagtggtacggggacctgcggggaaagcccttcgccatcgaagccgagaacagcatcctggacatcagcggcttcagcaagcagtacaactgtgccttcatctggcagaaggacggcgtgaagaagctgaacctgtacctgatcatcaactacttcaagggcggcaagctgcggttcaagaagatcaaacctgaagccttcgaagccaacagattctacaccgtgatcaacaaaaagagcggcgagatcgtgcccatggaggtgaacttcaacttcgacgaccccaacctgatcatcctgcctctggcctttggcaagagacagggcagagaattcatctggaacgacctgctgtccctggaaaccggcagcctgaagctggccaacggaagagtgatcgagaagacactgtacaacagaagaacccggcaggatgagcctgccctgttcgtggccctgaccttcgagcggcgggaggtcctggactcctccaatatcaaaccaatgaacctgatcggcgtggcaagaggcgaaaacatccccgccgtgatcgccctgaccgaccccgagggctgcccactgagccggtttaaggatagcctgggaaacccaacccacatcctgagaatcggcgagagctataaggagaagcagcggaccatccaggccaagaaggaggtggagcagcggagagccggcggctacagccggaagtacgccagcaaagccaagaatctggcagacgatatggtgagaaacaccgctagagatctgctgtactacgccgtgacccaggatgccatgctgatcttcgccaacctgagccggggcttcggccggcagggcaagcggaccttcatggccgagagacagtacacacggatggaggactggctgaccgccaagctggcctacgagggcctgagcaagacctacctgtccaagacactggcccagtacacctccaagacatgcagcaactgtgggtttaccatcaccagcgccgactacgacagggtgctggagaagctgaagaagacagcaacaggctggatgaccacaattaacggcaaggagctgaaggtggagggccagattacctactacaacagatacaagagacagaacgtagtcaaggacctgtccgtcgagctggatagactgagcgaagaatctgtgaacaacgacatctcctcctggacaaagggcagaagcggagaagctctgagcctcctgaagaaaagattctcccatagacccgtgcaggagaagttcgtgtgcctgaactgcggcttcgagacacacgcagccgagcaagccgccctgaacatcgccagatcctggctgttcctgcggagccaggagtacaagaaataccagacaaacaagacaaccggcaacaccgataagagagccttcgtcgagacctggcagtccttttaccggaagaagcttaaggaggtgtggaaacctgccgtgcggtctggcggatctggcggaggctccatggacagcgtggccttcgaggacgtggccatcaacttcacctgcgaggagtgggccctgctgggccccagccagaagagcctgtacagggacgtgatgcaggagaccatcaggaacctggactgcatcggcatgacctggcagacccacgacatcgaggaggaccagtacaaggacctgaggaggaacctgaggtgccacatggtggagaggagctgcgagatcaaggacaacagccagtgcggcggcccaagcagcggcgcccctcctcccagcggcggcagcccagccggctccccaacctctaccgaggagggcacctctgagtccgccacccccgagagcggccctggcacctccaccgagcccagcgagggcagcgcacccggcagccctgccggcagccccacctccacagaggagggaaccagcaccgagcccagcgaaggcagcgccccaggcaccagcaccgagcctagtgagcaggagattaaacggatcaacaagatcagaagaagacttgtgaaagacagcaacaccaagaaggccggcaagacaggccccatgaaaaccctgctggttagagtgatgacacccgatctgagagagcggctggaaaacctgagaaagaagcctgaaaatatcccccagcccatcagcaatacatctagagccaacctgaataagctgctgaccgattacaccgaaatgaagaaggcgatcctgcatgtgtactgggaagagttccagaaggaccctgtgggcctgatgagccgggtggcccagcctgccagcaagaagatcgatcagaacaagctgaaacctgagatggacgagaagggcaacctgaccaccgccggctttgcctgctctcagtgtggccagcccctgttcgtgtacaagctggagcaggtgtctgagaagggcaaggcttacaccaactacttcggacggtgcaatgtggccgagcacgaaaagctgatcctgctggcccagctgaagcccgagaaggatagcgacgaagccgtgacatatagcctgggaaagtttgggcagagggccctggatttctacagcattcatgtgaccaaggagtccacccaccccgtgaagcccctggcccagatcgccggaaacagatacgcctccggacctgtgggaaaggccctgagcgacgcatgtatgggcacaatcgcctccttcctgtctaagtaccaggacatcatcatcgaacaccagaaggtggtgaagggcaaccagaagagactggagagcctgcgggagctggccggcaaggaaaacctggaataccctagcgtgaccctgccacctcagcctcacaccaaggagggcgttgatgcctacaacgaagtgatcgcccgggtgcgaatgtgggtgaacctgaacctgtggcagaagctgaagctaagcagagatgatgccaagcctctgctgagactgaagggattcccttcctttcctctggtcgagagacaggccaacgaagtggactggtgggacatggtgtgtaacgtgaagaagctgatcaacgagaaaaaggaggatggcaaggtgttttggcagaatctggctggctacaagagacaggaagccctgagaccatacctgagcagcgaggaagatcggaagaagggaaagaaattcgctcggtaccagctgggcgacctgctgctgcacctggaaaagaagcacggcgaggactggggaaaggtgtacgacgaggcctgggagcggattgacaagaaagtggaaggcctgagcaagcacatcaagctggaagaggaacggagaagcgaggacgcccagagcaaggccgccctgaccgactggctgcgggctaaggccagcttcgtgatcgagggcctgaaggaggccgacaaggacgagttctgcagatgcgagctgaagctgcagaagtggtacggggacctgcggggaaagcccttcgccatcgaagccgagaacagcatcctggacatcagcggcttcagcaagcagtacaactgtgccttcatctggcagaaggacggcgtgaagaagctgaacctgtacctgatcatcaactacttcaagggcggcaagctgcggttcaagaagatcaaacctgaagccttcgaagccaacagattctacaccgtgatcaacaaaaagagcggcgagatcgtgcccatggaggtgaacttcaacttcgacgaccccaacctgatcatcctgcctctggcctttggcaagagacagggcagagaattcatctggaacgacctgctgtccctggaaaccggcagcctgaagctggccaacggaagagtgatcgagaagacactgtacaacagaagaacccggcaggatgagcctgccctgttcgtggccctgaccttcgagcggcgggaggtcctggactcctccaatatcaaaccaatgaacctgatcggcgtggcaagaggcgaaaacatccccgccgtgatcgccctgaccgaccccgagggctgcccactgagccggtttaaggatagcctgggaaacccaacccacatcctgagaatcggcgagagctataaggagaagcagcggaccatccaggccaagaaggaggtggagcagcggagagccggcggctacagccggaagtacgccagcaaagccaagaatctggcagacgatatggtgagaaacaccgctagagatctgctgtactacgccgtgacccaggatgccatgctgatcttcgccaacctgagccggggcttcggccggcagggcaagcggaccttcatggccgagagacagtacacacggatggaggactggctgaccgccaagctggcctacgagggcctgagcaagacctacctgtccaagacactggcccagtacacctccaagacatgcagcaactgtgggtttaccatcaccagcgccgactacgacagggtgctggagaagctgaagaagacagcaacaggctggatgaccacaattaacggcaaggagctgaaggtggagggccagattacctactacaacagatacaagagacagaacgtagtcaaggacctgtccgtcgagctggatagactgagcgaagaatctgtgaacaacgacatctcctcctggacaaagggcagaagcggagaagctctgagcctcctgaagaaaagattctcccatagacccgtgcaggagaagttcgtgtgcctgaactgcggcttcgagacacacgcagccgagcaagccgccctgaacatcgccagatcctggctgttcctgcggagccaggagtacaagaaataccagacaaacaagacaaccggcaacaccgataagagagccttcgtcgagacctggcagtccttttaccggaagaagcttaaggaggtgtggaaacctgccgtgcggtctggcggatctggcggaggctcctatggacagcgtggccttcgaggacgtggccatcaacttcacctgcgaggagtgggccctgctgggccccagccagaagagcctgtacagggacgtgatgcaggagaccatcaggaacctggactgcatcggcatgacctggcagacccacgacatcgaggaggaccagtacaaggacctgaggaggaacctgaggtgccacatggtggagaggagctgcgagatcaaggacaacagccagtgcggatctggctccggcagcggccccaagaaaaagagaaaagtctaagctgccttctgcggggcttgccttctggccatgcccttcttctctcccttgcacctgtacctcttggtctttgaataaagcctgagtaggaaggctagcaaaaaaaaaaaaaaaaaaaaaaaaaaaaaaaaaaaaaaaaaaaaaaaaaaaaaaaaaaaaaaaaaaaaaaaaaaaaaaaa

SEQ ID NO: 15946 - RNA, 9485 nt, synthetic construct
  source 1..9485: mol_type = other RNA
aggaaataagagagaaaagaagagtaagaagaaatataagagccaccatggcccctaagaagaagcgtaaagtgagccggatggaacgcctcgtctacgaggtgcggcagaagtgcagaaacatcgaggacatctgcatctcctgcggatctctgaacgtgaccctggagcacccactgttcatcggcggcatgtgccagaactgtaaaaactgttttctggagtgtgcctatcaatacgacgatgacggctaccagagctactgcaccatctgttgcggcggaagagaggtgctgatgtgtggaaataacaactgctgccggtgcttctgcgtggaatgcgtggacctgctggtgggccccggcgccgcccaggccgctattaaggaagatccttggaactgctacatgtgcggccacaagggcacatacggcctgctgagacggagagaggactggcctagcagactgcagatgttcttcgccaataaccacgaccaggagttcgacccccctaaggtgtaccctcccgtccccgccgagaagagaaagcccatccgggtcctgagcctgttcgatggcatcgccaccggtctgctggtgctgaaggacctgggcatccaggtggataggtacattgcctccgaggtgtgcgaggactccatcaccgtgggaatggtgcgtcatcagggcaagatcatgtacgtgggcgacgtgcggagcgtgacacagaagcatatccaggagtggggccctttcgacctggtgatcggcggcagcccttgcaatgacctgagcatcgtgaacccagcccggaagggcctgtacgagggaaccggcagactgttcttcgagttttacagactgctgcacgacgcccggcctaaggaaggcgacgaccggcccttcttttggctgttcgagaatgtggtggccatgggagtcagcgacaagcgggatattagccggttcctggagagcaaccccgtgatgatcgatgccaaggaagtgagcgccgcccaccgggccagatacttctggggcaatctgcctggcatgaacagacccctggccagcaccgtgaacgacaagctggagctgcaggagtgcctggagcacggccggatcgccaagttcagcaaggtgagaaccatcaccacccgaagcaacagcatcaaacaaggcaaggaccagcactttcctgtgttcatgaacgagaaggaggacatcctgtggtgtaccgagatggagagagtgttcgggttcccagtccactacacagatgtcagcaacatgtctagactggccagacagagactgctgggaagaagctggtccgtccctgtgatcagacacctgttcgcccctctgaaggagtacttcgcctgcgtgagcagcggcaacagcaacgccaacagccggggccccagcttctctagcggcctggtgccactgtccctgagagggagccacatgggccccatggagatctacaaaaccgtgagcgcctggaagcggcagcctgtgcgcgtgctgagcctgtttcggaatatcgataaagtcctgaaaagcctgggattcctggagagcggctctggctccggcggtggcaccctgaagtacgtggaggatgtgacaaacgtggtcagacgggatgtggagaagtggggccccttcgatctggtgtacggcagcacccaacccctgggcagctcttgtgaccggtgccctggctggtacatgtttcagttccaccggatcctgcagtacgccctgccgagacaggagtcccagcggccattcttttggattttcatggacaacttgctgctgaccgaggatgaccaggaaactaccactcggttcctgcagaccgaagccgtgaccctgcaggacgtgagaggccgggactaccagaacgccatgcgggtgtggtccaacatccctggactgaaaagcaagcacgcacctctgacccctaaagaagaggagtacctgcaggcccaggtgcggagcagaagcaagctggacgcccctaaggtggatctgctggtgaagaattgcctcctgcccctgagagagtacttcaagtatttcagccagaatagtctgcccctgggaggcagcggcggcggcgccctggtgacatttgaggacgtcgccgtgcggttcacccaggaggaatgggctctgctggatccttctcagaaaatcctgtaccgggacgtgatgagagagacataccggaatctgacctccgtgggcatcaactgggaatgttgggaccttgaagcctgcttcagaagcctgggaagaaacctgagagtgcaggtggtgaagagaaagtgcgagctgaccaacagcggcccctgcgccgagggcggcccaagcagcggcgcccctcctcccagcggcggcagcccagccggctccccaacctctaccgaggagggcacctctgagtccgccacccccgagagcggccctggcacctccaccgagcccagcgagggcagcgcacccggcagccctgccggcagccccacctccacagaggagggaaccagcaccgagcccagcgaaggcagcgccccaggcaccagcaccgagcctagtgagcaggagattaaacggatcaacaagatcagaagaagacttgtgaaagacagcaacaccaagaaggccggcaagacaggccccatgaaaaccctgctggttagagtgatgacacccgatctgagagagcggctggaaaacctgagaaagaagcctgaaaatatcccccagcccatcagcaatacatctagagccaacctgaataagctgctgaccgattacaccgaaatgaagaaggcgatcctgcatgtgtactgggaagagttccagaaggaccctgtgggcctgatgagccgggtggcccagcctgccagcaagaagatcgatcagaacaagctgaaacctgagatggacgagaagggcaacctgaccaccgccggctttgcctgctctcagtgtggccagcccctgttcgtgtacaagctggagcaggtgtctgagaagggcaaggcttacaccaactacttcggacggtgcaatgtggccgagcacgaaaagctgatcctgctggcccagctgaagcccgagaaggatagcgacgaagccgtgacatatagcctgggaaagtttgggcagagggccctggatttctacagcattcatgtgaccaaggagtccacccaccccgtgaagcccctggcccagatcgccggaaacagatacgcctccggacctgtgggaaaggccctgagcgacgcatgtatgggcacaatcgcctccttcctgtctaagtaccaggacatcatcatcgaacaccagaaggtggtgaagggcaaccagaagagactggagagcctgcgggagctggccggcaaggaaaacctggaataccctagcgtgaccctgccacctcagcctcacaccaaggagggcgttgatgcctacaacgaagtgatcgcccgggtgcgaatgtgggtgaacctgaacctgtggcagaagctgaagctaagcagagatgatgccaagcctctgctgagactgaagggattcccttcctttcctctggtcgagagacaggccaacgaagtggactggtgggacatggtgtgtaacgtgaagaagctgatcaacgagaaaaaggaggatggcaaggtgttttggcagaatctggctggctacaagagacaggaagccctgagaccatacctgagcagcgaggaagatcggaagaagggaaagaaattcgctcggtaccagctgggcgacctgctgctgcacctggaaaagaagcacggcgaggactggggaaaggtgtacgacgaggcctgggagcggattgacaagaaagtggaaggcctgagcaagcacatcaagctggaagaggaacggagaagcgaggacgcccagagcaaggccgccctgaccgactggctgcgggctaaggccagcttcgtgatcgagggcctgaaggaggccgacaaggacgagttctgcagatgcgagctgaagctgcagaagtggtacggggacctgcggggaaagcccttcgccatcgaagccgagaacagcatcctggacatcagcggcttcagcaagcagtacaactgtgccttcatctggcagaaggacggcgtgaagaagctgaacctgtacctgatcatcaactacttcaagggcggcaagctgcggttcaagaagatcaaacctgaagccttcgaagccaacagattctacaccgtgatcaacaaaaagagcggcgagatcgtgcccatggaggtgaacttcaacttcgacgaccccaacctgatcatcctgcctctggcctttggcaagagacagggcagagaattcatctggaacgacctgctgtccctggaaaccggcagcctgaagctggccaacggaagagtgatcgagaagacactgtacaacagaagaacccggcaggatgagcctgccctgttcgtggccctgaccttcgagcggcgggaggtcctggactcctccaatatcaaaccaatgaacctgatcggcgtggcaagaggcgaaaacatccccgccgtgatcgccctgaccgaccccgagggctgcccactgagccggtttaaggatagcctgggaaacccaacccacatcctgagaatcggcgagagctataaggagaagcagcggaccatccaggccaagaaggaggtggagcagcggagagccggcggctacagccggaagtacgccagcaaagccaagaatctggcagacgatatggtgagaaacaccgctagagatctgctgtactacgccgtgacccaggatgccatgctgatcttcgccaacctgagccggggcttcggccggcagggcaagcggaccttcatggccgagagacagtacacacggatggaggactggctgaccgccaagctggcctacgagggcctgagcaagacctacctgtccaagacactggcccagtacacctccaagacatgcagcaactgtgggtttaccatcaccagcgccgactacgacagggtgctggagaagctgaagaagacagcaacaggctggatgaccacaattaacggcaaggagctgaaggtggagggccagattacctactacaacagatacaagagacagaacgtagtcaaggacctgtccgtcgagctggatagactgagcgaagaatctgtgaacaacgacatctcctcctggacaaagggcagaagcggagaagctctgagcctcctgaagaaaagattctcccatagacccgtgcaggagaagttcgtgtgcctgaactgcggcttcgagacacacgcagccgagcaagccgccctgaacatcgccagatcctggctgttcctgcggagccaggagtacaagaaataccagacaaacaagacaaccggcaacaccgataagagagccttcgtcgagacctggcagtccttttaccggaagaagcttaaggaggtgtggaaacctgccgtgcggtctggcggatctggcggaggctccccccagggcagcgtgaccttcgaggacgtggccgtggacttcagccaggaggagtgggagctgctggaccccgcccagaggaccctgtacagggaggtgatgctggagacctgcaggaacctggtgagcctgggctgcagcctgtgccagcccgtggcccccccccacctggagcagggcgaggccgtgtggatggtggacaggggcatcccccaggccttctgcagcgactgggagaccaggggcggcccaagcagcggcgcccctcctcccagcggcggcagcccagccggctccccaacctctaccgaggagggcacctctgagtccgccacccccgagagcggccctggcacctccaccgagcccagcgagggcagcgcacccggcagccctgccggcagccccacctccacagaggagggaaccagcaccgagcccagcgaaggcagcgccccaggcaccagcaccgagcctagtgagcaggagattaaacggatcaacaagatcagaagaagacttgtgaaagacagcaacaccaagaaggccggcaagacaggccccatgaaaaccctgctggttagagtgatgacacccgatctgagagagcggctggaaaacctgagaaagaagcctgaaaatatcccccagcccatcagcaatacatctagagccaacctgaataagctgctgaccgattacaccgaaatgaagaaggcgatcctgcatgtgtactgggaagagttccagaaggaccctgtgggcctgatgagccgggtggcccagcctgccagcaagaagatcgatcagaacaagctgaaacctgagatggacgagaagggcaacctgaccaccgccggctttgcctgctctcagtgtggccagcccctgttcgtgtacaagctggagcaggtgtctgagaagggcaaggcttacaccaactacttcggacggtgcaatgtggccgagcacgaaaagctgatcctgctggcccagctgaagcccgagaaggatagcgacgaagccgtgacatatagcctgggaaagtttgggcagagggccctggatttctacagcattcatgtgaccaaggagtccacccaccccgtgaagcccctggcccagatcgccggaaacagatacgcctccggacctgtgggaaaggccctgagcgacgcatgtatgggcacaatcgcctccttcctgtctaagtaccaggacatcatcatcgaacaccagaaggtggtgaagggcaaccagaagagactggagagcctgcgggagctggccggcaaggaaaacctggaataccctagcgtgaccctgccacctcagcctcacaccaaggagggcgttgatgcctacaacgaagtgatcgcccgggtgcgaatgtgggtgaacctgaacctgtggcagaagctgaagctaagcagagatgatgccaagcctctgctgagactgaagggattcccttcctttcctctggtcgagagacaggccaacgaagtggactggtgggacatggtgtgtaacgtgaagaagctgatcaacgagaaaaaggaggatggcaaggtgttttggcagaatctggctggctacaagagacaggaagccctgagaccatacctgagcagcgaggaagatcggaagaagggaaagaaattcgctcggtaccagctgggcgacctgctgctgcacctggaaaagaagcacggcgaggactggggaaaggtgtacgacgaggcctgggagcggattgacaagaaagtggaaggcctgagcaagcacatcaagctggaagaggaacggagaagcgaggacgcccagagcaaggccgccctgaccgactggctgcgggctaaggccagcttcgtgatcgagggcctgaaggaggccgacaaggacgagttctgcagatgcgagctgaagctgcagaagtggtacggggacctgcggggaaagcccttcgccatcgaagccgagaacagcatcctggacatcagcggcttcagcaagcagtacaactgtgccttcatctggcagaaggacggcgtgaagaagctgaacctgtacctgatcatcaactacttcaagggcggcaagctgcggttcaagaagatcaaacctgaagccttcgaagccaacagattctacaccgtgatcaacaaaaagagcggcgagatcgtgcccatggaggtgaacttcaacttcgacgaccccaacctgatcatcctgcctctggcctttggcaagagacagggcagagaattcatctggaacgacctgctgtccctggaaaccggcagcctgaagctggccaacggaagagtgatcgagaagacactgtacaacagaagaacccggcaggatgagcctgccctgttcgtggccctgaccttcgagcggcgggaggtcctggactcctccaatatcaaaccaatgaacctgatcggcgtggcaagaggcgaaaacatccccgccgtgatcgccctgaccgaccccgagggctgcccactgagccggtttaaggatagcctgggaaacccaacccacatcctgagaatcggcgagagctataaggagaagcagcggaccatccaggccaagaaggaggtggagcagcggagagccggcggctacagccggaagtacgccagcaaagccaagaatctggcagacgatatggtgagaaacaccgctagagatctgctgtactacgccgtgacccaggatgccatgctgatcttcgccaacctgagccggggcttcggccggcagggcaagcggaccttcatggccgagagacagtacacacggatggaggactggctgaccgccaagctggcctacgagggcctgagcaagacctacctgtccaagacactggcccagtacacctccaagacatgcagcaactgtgggtttaccatcaccagcgccgactacgacagggtgctggagaagctgaagaagacagcaacaggctggatgaccacaattaacggcaaggagctgaaggtggagggccagattacctactacaacagatacaagagacagaacgtagtcaaggacctgtccgtcgagctggatagactgagcgaagaatctgtgaacaacgacatctcctcctggacaaagggcagaagcggagaagctctgagcctcctgaagaaaagattctcccatagacccgtgcaggagaagttcgtgtgcctgaactgcggcttcgagacacacgcagccgagcaagccgccctgaacatcgccagatcctggctgttcctgcggagccaggagtacaagaaataccagacaaacaagacaaccggcaacaccgataagagagccttcgtcgagacctggcagtccttttaccggaagaagcttaaggaggtgtggaaacctgccgtgcggtctggcggatctggcggaggctcctccccagggcagcgtgaccttcgaggacgtggccgtggacttcagccaggaggagtgggagctgctggaccccgcccagaggaccctgtacagggaggtgatgctggagacctgcaggaacctggtgagcctgggctgcagcctgtgccagcccgtggcccccccccacctggagcagggcgaggccgtgtggatggtggacaggggcatcccccaggccttctgcagcgactgggagaccaggggatctggctccggcagcggccccaagaaaaagagaaaagtctaagctgccttctgcggggcttgccttctggccatgcccttcttctctcccttgcacctgtacctcttggtctttgaataaagcctgagtaggaaggctagcaaaaaaaaaaaaaaaaaaaaaaaaaaaaaaaaaaaaaaaaaaaaaaaaaaaaaaaaaaaaaaaaaaaaaaaaaaaaaaaa

SEQ ID NO: 15947 - RNA, 9485 nt, synthetic construct
  source 1..9485: mol_type = other RNA
aggaaataagagagaaaagaagagtaagaagaaatataagagccaccatggcccctaagaagaagcgtaaagtgagccggatggaacgcctcgtctacgaggtgcggcagaagtgcagaaacatcgaggacatctgcatctcctgcggatctctgaacgtgaccctggagcacccactgttcatcggcggcatgtgccagaactgtaaaaactgttttctggagtgtgcctatcaatacgacgatgacggctaccagagctactgcaccatctgttgcggcggaagagaggtgctgatgtgtggaaataacaactgctgccggtgcttctgcgtggaatgcgtggacctgctggtgggccccggcgccgcccaggccgctattaaggaagatccttggaactgctacatgtgcggccacaagggcacatacggcctgctgagacggagagaggactggcctagcagactgcagatgttcttcgccaataaccacgaccaggagttcgacccccctaaggtgtaccctcccgtccccgccgagaagagaaagcccatccgggtcctgagcctgttcgatggcatcgccaccggtctgctggtgctgaaggacctgggcatccaggtggataggtacattgcctccgaggtgtgcgaggactccatcaccgtgggaatggtgcgtcatcagggcaagatcatgtacgtgggcgacgtgcggagcgtgacacagaagcatatccaggagtggggccctttcgacctggtgatcggcggcagcccttgcaatgacctgagcatcgtgaacccagcccggaagggcctgtacgagggaaccggcagactgttcttcgagttttacagactgctgcacgacgcccggcctaaggaaggcgacgaccggcccttcttttggctgttcgagaatgtggtggccatgggagtcagcgacaagcgggatattagccggttcctggagagcaaccccgtgatgatcgatgccaaggaagtgagcgccgcccaccgggccagatacttctggggcaatctgcctggcatgaacagacccctggccagcaccgtgaacgacaagctggagctgcaggagtgcctggagcacggccggatcgccaagttcagcaaggtgagaaccatcaccacccgaagcaacagcatcaaacaaggcaaggaccagcactttcctgtgttcatgaacgagaaggaggacatcctgtggtgtaccgagatggagagagtgttcgggttcccagtccactacacagatgtcagcaacatgtctagactggccagacagagactgctgggaagaagctggtccgtccctgtgatcagacacctgttcgcccctctgaaggagtacttcgcctgcgtgagcagcggcaacagcaacgccaacagccggggccccagcttctctagcggcctggtgccactgtccctgagagggagccacatgggccccatggagatctacaaaaccgtgagcgcctggaagcggcagcctgtgcgcgtgctgagcctgtttcggaatatcgataaagtcctgaaaagcctgggattcctggagagcggctctggctccggcggtggcaccctgaagtacgtggaggatgtgacaaacgtggtcagacgggatgtggagaagtggggccccttcgatctggtgtacggcagcacccaacccctgggcagctcttgtgaccggtgccctggctggtacatgtttcagttccaccggatcctgcagtacgccctgccgagacaggagtcccagcggccattcttttggattttcatggacaacttgctgctgaccgaggatgaccaggaaactaccactcggttcctgcagaccgaagccgtgaccctgcaggacgtgagaggccgggactaccagaacgccatgcgggtgtggtccaacatccctggactgaaaagcaagcacgcacctctgacccctaaagaagaggagtacctgcaggcccaggtgcggagcagaagcaagctggacgcccctaaggtggatctgctggtgaagaattgcctcctgcccctgagagagtacttcaagtatttcagccagaatagtctgcccctgggaggcagcggcggcggcgccctggtgacatttgaggacgtcgccgtgcggttcacccaggaggaatgggctctgctggatccttctcagaaaatcctgtaccgggacgtgatgagagagacataccggaatctgacctccgtgggcatcaactgggaatgttgggaccttgaagcctgcttcagaagcctgggaagaaacctgagagtgcaggtggtgaagagaaagtgcgagctgaccaacagcggcccctgcgccgagggcggcccaagcagcggcgcccctcctcccagcggcggcagcccagccggctccccaacctctaccgaggagggcacctctgagtccgccacccccgagagcggccctggcacctccaccgagcccagcgagggcagcgcacccggcagccctgccggcagccccacctccacagaggagggaaccagcaccgagcccagcgaaggcagcgccccaggcaccagcaccgagcctagtgagcaggagattaaacggatcaacaagatcagaagaagacttgtgaaagacagcaacaccaagaaggccggcaagacaggccccatgaaaaccctgctggttagagtgatgacacccgatctgagagagcggctggaaaacctgagaaagaagcctgaaaatatcccccagcccatcagcaatacatctagagccaacctgaataagctgctgaccgattacaccgaaatgaagaaggcgatcctgcatgtgtactgggaagagttccagaaggaccctgtgggcctgatgagccgggtggcccagcctgccagcaagaagatcgatcagaacaagctgaaacctgagatggacgagaagggcaacctgaccaccgccggctttgcctgctctcagtgtggccagcccctgttcgtgtacaagctggagcaggtgtctgagaagggcaaggcttacaccaactacttcggacggtgcaatgtggccgagcacgaaaagctgatcctgctggcccagctgaagcccgagaaggatagcgacgaagccgtgacatatagcctgggaaagtttgggcagagggccctggatttctacagcattcatgtgaccaaggagtccacccaccccgtgaagcccctggcccagatcgccggaaacagatacgcctccggacctgtgggaaaggccctgagcgacgcatgtatgggcacaatcgcctccttcctgtctaagtaccaggacatcatcatcgaacaccagaaggtggtgaagggcaaccagaagagactggagagcctgcgggagctggccggcaaggaaaacctggaataccctagcgtgaccctgccacctcagcctcacaccaaggagggcgttgatgcctacaacgaagtgatcgcccgggtgcgaatgtgggtgaacctgaacctgtggcagaagctgaagctaagcagagatgatgccaagcctctgctgagactgaagggattcccttcctttcctctggtcgagagacaggccaacgaagtggactggtgggacatggtgtgtaacgtgaagaagctgatcaacgagaaaaaggaggatggcaaggtgttttggcagaatctggctggctacaagagacaggaagccctgagaccatacctgagcagcgaggaagatcggaagaagggaaagaaattcgctcggtaccagctgggcgacctgctgctgcacctggaaaagaagcacggcgaggactggggaaaggtgtacgacgaggcctgggagcggattgacaagaaagtggaaggcctgagcaagcacatcaagctggaagaggaacggagaagcgaggacgcccagagcaaggccgccctgaccgactggctgcgggctaaggccagcttcgtgatcgagggcctgaaggaggccgacaaggacgagttctgcagatgcgagctgaagctgcagaagtggtacggggacctgcggggaaagcccttcgccatcgaagccgagaacagcatcctggacatcagcggcttcagcaagcagtacaactgtgccttcatctggcagaaggacggcgtgaagaagctgaacctgtacctgatcatcaactacttcaagggcggcaagctgcggttcaagaagatcaaacctgaagccttcgaagccaacagattctacaccgtgatcaacaaaaagagcggcgagatcgtgcccatggaggtgaacttcaacttcgacgaccccaacctgatcatcctgcctctggcctttggcaagagacagggcagagaattcatctggaacgacctgctgtccctggaaaccggcagcctgaagctggccaacggaagagtgatcgagaagacactgtacaacagaagaacccggcaggatgagcctgccctgttcgtggccctgaccttcgagcggcgggaggtcctggactcctccaatatcaaaccaatgaacctgatcggcgtggcaagaggcgaaaacatccccgccgtgatcgccctgaccgaccccgagggctgcccactgagccggtttaaggatagcctgggaaacccaacccacatcctgagaatcggcgagagctataaggagaagcagcggaccatccaggccaagaaggaggtggagcagcggagagccggcggctacagccggaagtacgccagcaaagccaagaatctggcagacgatatggtgagaaacaccgctagagatctgctgtactacgccgtgacccaggatgccatgctgatcttcgccaacctgagccggggcttcggccggcagggcaagcggaccttcatggccgagagacagtacacacggatggaggactggctgaccgccaagctggcctacgagggcctgagcaagacctacctgtccaagacactggcccagtacacctccaagacatgcagcaactgtgggtttaccatcaccagcgccgactacgacagggtgctggagaagctgaagaagacagcaacaggctggatgaccacaattaacggcaaggagctgaaggtggagggccagattacctactacaacagatacaagagacagaacgtagtcaaggacctgtccgtcgagctggatagactgagcgaagaatctgtgaacaacgacatctcctcctggacaaagggcagaagcggagaagctctgagcctcctgaagaaaagattctcccatagacccgtgcaggagaagttcgtgtgcctgaactgcggcttcgagacacacgcagccgagcaagccgccctgaacatcgccagatcctggctgttcctgcggagccaggagtacaagaaataccagacaaacaagacaaccggcaacaccgataagagagccttcgtcgagacctggcagtccttttaccggaagaagcttaaggaggtgtggaaacctgccgtgcggtctggcggatctggcggaggctccatgagcctgggcagcgagctgttcagggacgtggccatcgtgttcagccaggaggagtggcagtggctggcccccgcccagagggacctgtacagggacgtgatgctggagacctacagcaacctggtgagcctgggcctggccgtgagcaagcccgacgtgatcagcttcctggagcagggcaaggagccctggatggtggagagggtggtgagcggcggcctgtgccccggcgccaagggcggcggcccaagcagcggcgcccctcctcccagcggcggcagcccagccggctccccaacctctaccgaggagggcacctctgagtccgccacccccgagagcggccctggcacctccaccgagcccagcgagggcagcgcacccggcagccctgccggcagccccacctccacagaggagggaaccagcaccgagcccagcgaaggcagcgccccaggcaccagcaccgagcctagtgagcaggagattaaacggatcaacaagatcagaagaagacttgtgaaagacagcaacaccaagaaggccggcaagacaggccccatgaaaaccctgctggttagagtgatgacacccgatctgagagagcggctggaaaacctgagaaagaagcctgaaaatatcccccagcccatcagcaatacatctagagccaacctgaataagctgctgaccgattacaccgaaatgaagaaggcgatcctgcatgtgtactgggaagagttccagaaggaccctgtgggcctgatgagccgggtggcccagcctgccagcaagaagatcgatcagaacaagctgaaacctgagatggacgagaagggcaacctgaccaccgccggctttgcctgctctcagtgtggccagcccctgttcgtgtacaagctggagcaggtgtctgagaagggcaaggcttacaccaactacttcggacggtgcaatgtggccgagcacgaaaagctgatcctgctggcccagctgaagcccgagaaggatagcgacgaagccgtgacatatagcctgggaaagtttgggcagagggccctggatttctacagcattcatgtgaccaaggagtccacccaccccgtgaagcccctggcccagatcgccggaaacagatacgcctccggacctgtgggaaaggccctgagcgacgcatgtatgggcacaatcgcctccttcctgtctaagtaccaggacatcatcatcgaacaccagaaggtggtgaagggcaaccagaagagactggagagcctgcgggagctggccggcaaggaaaacctggaataccctagcgtgaccctgccacctcagcctcacaccaaggagggcgttgatgcctacaacgaagtgatcgcccgggtgcgaatgtgggtgaacctgaacctgtggcagaagctgaagctaagcagagatgatgccaagcctctgctgagactgaagggattcccttcctttcctctggtcgagagacaggccaacgaagtggactggtgggacatggtgtgtaacgtgaagaagctgatcaacgagaaaaaggaggatggcaaggtgttttggcagaatctggctggctacaagagacaggaagccctgagaccatacctgagcagcgaggaagatcggaagaagggaaagaaattcgctcggtaccagctgggcgacctgctgctgcacctggaaaagaagcacggcgaggactggggaaaggtgtacgacgaggcctgggagcggattgacaagaaagtggaaggcctgagcaagcacatcaagctggaagaggaacggagaagcgaggacgcccagagcaaggccgccctgaccgactggctgcgggctaaggccagcttcgtgatcgagggcctgaaggaggccgacaaggacgagttctgcagatgcgagctgaagctgcagaagtggtacggggacctgcggggaaagcccttcgccatcgaagccgagaacagcatcctggacatcagcggcttcagcaagcagtacaactgtgccttcatctggcagaaggacggcgtgaagaagctgaacctgtacctgatcatcaactacttcaagggcggcaagctgcggttcaagaagatcaaacctgaagccttcgaagccaacagattctacaccgtgatcaacaaaaagagcggcgagatcgtgcccatggaggtgaacttcaacttcgacgaccccaacctgatcatcctgcctctggcctttggcaagagacagggcagagaattcatctggaacgacctgctgtccctggaaaccggcagcctgaagctggccaacggaagagtgatcgagaagacactgtacaacagaagaacccggcaggatgagcctgccctgttcgtggccctgaccttcgagcggcgggaggtcctggactcctccaatatcaaaccaatgaacctgatcggcgtggcaagaggcgaaaacatccccgccgtgatcgccctgaccgaccccgagggctgcccactgagccggtttaaggatagcctgggaaacccaacccacatcctgagaatcggcgagagctataaggagaagcagcggaccatccaggccaagaaggaggtggagcagcggagagccggcggctacagccggaagtacgccagcaaagccaagaatctggcagacgatatggtgagaaacaccgctagagatctgctgtactacgccgtgacccaggatgccatgctgatcttcgccaacctgagccggggcttcggccggcagggcaagcggaccttcatggccgagagacagtacacacggatggaggactggctgaccgccaagctggcctacgagggcctgagcaagacctacctgtccaagacactggcccagtacacctccaagacatgcagcaactgtgggtttaccatcaccagcgccgactacgacagggtgctggagaagctgaagaagacagcaacaggctggatgaccacaattaacggcaaggagctgaaggtggagggccagattacctactacaacagatacaagagacagaacgtagtcaaggacctgtccgtcgagctggatagactgagcgaagaatctgtgaacaacgacatctcctcctggacaaagggcagaagcggagaagctctgagcctcctgaagaaaagattctcccatagacccgtgcaggagaagttcgtgtgcctgaactgcggcttcgagacacacgcagccgagcaagccgccctgaacatcgccagatcctggctgttcctgcggagccaggagtacaagaaataccagacaaacaagacaaccggcaacaccgataagagagccttcgtcgagacctggcagtccttttaccggaagaagcttaaggaggtgtggaaacctgccgtgcggtctggcggatctggcggaggctcctatgagcctgggcagcgagctgttcagggacgtggccatcgtgttcagccaggaggagtggcagtggctggcccccgcccagagggacctgtacagggacgtgatgctggagacctacagcaacctggtgagcctgggcctggccgtgagcaagcccgacgtgatcagcttcctggagcagggcaaggagccctggatggtggagagggtggtgagcggcggcctgtgccccggcgccaagggcggatctggctccggcagcggccccaagaaaaagagaaaagtctaagctgccttctgcggggcttgccttctggccatgcccttcttctctcccttgcacctgtacctcttggtctttgaataaagcctgagtaggaaggctagcaaaaaaaaaaaaaaaaaaaaaaaaaaaaaaaaaaaaaaaaaaaaaaaaaaaaaaaaaaaaaaaaaaaaaaaaaaaaaaaa

SEQ ID NO: 15948 - RNA, 9485 nt, synthetic construct
  source 1..9485: mol_type = other RNA
aggaaataagagagaaaagaagagtaagaagaaatataagagccaccatggcccctaagaagaagcgtaaagtgagccggatggaacgcctcgtctacgaggtgcggcagaagtgcagaaacatcgaggacatctgcatctcctgcggatctctgaacgtgaccctggagcacccactgttcatcggcggcatgtgccagaactgtaaaaactgttttctggagtgtgcctatcaatacgacgatgacggctaccagagctactgcaccatctgttgcggcggaagagaggtgctgatgtgtggaaataacaactgctgccggtgcttctgcgtggaatgcgtggacctgctggtgggccccggcgccgcccaggccgctattaaggaagatccttggaactgctacatgtgcggccacaagggcacatacggcctgctgagacggagagaggactggcctagcagactgcagatgttcttcgccaataaccacgaccaggagttcgacccccctaaggtgtaccctcccgtccccgccgagaagagaaagcccatccgggtcctgagcctgttcgatggcatcgccaccggtctgctggtgctgaaggacctgggcatccaggtggataggtacattgcctccgaggtgtgcgaggactccatcaccgtgggaatggtgcgtcatcagggcaagatcatgtacgtgggcgacgtgcggagcgtgacacagaagcatatccaggagtggggccctttcgacctggtgatcggcggcagcccttgcaatgacctgagcatcgtgaacccagcccggaagggcctgtacgagggaaccggcagactgttcttcgagttttacagactgctgcacgacgcccggcctaaggaaggcgacgaccggcccttcttttggctgttcgagaatgtggtggccatgggagtcagcgacaagcgggatattagccggttcctggagagcaaccccgtgatgatcgatgccaaggaagtgagcgccgcccaccgggccagatacttctggggcaatctgcctggcatgaacagacccctggccagcaccgtgaacgacaagctggagctgcaggagtgcctggagcacggccggatcgccaagttcagcaaggtgagaaccatcaccacccgaagcaacagcatcaaacaaggcaaggaccagcactttcctgtgttcatgaacgagaaggaggacatcctgtggtgtaccgagatggagagagtgttcgggttcccagtccactacacagatgtcagcaacatgtctagactggccagacagagactgctgggaagaagctggtccgtccctgtgatcagacacctgttcgcccctctgaaggagtacttcgcctgcgtgagcagcggcaacagcaacgccaacagccggggccccagcttctctagcggcctggtgccactgtccctgagagggagccacatgggccccatggagatctacaaaaccgtgagcgcctggaagcggcagcctgtgcgcgtgctgagcctgtttcggaatatcgataaagtcctgaaaagcctgggattcctggagagcggctctggctccggcggtggcaccctgaagtacgtggaggatgtgacaaacgtggtcagacgggatgtggagaagtggggccccttcgatctggtgtacggcagcacccaacccctgggcagctcttgtgaccggtgccctggctggtacatgtttcagttccaccggatcctgcagtacgccctgccgagacaggagtcccagcggccattcttttggattttcatggacaacttgctgctgaccgaggatgaccaggaaactaccactcggttcctgcagaccgaagccgtgaccctgcaggacgtgagaggccgggactaccagaacgccatgcgggtgtggtccaacatccctggactgaaaagcaagcacgcacctctgacccctaaagaagaggagtacctgcaggcccaggtgcggagcagaagcaagctggacgcccctaaggtggatctgctggtgaagaattgcctcctgcccctgagagagtacttcaagtatttcagccagaatagtctgcccctgggaggcagcggcggcggcgccctggtgacatttgaggacgtcgccgtgcggttcacccaggaggaatgggctctgctggatccttctcagaaaatcctgtaccgggacgtgatgagagagacataccggaatctgacctccgtgggcatcaactgggaatgttgggaccttgaagcctgcttcagaagcctgggaagaaacctgagagtgcaggtggtgaagagaaagtgcgagctgaccaacagcggcccctgcgccgagggcggcccaagcagcggcgcccctcctcccagcggcggcagcccagccggctccccaacctctaccgaggagggcacctctgagtccgccacccccgagagcggccctggcacctccaccgagcccagcgagggcagcgcacccggcagccctgccggcagccccacctccacagaggagggaaccagcaccgagcccagcgaaggcagcgccccaggcaccagcaccgagcctagtgagcaggagattaaacggatcaacaagatcagaagaagacttgtgaaagacagcaacaccaagaaggccggcaagacaggccccatgaaaaccctgctggttagagtgatgacacccgatctgagagagcggctggaaaacctgagaaagaagcctgaaaatatcccccagcccatcagcaatacatctagagccaacctgaataagctgctgaccgattacaccgaaatgaagaaggcgatcctgcatgtgtactgggaagagttccagaaggaccctgtgggcctgatgagccgggtggcccagcctgccagcaagaagatcgatcagaacaagctgaaacctgagatggacgagaagggcaacctgaccaccgccggctttgcctgctctcagtgtggccagcccctgttcgtgtacaagctggagcaggtgtctgagaagggcaaggcttacaccaactacttcggacggtgcaatgtggccgagcacgaaaagctgatcctgctggcccagctgaagcccgagaaggatagcgacgaagccgtgacatatagcctgggaaagtttgggcagagggccctggatttctacagcattcatgtgaccaaggagtccacccaccccgtgaagcccctggcccagatcgccggaaacagatacgcctccggacctgtgggaaaggccctgagcgacgcatgtatgggcacaatcgcctccttcctgtctaagtaccaggacatcatcatcgaacaccagaaggtggtgaagggcaaccagaagagactggagagcctgcgggagctggccggcaaggaaaacctggaataccctagcgtgaccctgccacctcagcctcacaccaaggagggcgttgatgcctacaacgaagtgatcgcccgggtgcgaatgtgggtgaacctgaacctgtggcagaagctgaagctaagcagagatgatgccaagcctctgctgagactgaagggattcccttcctttcctctggtcgagagacaggccaacgaagtggactggtgggacatggtgtgtaacgtgaagaagctgatcaacgagaaaaaggaggatggcaaggtgttttggcagaatctggctggctacaagagacaggaagccctgagaccatacctgagcagcgaggaagatcggaagaagggaaagaaattcgctcggtaccagctgggcgacctgctgctgcacctggaaaagaagcacggcgaggactggggaaaggtgtacgacgaggcctgggagcggattgacaagaaagtggaaggcctgagcaagcacatcaagctggaagaggaacggagaagcgaggacgcccagagcaaggccgccctgaccgactggctgcgggctaaggccagcttcgtgatcgagggcctgaaggaggccgacaaggacgagttctgcagatgcgagctgaagctgcagaagtggtacggggacctgcggggaaagcccttcgccatcgaagccgagaacagcatcctggacatcagcggcttcagcaagcagtacaactgtgccttcatctggcagaaggacggcgtgaagaagctgaacctgtacctgatcatcaactacttcaagggcggcaagctgcggttcaagaagatcaaacctgaagccttcgaagccaacagattctacaccgtgatcaacaaaaagagcggcgagatcgtgcccatggaggtgaacttcaacttcgacgaccccaacctgatcatcctgcctctggcctttggcaagagacagggcagagaattcatctggaacgacctgctgtccctggaaaccggcagcctgaagctggccaacggaagagtgatcgagaagacactgtacaacagaagaacccggcaggatgagcctgccctgttcgtggccctgaccttcgagcggcgggaggtcctggactcctccaatatcaaaccaatgaacctgatcggcgtggcaagaggcgaaaacatccccgccgtgatcgccctgaccgaccccgagggctgcccactgagccggtttaaggatagcctgggaaacccaacccacatcctgagaatcggcgagagctataaggagaagcagcggaccatccaggccaagaaggaggtggagcagcggagagccggcggctacagccggaagtacgccagcaaagccaagaatctggcagacgatatggtgagaaacaccgctagagatctgctgtactacgccgtgacccaggatgccatgctgatcttcgccaacctgagccggggcttcggccggcagggcaagcggaccttcatggccgagagacagtacacacggatggaggactggctgaccgccaagctggcctacgagggcctgagcaagacctacctgtccaagacactggcccagtacacctccaagacatgcagcaactgtgggtttaccatcaccagcgccgactacgacagggtgctggagaagctgaagaagacagcaacaggctggatgaccacaattaacggcaaggagctgaaggtggagggccagattacctactacaacagatacaagagacagaacgtagtcaaggacctgtccgtcgagctggatagactgagcgaagaatctgtgaacaacgacatctcctcctggacaaagggcagaagcggagaagctctgagcctcctgaagaaaagattctcccatagacccgtgcaggagaagttcgtgtgcctgaactgcggcttcgagacacacgcagccgagcaagccgccctgaacatcgccagatcctggctgttcctgcggagccaggagtacaagaaataccagacaaacaagacaaccggcaacaccgataagagagccttcgtcgagacctggcagtccttttaccggaagaagcttaaggaggtgtggaaacctgccgtgcggtctggcggatctggcggaggctccagccaggagcccgtgaccttcgaggacgtggccgtgtacttcacccagaaccagtgggccagcctggaccccacccagagggccctgtacagggaggtgatgctggagaactacgccaacatcaccagcctggccttccccttccccaagcccgacctgatcctgcagctggagaggggcgaggccaggtggggcctggacccctggatcgccatcgagggcgaggccctgggcggcgtgcacggcggcccaagcagcggcgcccctcctcccagcggcggcagcccagccggctccccaacctctaccgaggagggcacctctgagtccgccacccccgagagcggccctggcacctccaccgagcccagcgagggcagcgcacccggcagccctgccggcagccccacctccacagaggagggaaccagcaccgagcccagcgaaggcagcgccccaggcaccagcaccgagcctagtgagcaggagattaaacggatcaacaagatcagaagaagacttgtgaaagacagcaacaccaagaaggccggcaagacaggccccatgaaaaccctgctggttagagtgatgacacccgatctgagagagcggctggaaaacctgagaaagaagcctgaaaatatcccccagcccatcagcaatacatctagagccaacctgaataagctgctgaccgattacaccgaaatgaagaaggcgatcctgcatgtgtactgggaagagttccagaaggaccctgtgggcctgatgagccgggtggcccagcctgccagcaagaagatcgatcagaacaagctgaaacctgagatggacgagaagggcaacctgaccaccgccggctttgcctgctctcagtgtggccagcccctgttcgtgtacaagctggagcaggtgtctgagaagggcaaggcttacaccaactacttcggacggtgcaatgtggccgagcacgaaaagctgatcctgctggcccagctgaagcccgagaaggatagcgacgaagccgtgacatatagcctgggaaagtttgggcagagggccctggatttctacagcattcatgtgaccaaggagtccacccaccccgtgaagcccctggcccagatcgccggaaacagatacgcctccggacctgtgggaaaggccctgagcgacgcatgtatgggcacaatcgcctccttcctgtctaagtaccaggacatcatcatcgaacaccagaaggtggtgaagggcaaccagaagagactggagagcctgcgggagctggccggcaaggaaaacctggaataccctagcgtgaccctgccacctcagcctcacaccaaggagggcgttgatgcctacaacgaagtgatcgcccgggtgcgaatgtgggtgaacctgaacctgtggcagaagctgaagctaagcagagatgatgccaagcctctgctgagactgaagggattcccttcctttcctctggtcgagagacaggccaacgaagtggactggtgggacatggtgtgtaacgtgaagaagctgatcaacgagaaaaaggaggatggcaaggtgttttggcagaatctggctggctacaagagacaggaagccctgagaccatacctgagcagcgaggaagatcggaagaagggaaagaaattcgctcggtaccagctgggcgacctgctgctgcacctggaaaagaagcacggcgaggactggggaaaggtgtacgacgaggcctgggagcggattgacaagaaagtggaaggcctgagcaagcacatcaagctggaagaggaacggagaagcgaggacgcccagagcaaggccgccctgaccgactggctgcgggctaaggccagcttcgtgatcgagggcctgaaggaggccgacaaggacgagttctgcagatgcgagctgaagctgcagaagtggtacggggacctgcggggaaagcccttcgccatcgaagccgagaacagcatcctggacatcagcggcttcagcaagcagtacaactgtgccttcatctggcagaaggacggcgtgaagaagctgaacctgtacctgatcatcaactacttcaagggcggcaagctgcggttcaagaagatcaaacctgaagccttcgaagccaacagattctacaccgtgatcaacaaaaagagcggcgagatcgtgcccatggaggtgaacttcaacttcgacgaccccaacctgatcatcctgcctctggcctttggcaagagacagggcagagaattcatctggaacgacctgctgtccctggaaaccggcagcctgaagctggccaacggaagagtgatcgagaagacactgtacaacagaagaacccggcaggatgagcctgccctgttcgtggccctgaccttcgagcggcgggaggtcctggactcctccaatatcaaaccaatgaacctgatcggcgtggcaagaggcgaaaacatccccgccgtgatcgccctgaccgaccccgagggctgcccactgagccggtttaaggatagcctgggaaacccaacccacatcctgagaatcggcgagagctataaggagaagcagcggaccatccaggccaagaaggaggtggagcagcggagagccggcggctacagccggaagtacgccagcaaagccaagaatctggcagacgatatggtgagaaacaccgctagagatctgctgtactacgccgtgacccaggatgccatgctgatcttcgccaacctgagccggggcttcggccggcagggcaagcggaccttcatggccgagagacagtacacacggatggaggactggctgaccgccaagctggcctacgagggcctgagcaagacctacctgtccaagacactggcccagtacacctccaagacatgcagcaactgtgggtttaccatcaccagcgccgactacgacagggtgctggagaagctgaagaagacagcaacaggctggatgaccacaattaacggcaaggagctgaaggtggagggccagattacctactacaacagatacaagagacagaacgtagtcaaggacctgtccgtcgagctggatagactgagcgaagaatctgtgaacaacgacatctcctcctggacaaagggcagaagcggagaagctctgagcctcctgaagaaaagattctcccatagacccgtgcaggagaagttcgtgtgcctgaactgcggcttcgagacacacgcagccgagcaagccgccctgaacatcgccagatcctggctgttcctgcggagccaggagtacaagaaataccagacaaacaagacaaccggcaacaccgataagagagccttcgtcgagacctggcagtccttttaccggaagaagcttaaggaggtgtggaaacctgccgtgcggtctggcggatctggcggaggctcctagccaggagcccgtgaccttcgaggacgtggccgtgtacttcacccagaaccagtgggccagcctggaccccacccagagggccctgtacagggaggtgatgctggagaactacgccaacatcaccagcctggccttccccttccccaagcccgacctgatcctgcagctggagaggggcgaggccaggtggggcctggacccctggatcgccatcgagggcgaggccctgggcggcgtgcacggatctggctccggcagcggccccaagaaaaagagaaaagtctaagctgccttctgcggggcttgccttctggccatgcccttcttctctcccttgcacctgtacctcttggtctttgaataaagcctgagtaggaaggctagcaaaaaaaaaaaaaaaaaaaaaaaaaaaaaaaaaaaaaaaaaaaaaaaaaaaaaaaaaaaaaaaaaaaaaaaaaaaaaaaa

SEQ ID NO: 15949 - RNA, 9485 nt, synthetic construct
  source 1..9485: mol_type = other RNA
aggaaataagagagaaaagaagagtaagaagaaatataagagccaccatggcccctaagaagaagcgtaaagtgagccggatggaacgcctcgtctacgaggtgcggcagaagtgcagaaacatcgaggacatctgcatctcctgcggatctctgaacgtgaccctggagcacccactgttcatcggcggcatgtgccagaactgtaaaaactgttttctggagtgtgcctatcaatacgacgatgacggctaccagagctactgcaccatctgttgcggcggaagagaggtgctgatgtgtggaaataacaactgctgccggtgcttctgcgtggaatgcgtggacctgctggtgggccccggcgccgcccaggccgctattaaggaagatccttggaactgctacatgtgcggccacaagggcacatacggcctgctgagacggagagaggactggcctagcagactgcagatgttcttcgccaataaccacgaccaggagttcgacccccctaaggtgtaccctcccgtccccgccgagaagagaaagcccatccgggtcctgagcctgttcgatggcatcgccaccggtctgctggtgctgaaggacctgggcatccaggtggataggtacattgcctccgaggtgtgcgaggactccatcaccgtgggaatggtgcgtcatcagggcaagatcatgtacgtgggcgacgtgcggagcgtgacacagaagcatatccaggagtggggccctttcgacctggtgatcggcggcagcccttgcaatgacctgagcatcgtgaacccagcccggaagggcctgtacgagggaaccggcagactgttcttcgagttttacagactgctgcacgacgcccggcctaaggaaggcgacgaccggcccttcttttggctgttcgagaatgtggtggccatgggagtcagcgacaagcgggatattagccggttcctggagagcaaccccgtgatgatcgatgccaaggaagtgagcgccgcccaccgggccagatacttctggggcaatctgcctggcatgaacagacccctggccagcaccgtgaacgacaagctggagctgcaggagtgcctggagcacggccggatcgccaagttcagcaaggtgagaaccatcaccacccgaagcaacagcatcaaacaaggcaaggaccagcactttcctgtgttcatgaacgagaaggaggacatcctgtggtgtaccgagatggagagagtgttcgggttcccagtccactacacagatgtcagcaacatgtctagactggccagacagagactgctgggaagaagctggtccgtccctgtgatcagacacctgttcgcccctctgaaggagtacttcgcctgcgtgagcagcggcaacagcaacgccaacagccggggccccagcttctctagcggcctggtgccactgtccctgagagggagccacatgggccccatggagatctacaaaaccgtgagcgcctggaagcggcagcctgtgcgcgtgctgagcctgtttcggaatatcgataaagtcctgaaaagcctgggattcctggagagcggctctggctccggcggtggcaccctgaagtacgtggaggatgtgacaaacgtggtcagacgggatgtggagaagtggggccccttcgatctggtgtacggcagcacccaacccctgggcagctcttgtgaccggtgccctggctggtacatgtttcagttccaccggatcctgcagtacgccctgccgagacaggagtcccagcggccattcttttggattttcatggacaacttgctgctgaccgaggatgaccaggaaactaccactcggttcctgcagaccgaagccgtgaccctgcaggacgtgagaggccgggactaccagaacgccatgcgggtgtggtccaacatccctggactgaaaagcaagcacgcacctctgacccctaaagaagaggagtacctgcaggcccaggtgcggagcagaagcaagctggacgcccctaaggtggatctgctggtgaagaattgcctcctgcccctgagagagtacttcaagtatttcagccagaatagtctgcccctgggaggcagcggcggcggcgccctggtgacatttgaggacgtcgccgtgcggttcacccaggaggaatgggctctgctggatccttctcagaaaatcctgtaccgggacgtgatgagagagacataccggaatctgacctccgtgggcatcaactgggaatgttgggaccttgaagcctgcttcagaagcctgggaagaaacctgagagtgcaggtggtgaagagaaagtgcgagctgaccaacagcggcccctgcgccgagggcggcccaagcagcggcgcccctcctcccagcggcggcagcccagccggctccccaacctctaccgaggagggcacctctgagtccgccacccccgagagcggccctggcacctccaccgagcccagcgagggcagcgcacccggcagccctgccggcagccccacctccacagaggagggaaccagcaccgagcccagcgaaggcagcgccccaggcaccagcaccgagcctagtgagcaggagattaaacggatcaacaagatcagaagaagacttgtgaaagacagcaacaccaagaaggccggcaagacaggccccatgaaaaccctgctggttagagtgatgacacccgatctgagagagcggctggaaaacctgagaaagaagcctgaaaatatcccccagcccatcagcaatacatctagagccaacctgaataagctgctgaccgattacaccgaaatgaagaaggcgatcctgcatgtgtactgggaagagttccagaaggaccctgtgggcctgatgagccgggtggcccagcctgccagcaagaagatcgatcagaacaagctgaaacctgagatggacgagaagggcaacctgaccaccgccggctttgcctgctctcagtgtggccagcccctgttcgtgtacaagctggagcaggtgtctgagaagggcaaggcttacaccaactacttcggacggtgcaatgtggccgagcacgaaaagctgatcctgctggcccagctgaagcccgagaaggatagcgacgaagccgtgacatatagcctgggaaagtttgggcagagggccctggatttctacagcattcatgtgaccaaggagtccacccaccccgtgaagcccctggcccagatcgccggaaacagatacgcctccggacctgtgggaaaggccctgagcgacgcatgtatgggcacaatcgcctccttcctgtctaagtaccaggacatcatcatcgaacaccagaaggtggtgaagggcaaccagaagagactggagagcctgcgggagctggccggcaaggaaaacctggaataccctagcgtgaccctgccacctcagcctcacaccaaggagggcgttgatgcctacaacgaagtgatcgcccgggtgcgaatgtgggtgaacctgaacctgtggcagaagctgaagctaagcagagatgatgccaagcctctgctgagactgaagggattcccttcctttcctctggtcgagagacaggccaacgaagtggactggtgggacatggtgtgtaacgtgaagaagctgatcaacgagaaaaaggaggatggcaaggtgttttggcagaatctggctggctacaagagacaggaagccctgagaccatacctgagcagcgaggaagatcggaagaagggaaagaaattcgctcggtaccagctgggcgacctgctgctgcacctggaaaagaagcacggcgaggactggggaaaggtgtacgacgaggcctgggagcggattgacaagaaagtggaaggcctgagcaagcacatcaagctggaagaggaacggagaagcgaggacgcccagagcaaggccgccctgaccgactggctgcgggctaaggccagcttcgtgatcgagggcctgaaggaggccgacaaggacgagttctgcagatgcgagctgaagctgcagaagtggtacggggacctgcggggaaagcccttcgccatcgaagccgagaacagcatcctggacatcagcggcttcagcaagcagtacaactgtgccttcatctggcagaaggacggcgtgaagaagctgaacctgtacctgatcatcaactacttcaagggcggcaagctgcggttcaagaagatcaaacctgaagccttcgaagccaacagattctacaccgtgatcaacaaaaagagcggcgagatcgtgcccatggaggtgaacttcaacttcgacgaccccaacctgatcatcctgcctctggcctttggcaagagacagggcagagaattcatctggaacgacctgctgtccctggaaaccggcagcctgaagctggccaacggaagagtgatcgagaagacactgtacaacagaagaacccggcaggatgagcctgccctgttcgtggccctgaccttcgagcggcgggaggtcctggactcctccaatatcaaaccaatgaacctgatcggcgtggcaagaggcgaaaacatccccgccgtgatcgccctgaccgaccccgagggctgcccactgagccggtttaaggatagcctgggaaacccaacccacatcctgagaatcggcgagagctataaggagaagcagcggaccatccaggccaagaaggaggtggagcagcggagagccggcggctacagccggaagtacgccagcaaagccaagaatctggcagacgatatggtgagaaacaccgctagagatctgctgtactacgccgtgacccaggatgccatgctgatcttcgccaacctgagccggggcttcggccggcagggcaagcggaccttcatggccgagagacagtacacacggatggaggactggctgaccgccaagctggcctacgagggcctgagcaagacctacctgtccaagacactggcccagtacacctccaagacatgcagcaactgtgggtttaccatcaccagcgccgactacgacagggtgctggagaagctgaagaagacagcaacaggctggatgaccacaattaacggcaaggagctgaaggtggagggccagattacctactacaacagatacaagagacagaacgtagtcaaggacctgtccgtcgagctggatagactgagcgaagaatctgtgaacaacgacatctcctcctggacaaagggcagaagcggagaagctctgagcctcctgaagaaaagattctcccatagacccgtgcaggagaagttcgtgtgcctgaactgcggcttcgagacacacgcagccgagcaagccgccctgaacatcgccagatcctggctgttcctgcggagccaggagtacaagaaataccagacaaacaagacaaccggcaacaccgataagagagccttcgtcgagacctggcagtccttttaccggaagaagcttaaggaggtgtggaaacctgccgtgcggtctggcggatctggcggaggctccgtgaagttcgccgacgtggccgtgtacttcagccccgaggagtggggctgcctgaggcccgcccagagggccctgtacagggacgtgatgagggagaactacggccacctgggcgccctgggctgcgccggccccaagcccgccctgatcagctggctggagaggaacaccgaggactgggagcccgccgccctggacccccaggactgccccaggggcctgatggtgcagaggaagtggcccggcggcccaagcagcggcgcccctcctcccagcggcggcagcccagccggctccccaacctctaccgaggagggcacctctgagtccgccacccccgagagcggccctggcacctccaccgagcccagcgagggcagcgcacccggcagccctgccggcagccccacctccacagaggagggaaccagcaccgagcccagcgaaggcagcgccccaggcaccagcaccgagcctagtgagcaggagattaaacggatcaacaagatcagaagaagacttgtgaaagacagcaacaccaagaaggccggcaagacaggccccatgaaaaccctgctggttagagtgatgacacccgatctgagagagcggctggaaaacctgagaaagaagcctgaaaatatcccccagcccatcagcaatacatctagagccaacctgaataagctgctgaccgattacaccgaaatgaagaaggcgatcctgcatgtgtactgggaagagttccagaaggaccctgtgggcctgatgagccgggtggcccagcctgccagcaagaagatcgatcagaacaagctgaaacctgagatggacgagaagggcaacctgaccaccgccggctttgcctgctctcagtgtggccagcccctgttcgtgtacaagctggagcaggtgtctgagaagggcaaggcttacaccaactacttcggacggtgcaatgtggccgagcacgaaaagctgatcctgctggcccagctgaagcccgagaaggatagcgacgaagccgtgacatatagcctgggaaagtttgggcagagggccctggatttctacagcattcatgtgaccaaggagtccacccaccccgtgaagcccctggcccagatcgccggaaacagatacgcctccggacctgtgggaaaggccctgagcgacgcatgtatgggcacaatcgcctccttcctgtctaagtaccaggacatcatcatcgaacaccagaaggtggtgaagggcaaccagaagagactggagagcctgcgggagctggccggcaaggaaaacctggaataccctagcgtgaccctgccacctcagcctcacaccaaggagggcgttgatgcctacaacgaagtgatcgcccgggtgcgaatgtgggtgaacctgaacctgtggcagaagctgaagctaagcagagatgatgccaagcctctgctgagactgaagggattcccttcctttcctctggtcgagagacaggccaacgaagtggactggtgggacatggtgtgtaacgtgaagaagctgatcaacgagaaaaaggaggatggcaaggtgttttggcagaatctggctggctacaagagacaggaagccctgagaccatacctgagcagcgaggaagatcggaagaagggaaagaaattcgctcggtaccagctgggcgacctgctgctgcacctggaaaagaagcacggcgaggactggggaaaggtgtacgacgaggcctgggagcggattgacaagaaagtggaaggcctgagcaagcacatcaagctggaagaggaacggagaagcgaggacgcccagagcaaggccgccctgaccgactggctgcgggctaaggccagcttcgtgatcgagggcctgaaggaggccgacaaggacgagttctgcagatgcgagctgaagctgcagaagtggtacggggacctgcggggaaagcccttcgccatcgaagccgagaacagcatcctggacatcagcggcttcagcaagcagtacaactgtgccttcatctggcagaaggacggcgtgaagaagctgaacctgtacctgatcatcaactacttcaagggcggcaagctgcggttcaagaagatcaaacctgaagccttcgaagccaacagattctacaccgtgatcaacaaaaagagcggcgagatcgtgcccatggaggtgaacttcaacttcgacgaccccaacctgatcatcctgcctctggcctttggcaagagacagggcagagaattcatctggaacgacctgctgtccctggaaaccggcagcctgaagctggccaacggaagagtgatcgagaagacactgtacaacagaagaacccggcaggatgagcctgccctgttcgtggccctgaccttcgagcggcgggaggtcctggactcctccaatatcaaaccaatgaacctgatcggcgtggcaagaggcgaaaacatccccgccgtgatcgccctgaccgaccccgagggctgcccactgagccggtttaaggatagcctgggaaacccaacccacatcctgagaatcggcgagagctataaggagaagcagcggaccatccaggccaagaaggaggtggagcagcggagagccggcggctacagccggaagtacgccagcaaagccaagaatctggcagacgatatggtgagaaacaccgctagagatctgctgtactacgccgtgacccaggatgccatgctgatcttcgccaacctgagccggggcttcggccggcagggcaagcggaccttcatggccgagagacagtacacacggatggaggactggctgaccgccaagctggcctacgagggcctgagcaagacctacctgtccaagacactggcccagtacacctccaagacatgcagcaactgtgggtttaccatcaccagcgccgactacgacagggtgctggagaagctgaagaagacagcaacaggctggatgaccacaattaacggcaaggagctgaaggtggagggccagattacctactacaacagatacaagagacagaacgtagtcaaggacctgtccgtcgagctggatagactgagcgaagaatctgtgaacaacgacatctcctcctggacaaagggcagaagcggagaagctctgagcctcctgaagaaaagattctcccatagacccgtgcaggagaagttcgtgtgcctgaactgcggcttcgagacacacgcagccgagcaagccgccctgaacatcgccagatcctggctgttcctgcggagccaggagtacaagaaataccagacaaacaagacaaccggcaacaccgataagagagccttcgtcgagacctggcagtccttttaccggaagaagcttaaggaggtgtggaaacctgccgtgcggtctggcggatctggcggaggctcctgtgaagttcgccgacgtggccgtgtacttcagccccgaggagtggggctgcctgaggcccgcccagagggccctgtacagggacgtgatgagggagaactacggccacctgggcgccctgggctgcgccggccccaagcccgccctgatcagctggctggagaggaacaccgaggactgggagcccgccgccctggacccccaggactgccccaggggcctgatggtgcagaggaagtggcccggatctggctccggcagcggccccaagaaaaagagaaaagtctaagctgccttctgcggggcttgccttctggccatgcccttcttctctcccttgcacctgtacctcttggtctttgaataaagcctgagtaggaaggctagcaaaaaaaaaaaaaaaaaaaaaaaaaaaaaaaaaaaaaaaaaaaaaaaaaaaaaaaaaaaaaaaaaaaaaaaaaaaaaaaa

SEQ ID NO: 15950 - RNA, 9485 nt, synthetic construct
  source 1..9485: mol_type = other RNA
aggaaataagagagaaaagaagagtaagaagaaatataagagccaccatggcccctaagaagaagcgtaaagtgagccggatggaacgcctcgtctacgaggtgcggcagaagtgcagaaacatcgaggacatctgcatctcctgcggatctctgaacgtgaccctggagcacccactgttcatcggcggcatgtgccagaactgtaaaaactgttttctggagtgtgcctatcaatacgacgatgacggctaccagagctactgcaccatctgttgcggcggaagagaggtgctgatgtgtggaaataacaactgctgccggtgcttctgcgtggaatgcgtggacctgctggtgggccccggcgccgcccaggccgctattaaggaagatccttggaactgctacatgtgcggccacaagggcacatacggcctgctgagacggagagaggactggcctagcagactgcagatgttcttcgccaataaccacgaccaggagttcgacccccctaaggtgtaccctcccgtccccgccgagaagagaaagcccatccgggtcctgagcctgttcgatggcatcgccaccggtctgctggtgctgaaggacctgggcatccaggtggataggtacattgcctccgaggtgtgcgaggactccatcaccgtgggaatggtgcgtcatcagggcaagatcatgtacgtgggcgacgtgcggagcgtgacacagaagcatatccaggagtggggccctttcgacctggtgatcggcggcagcccttgcaatgacctgagcatcgtgaacccagcccggaagggcctgtacgagggaaccggcagactgttcttcgagttttacagactgctgcacgacgcccggcctaaggaaggcgacgaccggcccttcttttggctgttcgagaatgtggtggccatgggagtcagcgacaagcgggatattagccggttcctggagagcaaccccgtgatgatcgatgccaaggaagtgagcgccgcccaccgggccagatacttctggggcaatctgcctggcatgaacagacccctggccagcaccgtgaacgacaagctggagctgcaggagtgcctggagcacggccggatcgccaagttcagcaaggtgagaaccatcaccacccgaagcaacagcatcaaacaaggcaaggaccagcactttcctgtgttcatgaacgagaaggaggacatcctgtggtgtaccgagatggagagagtgttcgggttcccagtccactacacagatgtcagcaacatgtctagactggccagacagagactgctgggaagaagctggtccgtccctgtgatcagacacctgttcgcccctctgaaggagtacttcgcctgcgtgagcagcggcaacagcaacgccaacagccggggccccagcttctctagcggcctggtgccactgtccctgagagggagccacatgggccccatggagatctacaaaaccgtgagcgcctggaagcggcagcctgtgcgcgtgctgagcctgtttcggaatatcgataaagtcctgaaaagcctgggattcctggagagcggctctggctccggcggtggcaccctgaagtacgtggaggatgtgacaaacgtggtcagacgggatgtggagaagtggggccccttcgatctggtgtacggcagcacccaacccctgggcagctcttgtgaccggtgccctggctggtacatgtttcagttccaccggatcctgcagtacgccctgccgagacaggagtcccagcggccattcttttggattttcatggacaacttgctgctgaccgaggatgaccaggaaactaccactcggttcctgcagaccgaagccgtgaccctgcaggacgtgagaggccgggactaccagaacgccatgcgggtgtggtccaacatccctggactgaaaagcaagcacgcacctctgacccctaaagaagaggagtacctgcaggcccaggtgcggagcagaagcaagctggacgcccctaaggtggatctgctggtgaagaattgcctcctgcccctgagagagtacttcaagtatttcagccagaatagtctgcccctgggaggcagcggcggcggcgccctggtgacatttgaggacgtcgccgtgcggttcacccaggaggaatgggctctgctggatccttctcagaaaatcctgtaccgggacgtgatgagagagacataccggaatctgacctccgtgggcatcaactgggaatgttgggaccttgaagcctgcttcagaagcctgggaagaaacctgagagtgcaggtggtgaagagaaagtgcgagctgaccaacagcggcccctgcgccgagggcggcccaagcagcggcgcccctcctcccagcggcggcagcccagccggctccccaacctctaccgaggagggcacctctgagtccgccacccccgagagcggccctggcacctccaccgagcccagcgagggcagcgcacccggcagccctgccggcagccccacctccacagaggagggaaccagcaccgagcccagcgaaggcagcgccccaggcaccagcaccgagcctagtgagcaggagattaaacggatcaacaagatcagaagaagacttgtgaaagacagcaacaccaagaaggccggcaagacaggccccatgaaaaccctgctggttagagtgatgacacccgatctgagagagcggctggaaaacctgagaaagaagcctgaaaatatcccccagcccatcagcaatacatctagagccaacctgaataagctgctgaccgattacaccgaaatgaagaaggcgatcctgcatgtgtactgggaagagttccagaaggaccctgtgggcctgatgagccgggtggcccagcctgccagcaagaagatcgatcagaacaagctgaaacctgagatggacgagaagggcaacctgaccaccgccggctttgcctgctctcagtgtggccagcccctgttcgtgtacaagctggagcaggtgtctgagaagggcaaggcttacaccaactacttcggacggtgcaatgtggccgagcacgaaaagctgatcctgctggcccagctgaagcccgagaaggatagcgacgaagccgtgacatatagcctgggaaagtttgggcagagggccctggatttctacagcattcatgtgaccaaggagtccacccaccccgtgaagcccctggcccagatcgccggaaacagatacgcctccggacctgtgggaaaggccctgagcgacgcatgtatgggcacaatcgcctccttcctgtctaagtaccaggacatcatcatcgaacaccagaaggtggtgaagggcaaccagaagagactggagagcctgcgggagctggccggcaaggaaaacctggaataccctagcgtgaccctgccacctcagcctcacaccaaggagggcgttgatgcctacaacgaagtgatcgcccgggtgcgaatgtgggtgaacctgaacctgtggcagaagctgaagctaagcagagatgatgccaagcctctgctgagactgaagggattcccttcctttcctctggtcgagagacaggccaacgaagtggactggtgggacatggtgtgtaacgtgaagaagctgatcaacgagaaaaaggaggatggcaaggtgttttggcagaatctggctggctacaagagacaggaagccctgagaccatacctgagcagcgaggaagatcggaagaagggaaagaaattcgctcggtaccagctgggcgacctgctgctgcacctggaaaagaagcacggcgaggactggggaaaggtgtacgacgaggcctgggagcggattgacaagaaagtggaaggcctgagcaagcacatcaagctggaagaggaacggagaagcgaggacgcccagagcaaggccgccctgaccgactggctgcgggctaaggccagcttcgtgatcgagggcctgaaggaggccgacaaggacgagttctgcagatgcgagctgaagctgcagaagtggtacggggacctgcggggaaagcccttcgccatcgaagccgagaacagcatcctggacatcagcggcttcagcaagcagtacaactgtgccttcatctggcagaaggacggcgtgaagaagctgaacctgtacctgatcatcaactacttcaagggcggcaagctgcggttcaagaagatcaaacctgaagccttcgaagccaacagattctacaccgtgatcaacaaaaagagcggcgagatcgtgcccatggaggtgaacttcaacttcgacgaccccaacctgatcatcctgcctctggcctttggcaagagacagggcagagaattcatctggaacgacctgctgtccctggaaaccggcagcctgaagctggccaacggaagagtgatcgagaagacactgtacaacagaagaacccggcaggatgagcctgccctgttcgtggccctgaccttcgagcggcgggaggtcctggactcctccaatatcaaaccaatgaacctgatcggcgtggcaagaggcgaaaacatccccgccgtgatcgccctgaccgaccccgagggctgcccactgagccggtttaaggatagcctgggaaacccaacccacatcctgagaatcggcgagagctataaggagaagcagcggaccatccaggccaagaaggaggtggagcagcggagagccggcggctacagccggaagtacgccagcaaagccaagaatctggcagacgatatggtgagaaacaccgctagagatctgctgtactacgccgtgacccaggatgccatgctgatcttcgccaacctgagccggggcttcggccggcagggcaagcggaccttcatggccgagagacagtacacacggatggaggactggctgaccgccaagctggcctacgagggcctgagcaagacctacctgtccaagacactggcccagtacacctccaagacatgcagcaactgtgggtttaccatcaccagcgccgactacgacagggtgctggagaagctgaagaagacagcaacaggctggatgaccacaattaacggcaaggagctgaaggtggagggccagattacctactacaacagatacaagagacagaacgtagtcaaggacctgtccgtcgagctggatagactgagcgaagaatctgtgaacaacgacatctcctcctggacaaagggcagaagcggagaagctctgagcctcctgaagaaaagattctcccatagacccgtgcaggagaagttcgtgtgcctgaactgcggcttcgagacacacgcagccgagcaagccgccctgaacatcgccagatcctggctgttcctgcggagccaggagtacaagaaataccagacaaacaagacaaccggcaacaccgataagagagccttcgtcgagacctggcagtccttttaccggaagaagcttaaggaggtgtggaaacctgccgtgcggtctggcggatctggcggaggctccgaccccgcccaggtgcccgtggccgccgacctgctgaccgaccacgaggagcagggctacgtgaccttcgaggacgtggccgtgtacttcagccaggaggagtggaggctgctggacgacgcccagaggctgctgtacaggaacgtgatgctggagaacttcaccctgctggccagcctgggcctggccagcagcaagacccacgagatcacccagctggagagctgggaggagcccttcatgggcggcccaagcagcggcgcccctcctcccagcggcggcagcccagccggctccccaacctctaccgaggagggcacctctgagtccgccacccccgagagcggccctggcacctccaccgagcccagcgagggcagcgcacccggcagccctgccggcagccccacctccacagaggagggaaccagcaccgagcccagcgaaggcagcgccccaggcaccagcaccgagcctagtgagcaggagattaaacggatcaacaagatcagaagaagacttgtgaaagacagcaacaccaagaaggccggcaagacaggccccatgaaaaccctgctggttagagtgatgacacccgatctgagagagcggctggaaaacctgagaaagaagcctgaaaatatcccccagcccatcagcaatacatctagagccaacctgaataagctgctgaccgattacaccgaaatgaagaaggcgatcctgcatgtgtactgggaagagttccagaaggaccctgtgggcctgatgagccgggtggcccagcctgccagcaagaagatcgatcagaacaagctgaaacctgagatggacgagaagggcaacctgaccaccgccggctttgcctgctctcagtgtggccagcccctgttcgtgtacaagctggagcaggtgtctgagaagggcaaggcttacaccaactacttcggacggtgcaatgtggccgagcacgaaaagctgatcctgctggcccagctgaagcccgagaaggatagcgacgaagccgtgacatatagcctgggaaagtttgggcagagggccctggatttctacagcattcatgtgaccaaggagtccacccaccccgtgaagcccctggcccagatcgccggaaacagatacgcctccggacctgtgggaaaggccctgagcgacgcatgtatgggcacaatcgcctccttcctgtctaagtaccaggacatcatcatcgaacaccagaaggtggtgaagggcaaccagaagagactggagagcctgcgggagctggccggcaaggaaaacctggaataccctagcgtgaccctgccacctcagcctcacaccaaggagggcgttgatgcctacaacgaagtgatcgcccgggtgcgaatgtgggtgaacctgaacctgtggcagaagctgaagctaagcagagatgatgccaagcctctgctgagactgaagggattcccttcctttcctctggtcgagagacaggccaacgaagtggactggtgggacatggtgtgtaacgtgaagaagctgatcaacgagaaaaaggaggatggcaaggtgttttggcagaatctggctggctacaagagacaggaagccctgagaccatacctgagcagcgaggaagatcggaagaagggaaagaaattcgctcggtaccagctgggcgacctgctgctgcacctggaaaagaagcacggcgaggactggggaaaggtgtacgacgaggcctgggagcggattgacaagaaagtggaaggcctgagcaagcacatcaagctggaagaggaacggagaagcgaggacgcccagagcaaggccgccctgaccgactggctgcgggctaaggccagcttcgtgatcgagggcctgaaggaggccgacaaggacgagttctgcagatgcgagctgaagctgcagaagtggtacggggacctgcggggaaagcccttcgccatcgaagccgagaacagcatcctggacatcagcggcttcagcaagcagtacaactgtgccttcatctggcagaaggacggcgtgaagaagctgaacctgtacctgatcatcaactacttcaagggcggcaagctgcggttcaagaagatcaaacctgaagccttcgaagccaacagattctacaccgtgatcaacaaaaagagcggcgagatcgtgcccatggaggtgaacttcaacttcgacgaccccaacctgatcatcctgcctctggcctttggcaagagacagggcagagaattcatctggaacgacctgctgtccctggaaaccggcagcctgaagctggccaacggaagagtgatcgagaagacactgtacaacagaagaacccggcaggatgagcctgccctgttcgtggccctgaccttcgagcggcgggaggtcctggactcctccaatatcaaaccaatgaacctgatcggcgtggcaagaggcgaaaacatccccgccgtgatcgccctgaccgaccccgagggctgcccactgagccggtttaaggatagcctgggaaacccaacccacatcctgagaatcggcgagagctataaggagaagcagcggaccatccaggccaagaaggaggtggagcagcggagagccggcggctacagccggaagtacgccagcaaagccaagaatctggcagacgatatggtgagaaacaccgctagagatctgctgtactacgccgtgacccaggatgccatgctgatcttcgccaacctgagccggggcttcggccggcagggcaagcggaccttcatggccgagagacagtacacacggatggaggactggctgaccgccaagctggcctacgagggcctgagcaagacctacctgtccaagacactggcccagtacacctccaagacatgcagcaactgtgggtttaccatcaccagcgccgactacgacagggtgctggagaagctgaagaagacagcaacaggctggatgaccacaattaacggcaaggagctgaaggtggagggccagattacctactacaacagatacaagagacagaacgtagtcaaggacctgtccgtcgagctggatagactgagcgaagaatctgtgaacaacgacatctcctcctggacaaagggcagaagcggagaagctctgagcctcctgaagaaaagattctcccatagacccgtgcaggagaagttcgtgtgcctgaactgcggcttcgagacacacgcagccgagcaagccgccctgaacatcgccagatcctggctgttcctgcggagccaggagtacaagaaataccagacaaacaagacaaccggcaacaccgataagagagccttcgtcgagacctggcagtccttttaccggaagaagcttaaggaggtgtggaaacctgccgtgcggtctggcggatctggcggaggctcctgaccccgcccaggtgcccgtggccgccgacctgctgaccgaccacgaggagcagggctacgtgaccttcgaggacgtggccgtgtacttcagccaggaggagtggaggctgctggacgacgcccagaggctgctgtacaggaacgtgatgctggagaacttcaccctgctggccagcctgggcctggccagcagcaagacccacgagatcacccagctggagagctgggaggagcccttcatgggatctggctccggcagcggccccaagaaaaagagaaaagtctaagctgccttctgcggggcttgccttctggccatgcccttcttctctcccttgcacctgtacctcttggtctttgaataaagcctgagtaggaaggctagcaaaaaaaaaaaaaaaaaaaaaaaaaaaaaaaaaaaaaaaaaaaaaaaaaaaaaaaaaaaaaaaaaaaaaaaaaaaaaaaa

SEQ ID NO: 15951 - RNA, 9485 nt, synthetic construct
  source 1..9485: mol_type = other RNA
aggaaataagagagaaaagaagagtaagaagaaatataagagccaccatggcccctaagaagaagcgtaaagtgagccggatggaacgcctcgtctacgaggtgcggcagaagtgcagaaacatcgaggacatctgcatctcctgcggatctctgaacgtgaccctggagcacccactgttcatcggcggcatgtgccagaactgtaaaaactgttttctggagtgtgcctatcaatacgacgatgacggctaccagagctactgcaccatctgttgcggcggaagagaggtgctgatgtgtggaaataacaactgctgccggtgcttctgcgtggaatgcgtggacctgctggtgggccccggcgccgcccaggccgctattaaggaagatccttggaactgctacatgtgcggccacaagggcacatacggcctgctgagacggagagaggactggcctagcagactgcagatgttcttcgccaataaccacgaccaggagttcgacccccctaaggtgtaccctcccgtccccgccgagaagagaaagcccatccgggtcctgagcctgttcgatggcatcgccaccggtctgctggtgctgaaggacctgggcatccaggtggataggtacattgcctccgaggtgtgcgaggactccatcaccgtgggaatggtgcgtcatcagggcaagatcatgtacgtgggcgacgtgcggagcgtgacacagaagcatatccaggagtggggccctttcgacctggtgatcggcggcagcccttgcaatgacctgagcatcgtgaacccagcccggaagggcctgtacgagggaaccggcagactgttcttcgagttttacagactgctgcacgacgcccggcctaaggaaggcgacgaccggcccttcttttggctgttcgagaatgtggtggccatgggagtcagcgacaagcgggatattagccggttcctggagagcaaccccgtgatgatcgatgccaaggaagtgagcgccgcccaccgggccagatacttctggggcaatctgcctggcatgaacagacccctggccagcaccgtgaacgacaagctggagctgcaggagtgcctggagcacggccggatcgccaagttcagcaaggtgagaaccatcaccacccgaagcaacagcatcaaacaaggcaaggaccagcactttcctgtgttcatgaacgagaaggaggacatcctgtggtgtaccgagatggagagagtgttcgggttcccagtccactacacagatgtcagcaacatgtctagactggccagacagagactgctgggaagaagctggtccgtccctgtgatcagacacctgttcgcccctctgaaggagtacttcgcctgcgtgagcagcggcaacagcaacgccaacagccggggccccagcttctctagcggcctggtgccactgtccctgagagggagccacatgggccccatggagatctacaaaaccgtgagcgcctggaagcggcagcctgtgcgcgtgctgagcctgtttcggaatatcgataaagtcctgaaaagcctgggattcctggagagcggctctggctccggcggtggcaccctgaagtacgtggaggatgtgacaaacgtggtcagacgggatgtggagaagtggggccccttcgatctggtgtacggcagcacccaacccctgggcagctcttgtgaccggtgccctggctggtacatgtttcagttccaccggatcctgcagtacgccctgccgagacaggagtcccagcggccattcttttggattttcatggacaacttgctgctgaccgaggatgaccaggaaactaccactcggttcctgcagaccgaagccgtgaccctgcaggacgtgagaggccgggactaccagaacgccatgcgggtgtggtccaacatccctggactgaaaagcaagcacgcacctctgacccctaaagaagaggagtacctgcaggcccaggtgcggagcagaagcaagctggacgcccctaaggtggatctgctggtgaagaattgcctcctgcccctgagagagtacttcaagtatttcagccagaatagtctgcccctgggaggcagcggcggcggcgccctggtgacatttgaggacgtcgccgtgcggttcacccaggaggaatgggctctgctggatccttctcagaaaatcctgtaccgggacgtgatgagagagacataccggaatctgacctccgtgggcatcaactgggaatgttgggaccttgaagcctgcttcagaagcctgggaagaaacctgagagtgcaggtggtgaagagaaagtgcgagctgaccaacagcggcccctgcgccgagggcggcccaagcagcggcgcccctcctcccagcggcggcagcccagccggctccccaacctctaccgaggagggcacctctgagtccgccacccccgagagcggccctggcacctccaccgagcccagcgagggcagcgcacccggcagccctgccggcagccccacctccacagaggagggaaccagcaccgagcccagcgaaggcagcgccccaggcaccagcaccgagcctagtgagcaggagattaaacggatcaacaagatcagaagaagacttgtgaaagacagcaacaccaagaaggccggcaagacaggccccatgaaaaccctgctggttagagtgatgacacccgatctgagagagcggctggaaaacctgagaaagaagcctgaaaatatcccccagcccatcagcaatacatctagagccaacctgaataagctgctgaccgattacaccgaaatgaagaaggcgatcctgcatgtgtactgggaagagttccagaaggaccctgtgggcctgatgagccgggtggcccagcctgccagcaagaagatcgatcagaacaagctgaaacctgagatggacgagaagggcaacctgaccaccgccggctttgcctgctctcagtgtggccagcccctgttcgtgtacaagctggagcaggtgtctgagaagggcaaggcttacaccaactacttcggacggtgcaatgtggccgagcacgaaaagctgatcctgctggcccagctgaagcccgagaaggatagcgacgaagccgtgacatatagcctgggaaagtttgggcagagggccctggatttctacagcattcatgtgaccaaggagtccacccaccccgtgaagcccctggcccagatcgccggaaacagatacgcctccggacctgtgggaaaggccctgagcgacgcatgtatgggcacaatcgcctccttcctgtctaagtaccaggacatcatcatcgaacaccagaaggtggtgaagggcaaccagaagagactggagagcctgcgggagctggccggcaaggaaaacctggaataccctagcgtgaccctgccacctcagcctcacaccaaggagggcgttgatgcctacaacgaagtgatcgcccgggtgcgaatgtgggtgaacctgaacctgtggcagaagctgaagctaagcagagatgatgccaagcctctgctgagactgaagggattcccttcctttcctctggtcgagagacaggccaacgaagtggactggtgggacatggtgtgtaacgtgaagaagctgatcaacgagaaaaaggaggatggcaaggtgttttggcagaatctggctggctacaagagacaggaagccctgagaccatacctgagcagcgaggaagatcggaagaagggaaagaaattcgctcggtaccagctgggcgacctgctgctgcacctggaaaagaagcacggcgaggactggggaaaggtgtacgacgaggcctgggagcggattgacaagaaagtggaaggcctgagcaagcacatcaagctggaagaggaacggagaagcgaggacgcccagagcaaggccgccctgaccgactggctgcgggctaaggccagcttcgtgatcgagggcctgaaggaggccgacaaggacgagttctgcagatgcgagctgaagctgcagaagtggtacggggacctgcggggaaagcccttcgccatcgaagccgagaacagcatcctggacatcagcggcttcagcaagcagtacaactgtgccttcatctggcagaaggacggcgtgaagaagctgaacctgtacctgatcatcaactacttcaagggcggcaagctgcggttcaagaagatcaaacctgaagccttcgaagccaacagattctacaccgtgatcaacaaaaagagcggcgagatcgtgcccatggaggtgaacttcaacttcgacgaccccaacctgatcatcctgcctctggcctttggcaagagacagggcagagaattcatctggaacgacctgctgtccctggaaaccggcagcctgaagctggccaacggaagagtgatcgagaagacactgtacaacagaagaacccggcaggatgagcctgccctgttcgtggccctgaccttcgagcggcgggaggtcctggactcctccaatatcaaaccaatgaacctgatcggcgtggcaagaggcgaaaacatccccgccgtgatcgccctgaccgaccccgagggctgcccactgagccggtttaaggatagcctgggaaacccaacccacatcctgagaatcggcgagagctataaggagaagcagcggaccatccaggccaagaaggaggtggagcagcggagagccggcggctacagccggaagtacgccagcaaagccaagaatctggcagacgatatggtgagaaacaccgctagagatctgctgtactacgccgtgacccaggatgccatgctgatcttcgccaacctgagccggggcttcggccggcagggcaagcggaccttcatggccgagagacagtacacacggatggaggactggctgaccgccaagctggcctacgagggcctgagcaagacctacctgtccaagacactggcccagtacacctccaagacatgcagcaactgtgggtttaccatcaccagcgccgactacgacagggtgctggagaagctgaagaagacagcaacaggctggatgaccacaattaacggcaaggagctgaaggtggagggccagattacctactacaacagatacaagagacagaacgtagtcaaggacctgtccgtcgagctggatagactgagcgaagaatctgtgaacaacgacatctcctcctggacaaagggcagaagcggagaagctctgagcctcctgaagaaaagattctcccatagacccgtgcaggagaagttcgtgtgcctgaactgcggcttcgagacacacgcagccgagcaagccgccctgaacatcgccagatcctggctgttcctgcggagccaggagtacaagaaataccagacaaacaagacaaccggcaacaccgataagagagccttcgtcgagacctggcagtccttttaccggaagaagcttaaggaggtgtggaaacctgccgtgcggtctggcggatctggcggaggctcccacagggtgggcctgatcaggagctacaacagcaagaccatgacctgcttccaggagctggtgaccttcagggacgtggccatcgacttcagcaggcaggagtgggagtacctggaccccaaccagagggacctgtacagggacgtgatgctggagaactacaggaacctggtgagcctgggcggccacagcatcagcaagcccgtggtggtggacctgctggagaggggcaaggagccctggggcggcccaagcagcggcgcccctcctcccagcggcggcagcccagccggctccccaacctctaccgaggagggcacctctgagtccgccacccccgagagcggccctggcacctccaccgagcccagcgagggcagcgcacccggcagccctgccggcagccccacctccacagaggagggaaccagcaccgagcccagcgaaggcagcgccccaggcaccagcaccgagcctagtgagcaggagattaaacggatcaacaagatcagaagaagacttgtgaaagacagcaacaccaagaaggccggcaagacaggccccatgaaaaccctgctggttagagtgatgacacccgatctgagagagcggctggaaaacctgagaaagaagcctgaaaatatcccccagcccatcagcaatacatctagagccaacctgaataagctgctgaccgattacaccgaaatgaagaaggcgatcctgcatgtgtactgggaagagttccagaaggaccctgtgggcctgatgagccgggtggcccagcctgccagcaagaagatcgatcagaacaagctgaaacctgagatggacgagaagggcaacctgaccaccgccggctttgcctgctctcagtgtggccagcccctgttcgtgtacaagctggagcaggtgtctgagaagggcaaggcttacaccaactacttcggacggtgcaatgtggccgagcacgaaaagctgatcctgctggcccagctgaagcccgagaaggatagcgacgaagccgtgacatatagcctgggaaagtttgggcagagggccctggatttctacagcattcatgtgaccaaggagtccacccaccccgtgaagcccctggcccagatcgccggaaacagatacgcctccggacctgtgggaaaggccctgagcgacgcatgtatgggcacaatcgcctccttcctgtctaagtaccaggacatcatcatcgaacaccagaaggtggtgaagggcaaccagaagagactggagagcctgcgggagctggccggcaaggaaaacctggaataccctagcgtgaccctgccacctcagcctcacaccaaggagggcgttgatgcctacaacgaagtgatcgcccgggtgcgaatgtgggtgaacctgaacctgtggcagaagctgaagctaagcagagatgatgccaagcctctgctgagactgaagggattcccttcctttcctctggtcgagagacaggccaacgaagtggactggtgggacatggtgtgtaacgtgaagaagctgatcaacgagaaaaaggaggatggcaaggtgttttggcagaatctggctggctacaagagacaggaagccctgagaccatacctgagcagcgaggaagatcggaagaagggaaagaaattcgctcggtaccagctgggcgacctgctgctgcacctggaaaagaagcacggcgaggactggggaaaggtgtacgacgaggcctgggagcggattgacaagaaagtggaaggcctgagcaagcacatcaagctggaagaggaacggagaagcgaggacgcccagagcaaggccgccctgaccgactggctgcgggctaaggccagcttcgtgatcgagggcctgaaggaggccgacaaggacgagttctgcagatgcgagctgaagctgcagaagtggtacggggacctgcggggaaagcccttcgccatcgaagccgagaacagcatcctggacatcagcggcttcagcaagcagtacaactgtgccttcatctggcagaaggacggcgtgaagaagctgaacctgtacctgatcatcaactacttcaagggcggcaagctgcggttcaagaagatcaaacctgaagccttcgaagccaacagattctacaccgtgatcaacaaaaagagcggcgagatcgtgcccatggaggtgaacttcaacttcgacgaccccaacctgatcatcctgcctctggcctttggcaagagacagggcagagaattcatctggaacgacctgctgtccctggaaaccggcagcctgaagctggccaacggaagagtgatcgagaagacactgtacaacagaagaacccggcaggatgagcctgccctgttcgtggccctgaccttcgagcggcgggaggtcctggactcctccaatatcaaaccaatgaacctgatcggcgtggcaagaggcgaaaacatccccgccgtgatcgccctgaccgaccccgagggctgcccactgagccggtttaaggatagcctgggaaacccaacccacatcctgagaatcggcgagagctataaggagaagcagcggaccatccaggccaagaaggaggtggagcagcggagagccggcggctacagccggaagtacgccagcaaagccaagaatctggcagacgatatggtgagaaacaccgctagagatctgctgtactacgccgtgacccaggatgccatgctgatcttcgccaacctgagccggggcttcggccggcagggcaagcggaccttcatggccgagagacagtacacacggatggaggactggctgaccgccaagctggcctacgagggcctgagcaagacctacctgtccaagacactggcccagtacacctccaagacatgcagcaactgtgggtttaccatcaccagcgccgactacgacagggtgctggagaagctgaagaagacagcaacaggctggatgaccacaattaacggcaaggagctgaaggtggagggccagattacctactacaacagatacaagagacagaacgtagtcaaggacctgtccgtcgagctggatagactgagcgaagaatctgtgaacaacgacatctcctcctggacaaagggcagaagcggagaagctctgagcctcctgaagaaaagattctcccatagacccgtgcaggagaagttcgtgtgcctgaactgcggcttcgagacacacgcagccgagcaagccgccctgaacatcgccagatcctggctgttcctgcggagccaggagtacaagaaataccagacaaacaagacaaccggcaacaccgataagagagccttcgtcgagacctggcagtccttttaccggaagaagcttaaggaggtgtggaaacctgccgtgcggtctggcggatctggcggaggctcctcacagggtgggcctgatcaggagctacaacagcaagaccatgacctgcttccaggagctggtgaccttcagggacgtggccatcgacttcagcaggcaggagtgggagtacctggaccccaaccagagggacctgtacagggacgtgatgctggagaactacaggaacctggtgagcctgggcggccacagcatcagcaagcccgtggtggtggacctgctggagaggggcaaggagccctggggatctggctccggcagcggccccaagaaaaagagaaaagtctaagctgccttctgcggggcttgccttctggccatgcccttcttctctcccttgcacctgtacctcttggtctttgaataaagcctgagtaggaaggctagcaaaaaaaaaaaaaaaaaaaaaaaaaaaaaaaaaaaaaaaaaaaaaaaaaaaaaaaaaaaaaaaaaaaaaaaaaaaaaaaa

SEQ ID NO: 15952 - RNA, 9485 nt, synthetic construct
  source 1..9485: mol_type = other RNA
aggaaataagagagaaaagaagagtaagaagaaatataagagccaccatggcccctaagaagaagcgtaaagtgagccggatggaacgcctcgtctacgaggtgcggcagaagtgcagaaacatcgaggacatctgcatctcctgcggatctctgaacgtgaccctggagcacccactgttcatcggcggcatgtgccagaactgtaaaaactgttttctggagtgtgcctatcaatacgacgatgacggctaccagagctactgcaccatctgttgcggcggaagagaggtgctgatgtgtggaaataacaactgctgccggtgcttctgcgtggaatgcgtggacctgctggtgggccccggcgccgcccaggccgctattaaggaagatccttggaactgctacatgtgcggccacaagggcacatacggcctgctgagacggagagaggactggcctagcagactgcagatgttcttcgccaataaccacgaccaggagttcgacccccctaaggtgtaccctcccgtccccgccgagaagagaaagcccatccgggtcctgagcctgttcgatggcatcgccaccggtctgctggtgctgaaggacctgggcatccaggtggataggtacattgcctccgaggtgtgcgaggactccatcaccgtgggaatggtgcgtcatcagggcaagatcatgtacgtgggcgacgtgcggagcgtgacacagaagcatatccaggagtggggccctttcgacctggtgatcggcggcagcccttgcaatgacctgagcatcgtgaacccagcccggaagggcctgtacgagggaaccggcagactgttcttcgagttttacagactgctgcacgacgcccggcctaaggaaggcgacgaccggcccttcttttggctgttcgagaatgtggtggccatgggagtcagcgacaagcgggatattagccggttcctggagagcaaccccgtgatgatcgatgccaaggaagtgagcgccgcccaccgggccagatacttctggggcaatctgcctggcatgaacagacccctggccagcaccgtgaacgacaagctggagctgcaggagtgcctggagcacggccggatcgccaagttcagcaaggtgagaaccatcaccacccgaagcaacagcatcaaacaaggcaaggaccagcactttcctgtgttcatgaacgagaaggaggacatcctgtggtgtaccgagatggagagagtgttcgggttcccagtccactacacagatgtcagcaacatgtctagactggccagacagagactgctgggaagaagctggtccgtccctgtgatcagacacctgttcgcccctctgaaggagtacttcgcctgcgtgagcagcggcaacagcaacgccaacagccggggccccagcttctctagcggcctggtgccactgtccctgagagggagccacatgggccccatggagatctacaaaaccgtgagcgcctggaagcggcagcctgtgcgcgtgctgagcctgtttcggaatatcgataaagtcctgaaaagcctgggattcctggagagcggctctggctccggcggtggcaccctgaagtacgtggaggatgtgacaaacgtggtcagacgggatgtggagaagtggggccccttcgatctggtgtacggcagcacccaacccctgggcagctcttgtgaccggtgccctggctggtacatgtttcagttccaccggatcctgcagtacgccctgccgagacaggagtcccagcggccattcttttggattttcatggacaacttgctgctgaccgaggatgaccaggaaactaccactcggttcctgcagaccgaagccgtgaccctgcaggacgtgagaggccgggactaccagaacgccatgcgggtgtggtccaacatccctggactgaaaagcaagcacgcacctctgacccctaaagaagaggagtacctgcaggcccaggtgcggagcagaagcaagctggacgcccctaaggtggatctgctggtgaagaattgcctcctgcccctgagagagtacttcaagtatttcagccagaatagtctgcccctgggaggcagcggcggcggcgccctggtgacatttgaggacgtcgccgtgcggttcacccaggaggaatgggctctgctggatccttctcagaaaatcctgtaccgggacgtgatgagagagacataccggaatctgacctccgtgggcatcaactgggaatgttgggaccttgaagcctgcttcagaagcctgggaagaaacctgagagtgcaggtggtgaagagaaagtgcgagctgaccaacagcggcccctgcgccgagggcggcccaagcagcggcgcccctcctcccagcggcggcagcccagccggctccccaacctctaccgaggagggcacctctgagtccgccacccccgagagcggccctggcacctccaccgagcccagcgagggcagcgcacccggcagccctgccggcagccccacctccacagaggagggaaccagcaccgagcccagcgaaggcagcgccccaggcaccagcaccgagcctagtgagcaggagattaaacggatcaacaagatcagaagaagacttgtgaaagacagcaacaccaagaaggccggcaagacaggccccatgaaaaccctgctggttagagtgatgacacccgatctgagagagcggctggaaaacctgagaaagaagcctgaaaatatcccccagcccatcagcaatacatctagagccaacctgaataagctgctgaccgattacaccgaaatgaagaaggcgatcctgcatgtgtactgggaagagttccagaaggaccctgtgggcctgatgagccgggtggcccagcctgccagcaagaagatcgatcagaacaagctgaaacctgagatggacgagaagggcaacctgaccaccgccggctttgcctgctctcagtgtggccagcccctgttcgtgtacaagctggagcaggtgtctgagaagggcaaggcttacaccaactacttcggacggtgcaatgtggccgagcacgaaaagctgatcctgctggcccagctgaagcccgagaaggatagcgacgaagccgtgacatatagcctgggaaagtttgggcagagggccctggatttctacagcattcatgtgaccaaggagtccacccaccccgtgaagcccctggcccagatcgccggaaacagatacgcctccggacctgtgggaaaggccctgagcgacgcatgtatgggcacaatcgcctccttcctgtctaagtaccaggacatcatcatcgaacaccagaaggtggtgaagggcaaccagaagagactggagagcctgcgggagctggccggcaaggaaaacctggaataccctagcgtgaccctgccacctcagcctcacaccaaggagggcgttgatgcctacaacgaagtgatcgcccgggtgcgaatgtgggtgaacctgaacctgtggcagaagctgaagctaagcagagatgatgccaagcctctgctgagactgaagggattcccttcctttcctctggtcgagagacaggccaacgaagtggactggtgggacatggtgtgtaacgtgaagaagctgatcaacgagaaaaaggaggatggcaaggtgttttggcagaatctggctggctacaagagacaggaagccctgagaccatacctgagcagcgaggaagatcggaagaagggaaagaaattcgctcggtaccagctgggcgacctgctgctgcacctggaaaagaagcacggcgaggactggggaaaggtgtacgacgaggcctgggagcggattgacaagaaagtggaaggcctgagcaagcacatcaagctggaagaggaacggagaagcgaggacgcccagagcaaggccgccctgaccgactggctgcgggctaaggccagcttcgtgatcgagggcctgaaggaggccgacaaggacgagttctgcagatgcgagctgaagctgcagaagtggtacggggacctgcggggaaagcccttcgccatcgaagccgagaacagcatcctggacatcagcggcttcagcaagcagtacaactgtgccttcatctggcagaaggacggcgtgaagaagctgaacctgtacctgatcatcaactacttcaagggcggcaagctgcggttcaagaagatcaaacctgaagccttcgaagccaacagattctacaccgtgatcaacaaaaagagcggcgagatcgtgcccatggaggtgaacttcaacttcgacgaccccaacctgatcatcctgcctctggcctttggcaagagacagggcagagaattcatctggaacgacctgctgtccctggaaaccggcagcctgaagctggccaacggaagagtgatcgagaagacactgtacaacagaagaacccggcaggatgagcctgccctgttcgtggccctgaccttcgagcggcgggaggtcctggactcctccaatatcaaaccaatgaacctgatcggcgtggcaagaggcgaaaacatccccgccgtgatcgccctgaccgaccccgagggctgcccactgagccggtttaaggatagcctgggaaacccaacccacatcctgagaatcggcgagagctataaggagaagcagcggaccatccaggccaagaaggaggtggagcagcggagagccggcggctacagccggaagtacgccagcaaagccaagaatctggcagacgatatggtgagaaacaccgctagagatctgctgtactacgccgtgacccaggatgccatgctgatcttcgccaacctgagccggggcttcggccggcagggcaagcggaccttcatggccgagagacagtacacacggatggaggactggctgaccgccaagctggcctacgagggcctgagcaagacctacctgtccaagacactggcccagtacacctccaagacatgcagcaactgtgggtttaccatcaccagcgccgactacgacagggtgctggagaagctgaagaagacagcaacaggctggatgaccacaattaacggcaaggagctgaaggtggagggccagattacctactacaacagatacaagagacagaacgtagtcaaggacctgtccgtcgagctggatagactgagcgaagaatctgtgaacaacgacatctcctcctggacaaagggcagaagcggagaagctctgagcctcctgaagaaaagattctcccatagacccgtgcaggagaagttcgtgtgcctgaactgcggcttcgagacacacgcagccgagcaagccgccctgaacatcgccagatcctggctgttcctgcggagccaggagtacaagaaataccagacaaacaagacaaccggcaacaccgataagagagccttcgtcgagacctggcagtccttttaccggaagaagcttaaggaggtgtggaaacctgccgtgcggtctggcggatctggcggaggctccgtgcaggccagcctgagcttcgaggacgtggccgtgaggttcacctgggaggagtggcagctgctggaccccagccagaaggacctgtacaggaacgtgatgctggagaactactgcaacctggtgagcgtgggctaccagacccccaagcccgacagcctgttccagctggagcagggcgagcccccctggagggtggagggcgccggccagagccagacctgccccgaggagatctgggagggcggcccaagcagcggcgcccctcctcccagcggcggcagcccagccggctccccaacctctaccgaggagggcacctctgagtccgccacccccgagagcggccctggcacctccaccgagcccagcgagggcagcgcacccggcagccctgccggcagccccacctccacagaggagggaaccagcaccgagcccagcgaaggcagcgccccaggcaccagcaccgagcctagtgagcaggagattaaacggatcaacaagatcagaagaagacttgtgaaagacagcaacaccaagaaggccggcaagacaggccccatgaaaaccctgctggttagagtgatgacacccgatctgagagagcggctggaaaacctgagaaagaagcctgaaaatatcccccagcccatcagcaatacatctagagccaacctgaataagctgctgaccgattacaccgaaatgaagaaggcgatcctgcatgtgtactgggaagagttccagaaggaccctgtgggcctgatgagccgggtggcccagcctgccagcaagaagatcgatcagaacaagctgaaacctgagatggacgagaagggcaacctgaccaccgccggctttgcctgctctcagtgtggccagcccctgttcgtgtacaagctggagcaggtgtctgagaagggcaaggcttacaccaactacttcggacggtgcaatgtggccgagcacgaaaagctgatcctgctggcccagctgaagcccgagaaggatagcgacgaagccgtgacatatagcctgggaaagtttgggcagagggccctggatttctacagcattcatgtgaccaaggagtccacccaccccgtgaagcccctggcccagatcgccggaaacagatacgcctccggacctgtgggaaaggccctgagcgacgcatgtatgggcacaatcgcctccttcctgtctaagtaccaggacatcatcatcgaacaccagaaggtggtgaagggcaaccagaagagactggagagcctgcgggagctggccggcaaggaaaacctggaataccctagcgtgaccctgccacctcagcctcacaccaaggagggcgttgatgcctacaacgaagtgatcgcccgggtgcgaatgtgggtgaacctgaacctgtggcagaagctgaagctaagcagagatgatgccaagcctctgctgagactgaagggattcccttcctttcctctggtcgagagacaggccaacgaagtggactggtgggacatggtgtgtaacgtgaagaagctgatcaacgagaaaaaggaggatggcaaggtgttttggcagaatctggctggctacaagagacaggaagccctgagaccatacctgagcagcgaggaagatcggaagaagggaaagaaattcgctcggtaccagctgggcgacctgctgctgcacctggaaaagaagcacggcgaggactggggaaaggtgtacgacgaggcctgggagcggattgacaagaaagtggaaggcctgagcaagcacatcaagctggaagaggaacggagaagcgaggacgcccagagcaaggccgccctgaccgactggctgcgggctaaggccagcttcgtgatcgagggcctgaaggaggccgacaaggacgagttctgcagatgcgagctgaagctgcagaagtggtacggggacctgcggggaaagcccttcgccatcgaagccgagaacagcatcctggacatcagcggcttcagcaagcagtacaactgtgccttcatctggcagaaggacggcgtgaagaagctgaacctgtacctgatcatcaactacttcaagggcggcaagctgcggttcaagaagatcaaacctgaagccttcgaagccaacagattctacaccgtgatcaacaaaaagagcggcgagatcgtgcccatggaggtgaacttcaacttcgacgaccccaacctgatcatcctgcctctggcctttggcaagagacagggcagagaattcatctggaacgacctgctgtccctggaaaccggcagcctgaagctggccaacggaagagtgatcgagaagacactgtacaacagaagaacccggcaggatgagcctgccctgttcgtggccctgaccttcgagcggcgggaggtcctggactcctccaatatcaaaccaatgaacctgatcggcgtggcaagaggcgaaaacatccccgccgtgatcgccctgaccgaccccgagggctgcccactgagccggtttaaggatagcctgggaaacccaacccacatcctgagaatcggcgagagctataaggagaagcagcggaccatccaggccaagaaggaggtggagcagcggagagccggcggctacagccggaagtacgccagcaaagccaagaatctggcagacgatatggtgagaaacaccgctagagatctgctgtactacgccgtgacccaggatgccatgctgatcttcgccaacctgagccggggcttcggccggcagggcaagcggaccttcatggccgagagacagtacacacggatggaggactggctgaccgccaagctggcctacgagggcctgagcaagacctacctgtccaagacactggcccagtacacctccaagacatgcagcaactgtgggtttaccatcaccagcgccgactacgacagggtgctggagaagctgaagaagacagcaacaggctggatgaccacaattaacggcaaggagctgaaggtggagggccagattacctactacaacagatacaagagacagaacgtagtcaaggacctgtccgtcgagctggatagactgagcgaagaatctgtgaacaacgacatctcctcctggacaaagggcagaagcggagaagctctgagcctcctgaagaaaagattctcccatagacccgtgcaggagaagttcgtgtgcctgaactgcggcttcgagacacacgcagccgagcaagccgccctgaacatcgccagatcctggctgttcctgcggagccaggagtacaagaaataccagacaaacaagacaaccggcaacaccgataagagagccttcgtcgagacctggcagtccttttaccggaagaagcttaaggaggtgtggaaacctgccgtgcggtctggcggatctggcggaggctcctgtgcaggccagcctgagcttcgaggacgtggccgtgaggttcacctgggaggagtggcagctgctggaccccagccagaaggacctgtacaggaacgtgatgctggagaactactgcaacctggtgagcgtgggctaccagacccccaagcccgacagcctgttccagctggagcagggcgagcccccctggagggtggagggcgccggccagagccagacctgccccgaggagatctgggagggatctggctccggcagcggccccaagaaaaagagaaaagtctaagctgccttctgcggggcttgccttctggccatgcccttcttctctcccttgcacctgtacctcttggtctttgaataaagcctgagtaggaaggctagcaaaaaaaaaaaaaaaaaaaaaaaaaaaaaaaaaaaaaaaaaaaaaaaaaaaaaaaaaaaaaaaaaaaaaaaaaaaaaaaa

SEQ ID NO: 15953 - RNA, 9485 nt, synthetic construct
  source 1..9485: mol_type = other RNA
aggaaataagagagaaaagaagagtaagaagaaatataagagccaccatggcccctaagaagaagcgtaaagtgagccggatggaacgcctcgtctacgaggtgcggcagaagtgcagaaacatcgaggacatctgcatctcctgcggatctctgaacgtgaccctggagcacccactgttcatcggcggcatgtgccagaactgtaaaaactgttttctggagtgtgcctatcaatacgacgatgacggctaccagagctactgcaccatctgttgcggcggaagagaggtgctgatgtgtggaaataacaactgctgccggtgcttctgcgtggaatgcgtggacctgctggtgggccccggcgccgcccaggccgctattaaggaagatccttggaactgctacatgtgcggccacaagggcacatacggcctgctgagacggagagaggactggcctagcagactgcagatgttcttcgccaataaccacgaccaggagttcgacccccctaaggtgtaccctcccgtccccgccgagaagagaaagcccatccgggtcctgagcctgttcgatggcatcgccaccggtctgctggtgctgaaggacctgggcatccaggtggataggtacattgcctccgaggtgtgcgaggactccatcaccgtgggaatggtgcgtcatcagggcaagatcatgtacgtgggcgacgtgcggagcgtgacacagaagcatatccaggagtggggccctttcgacctggtgatcggcggcagcccttgcaatgacctgagcatcgtgaacccagcccggaagggcctgtacgagggaaccggcagactgttcttcgagttttacagactgctgcacgacgcccggcctaaggaaggcgacgaccggcccttcttttggctgttcgagaatgtggtggccatgggagtcagcgacaagcgggatattagccggttcctggagagcaaccccgtgatgatcgatgccaaggaagtgagcgccgcccaccgggccagatacttctggggcaatctgcctggcatgaacagacccctggccagcaccgtgaacgacaagctggagctgcaggagtgcctggagcacggccggatcgccaagttcagcaaggtgagaaccatcaccacccgaagcaacagcatcaaacaaggcaaggaccagcactttcctgtgttcatgaacgagaaggaggacatcctgtggtgtaccgagatggagagagtgttcgggttcccagtccactacacagatgtcagcaacatgtctagactggccagacagagactgctgggaagaagctggtccgtccctgtgatcagacacctgttcgcccctctgaaggagtacttcgcctgcgtgagcagcggcaacagcaacgccaacagccggggccccagcttctctagcggcctggtgccactgtccctgagagggagccacatgggccccatggagatctacaaaaccgtgagcgcctggaagcggcagcctgtgcgcgtgctgagcctgtttcggaatatcgataaagtcctgaaaagcctgggattcctggagagcggctctggctccggcggtggcaccctgaagtacgtggaggatgtgacaaacgtggtcagacgggatgtggagaagtggggccccttcgatctggtgtacggcagcacccaacccctgggcagctcttgtgaccggtgccctggctggtacatgtttcagttccaccggatcctgcagtacgccctgccgagacaggagtcccagcggccattcttttggattttcatggacaacttgctgctgaccgaggatgaccaggaaactaccactcggttcctgcagaccgaagccgtgaccctgcaggacgtgagaggccgggactaccagaacgccatgcgggtgtggtccaacatccctggactgaaaagcaagcacgcacctctgacccctaaagaagaggagtacctgcaggcccaggtgcggagcagaagcaagctggacgcccctaaggtggatctgctggtgaagaattgcctcctgcccctgagagagtacttcaagtatttcagccagaatagtctgcccctgggaggcagcggcggcggcgccctggtgacatttgaggacgtcgccgtgcggttcacccaggaggaatgggctctgctggatccttctcagaaaatcctgtaccgggacgtgatgagagagacataccggaatctgacctccgtgggcatcaactgggaatgttgggaccttgaagcctgcttcagaagcctgggaagaaacctgagagtgcaggtggtgaagagaaagtgcgagctgaccaacagcggcccctgcgccgagggcggcccaagcagcggcgcccctcctcccagcggcggcagcccagccggctccccaacctctaccgaggagggcacctctgagtccgccacccccgagagcggccctggcacctccaccgagcccagcgagggcagcgcacccggcagccctgccggcagccccacctccacagaggagggaaccagcaccgagcccagcgaaggcagcgccccaggcaccagcaccgagcctagtgagcaggagattaaacggatcaacaagatcagaagaagacttgtgaaagacagcaacaccaagaaggccggcaagacaggccccatgaaaaccctgctggttagagtgatgacacccgatctgagagagcggctggaaaacctgagaaagaagcctgaaaatatcccccagcccatcagcaatacatctagagccaacctgaataagctgctgaccgattacaccgaaatgaagaaggcgatcctgcatgtgtactgggaagagttccagaaggaccctgtgggcctgatgagccgggtggcccagcctgccagcaagaagatcgatcagaacaagctgaaacctgagatggacgagaagggcaacctgaccaccgccggctttgcctgctctcagtgtggccagcccctgttcgtgtacaagctggagcaggtgtctgagaagggcaaggcttacaccaactacttcggacggtgcaatgtggccgagcacgaaaagctgatcctgctggcccagctgaagcccgagaaggatagcgacgaagccgtgacatatagcctgggaaagtttgggcagagggccctggatttctacagcattcatgtgaccaaggagtccacccaccccgtgaagcccctggcccagatcgccggaaacagatacgcctccggacctgtgggaaaggccctgagcgacgcatgtatgggcacaatcgcctccttcctgtctaagtaccaggacatcatcatcgaacaccagaaggtggtgaagggcaaccagaagagactggagagcctgcgggagctggccggcaaggaaaacctggaataccctagcgtgaccctgccacctcagcctcacaccaaggagggcgttgatgcctacaacgaagtgatcgcccgggtgcgaatgtgggtgaacctgaacctgtggcagaagctgaagctaagcagagatgatgccaagcctctgctgagactgaagggattcccttcctttcctctggtcgagagacaggccaacgaagtggactggtgggacatggtgtgtaacgtgaagaagctgatcaacgagaaaaaggaggatggcaaggtgttttggcagaatctggctggctacaagagacaggaagccctgagaccatacctgagcagcgaggaagatcggaagaagggaaagaaattcgctcggtaccagctgggcgacctgctgctgcacctggaaaagaagcacggcgaggactggggaaaggtgtacgacgaggcctgggagcggattgacaagaaagtggaaggcctgagcaagcacatcaagctggaagaggaacggagaagcgaggacgcccagagcaaggccgccctgaccgactggctgcgggctaaggccagcttcgtgatcgagggcctgaaggaggccgacaaggacgagttctgcagatgcgagctgaagctgcagaagtggtacggggacctgcggggaaagcccttcgccatcgaagccgagaacagcatcctggacatcagcggcttcagcaagcagtacaactgtgccttcatctggcagaaggacggcgtgaagaagctgaacctgtacctgatcatcaactacttcaagggcggcaagctgcggttcaagaagatcaaacctgaagccttcgaagccaacagattctacaccgtgatcaacaaaaagagcggcgagatcgtgcccatggaggtgaacttcaacttcgacgaccccaacctgatcatcctgcctctggcctttggcaagagacagggcagagaattcatctggaacgacctgctgtccctggaaaccggcagcctgaagctggccaacggaagagtgatcgagaagacactgtacaacagaagaacccggcaggatgagcctgccctgttcgtggccctgaccttcgagcggcgggaggtcctggactcctccaatatcaaaccaatgaacctgatcggcgtggcaagaggcgaaaacatccccgccgtgatcgccctgaccgaccccgagggctgcccactgagccggtttaaggatagcctgggaaacccaacccacatcctgagaatcggcgagagctataaggagaagcagcggaccatccaggccaagaaggaggtggagcagcggagagccggcggctacagccggaagtacgccagcaaagccaagaatctggcagacgatatggtgagaaacaccgctagagatctgctgtactacgccgtgacccaggatgccatgctgatcttcgccaacctgagccggggcttcggccggcagggcaagcggaccttcatggccgagagacagtacacacggatggaggactggctgaccgccaagctggcctacgagggcctgagcaagacctacctgtccaagacactggcccagtacacctccaagacatgcagcaactgtgggtttaccatcaccagcgccgactacgacagggtgctggagaagctgaagaagacagcaacaggctggatgaccacaattaacggcaaggagctgaaggtggagggccagattacctactacaacagatacaagagacagaacgtagtcaaggacctgtccgtcgagctggatagactgagcgaagaatctgtgaacaacgacatctcctcctggacaaagggcagaagcggagaagctctgagcctcctgaagaaaagattctcccatagacccgtgcaggagaagttcgtgtgcctgaactgcggcttcgagacacacgcagccgagcaagccgccctgaacatcgccagatcctggctgttcctgcggagccaggagtacaagaaataccagacaaacaagacaaccggcaacaccgataagagagccttcgtcgagacctggcagtccttttaccggaagaagcttaaggaggtgtggaaacctgccgtgcggtctggcggatctggcggaggctccctgctgcacggctgctgcagcctggagacccacagcatcagggacaagaacgccgtgacctacggcgacgtgcacgtgaacttcacccaggaggagtgggccctgctggaccccagccagaagaagctgtacaaggacgtgatgctggagacctacaggaacctgaacgccatcggcttcaactgggacgacaagaacaccgaggagcactgccccagcaccaggaggtggaggaggtaccccggcggcccaagcagcggcgcccctcctcccagcggcggcagcccagccggctccccaacctctaccgaggagggcacctctgagtccgccacccccgagagcggccctggcacctccaccgagcccagcgagggcagcgcacccggcagccctgccggcagccccacctccacagaggagggaaccagcaccgagcccagcgaaggcagcgccccaggcaccagcaccgagcctagtgagcaggagattaaacggatcaacaagatcagaagaagacttgtgaaagacagcaacaccaagaaggccggcaagacaggccccatgaaaaccctgctggttagagtgatgacacccgatctgagagagcggctggaaaacctgagaaagaagcctgaaaatatcccccagcccatcagcaatacatctagagccaacctgaataagctgctgaccgattacaccgaaatgaagaaggcgatcctgcatgtgtactgggaagagttccagaaggaccctgtgggcctgatgagccgggtggcccagcctgccagcaagaagatcgatcagaacaagctgaaacctgagatggacgagaagggcaacctgaccaccgccggctttgcctgctctcagtgtggccagcccctgttcgtgtacaagctggagcaggtgtctgagaagggcaaggcttacaccaactacttcggacggtgcaatgtggccgagcacgaaaagctgatcctgctggcccagctgaagcccgagaaggatagcgacgaagccgtgacatatagcctgggaaagtttgggcagagggccctggatttctacagcattcatgtgaccaaggagtccacccaccccgtgaagcccctggcccagatcgccggaaacagatacgcctccggacctgtgggaaaggccctgagcgacgcatgtatgggcacaatcgcctccttcctgtctaagtaccaggacatcatcatcgaacaccagaaggtggtgaagggcaaccagaagagactggagagcctgcgggagctggccggcaaggaaaacctggaataccctagcgtgaccctgccacctcagcctcacaccaaggagggcgttgatgcctacaacgaagtgatcgcccgggtgcgaatgtgggtgaacctgaacctgtggcagaagctgaagctaagcagagatgatgccaagcctctgctgagactgaagggattcccttcctttcctctggtcgagagacaggccaacgaagtggactggtgggacatggtgtgtaacgtgaagaagctgatcaacgagaaaaaggaggatggcaaggtgttttggcagaatctggctggctacaagagacaggaagccctgagaccatacctgagcagcgaggaagatcggaagaagggaaagaaattcgctcggtaccagctgggcgacctgctgctgcacctggaaaagaagcacggcgaggactggggaaaggtgtacgacgaggcctgggagcggattgacaagaaagtggaaggcctgagcaagcacatcaagctggaagaggaacggagaagcgaggacgcccagagcaaggccgccctgaccgactggctgcgggctaaggccagcttcgtgatcgagggcctgaaggaggccgacaaggacgagttctgcagatgcgagctgaagctgcagaagtggtacggggacctgcggggaaagcccttcgccatcgaagccgagaacagcatcctggacatcagcggcttcagcaagcagtacaactgtgccttcatctggcagaaggacggcgtgaagaagctgaacctgtacctgatcatcaactacttcaagggcggcaagctgcggttcaagaagatcaaacctgaagccttcgaagccaacagattctacaccgtgatcaacaaaaagagcggcgagatcgtgcccatggaggtgaacttcaacttcgacgaccccaacctgatcatcctgcctctggcctttggcaagagacagggcagagaattcatctggaacgacctgctgtccctggaaaccggcagcctgaagctggccaacggaagagtgatcgagaagacactgtacaacagaagaacccggcaggatgagcctgccctgttcgtggccctgaccttcgagcggcgggaggtcctggactcctccaatatcaaaccaatgaacctgatcggcgtggcaagaggcgaaaacatccccgccgtgatcgccctgaccgaccccgagggctgcccactgagccggtttaaggatagcctgggaaacccaacccacatcctgagaatcggcgagagctataaggagaagcagcggaccatccaggccaagaaggaggtggagcagcggagagccggcggctacagccggaagtacgccagcaaagccaagaatctggcagacgatatggtgagaaacaccgctagagatctgctgtactacgccgtgacccaggatgccatgctgatcttcgccaacctgagccggggcttcggccggcagggcaagcggaccttcatggccgagagacagtacacacggatggaggactggctgaccgccaagctggcctacgagggcctgagcaagacctacctgtccaagacactggcccagtacacctccaagacatgcagcaactgtgggtttaccatcaccagcgccgactacgacagggtgctggagaagctgaagaagacagcaacaggctggatgaccacaattaacggcaaggagctgaaggtggagggccagattacctactacaacagatacaagagacagaacgtagtcaaggacctgtccgtcgagctggatagactgagcgaagaatctgtgaacaacgacatctcctcctggacaaagggcagaagcggagaagctctgagcctcctgaagaaaagattctcccatagacccgtgcaggagaagttcgtgtgcctgaactgcggcttcgagacacacgcagccgagcaagccgccctgaacatcgccagatcctggctgttcctgcggagccaggagtacaagaaataccagacaaacaagacaaccggcaacaccgataagagagccttcgtcgagacctggcagtccttttaccggaagaagcttaaggaggtgtggaaacctgccgtgcggtctggcggatctggcggaggctcctctgctgcacggctgctgcagcctggagacccacagcatcagggacaagaacgccgtgacctacggcgacgtgcacgtgaacttcacccaggaggagtgggccctgctggaccccagccagaagaagctgtacaaggacgtgatgctggagacctacaggaacctgaacgccatcggcttcaactgggacgacaagaacaccgaggagcactgccccagcaccaggaggtggaggaggtaccccggatctggctccggcagcggccccaagaaaaagagaaaagtctaagctgccttctgcggggcttgccttctggccatgcccttcttctctcccttgcacctgtacctcttggtctttgaataaagcctgagtaggaaggctagcaaaaaaaaaaaaaaaaaaaaaaaaaaaaaaaaaaaaaaaaaaaaaaaaaaaaaaaaaaaaaaaaaaaaaaaaaaaaaaaa

SEQ ID NO: 15954 - RNA, 9485 nt, synthetic construct
  source 1..9485: mol_type = other RNA
aggaaataagagagaaaagaagagtaagaagaaatataagagccaccatggcccctaagaagaagcgtaaagtgagccggatggaacgcctcgtctacgaggtgcggcagaagtgcagaaacatcgaggacatctgcatctcctgcggatctctgaacgtgaccctggagcacccactgttcatcggcggcatgtgccagaactgtaaaaactgttttctggagtgtgcctatcaatacgacgatgacggctaccagagctactgcaccatctgttgcggcggaagagaggtgctgatgtgtggaaataacaactgctgccggtgcttctgcgtggaatgcgtggacctgctggtgggccccggcgccgcccaggccgctattaaggaagatccttggaactgctacatgtgcggccacaagggcacatacggcctgctgagacggagagaggactggcctagcagactgcagatgttcttcgccaataaccacgaccaggagttcgacccccctaaggtgtaccctcccgtccccgccgagaagagaaagcccatccgggtcctgagcctgttcgatggcatcgccaccggtctgctggtgctgaaggacctgggcatccaggtggataggtacattgcctccgaggtgtgcgaggactccatcaccgtgggaatggtgcgtcatcagggcaagatcatgtacgtgggcgacgtgcggagcgtgacacagaagcatatccaggagtggggccctttcgacctggtgatcggcggcagcccttgcaatgacctgagcatcgtgaacccagcccggaagggcctgtacgagggaaccggcagactgttcttcgagttttacagactgctgcacgacgcccggcctaaggaaggcgacgaccggcccttcttttggctgttcgagaatgtggtggccatgggagtcagcgacaagcgggatattagccggttcctggagagcaaccccgtgatgatcgatgccaaggaagtgagcgccgcccaccgggccagatacttctggggcaatctgcctggcatgaacagacccctggccagcaccgtgaacgacaagctggagctgcaggagtgcctggagcacggccggatcgccaagttcagcaaggtgagaaccatcaccacccgaagcaacagcatcaaacaaggcaaggaccagcactttcctgtgttcatgaacgagaaggaggacatcctgtggtgtaccgagatggagagagtgttcgggttcccagtccactacacagatgtcagcaacatgtctagactggccagacagagactgctgggaagaagctggtccgtccctgtgatcagacacctgttcgcccctctgaaggagtacttcgcctgcgtgagcagcggcaacagcaacgccaacagccggggccccagcttctctagcggcctggtgccactgtccctgagagggagccacatgggccccatggagatctacaaaaccgtgagcgcctggaagcggcagcctgtgcgcgtgctgagcctgtttcggaatatcgataaagtcctgaaaagcctgggattcctggagagcggctctggctccggcggtggcaccctgaagtacgtggaggatgtgacaaacgtggtcagacgggatgtggagaagtggggccccttcgatctggtgtacggcagcacccaacccctgggcagctcttgtgaccggtgccctggctggtacatgtttcagttccaccggatcctgcagtacgccctgccgagacaggagtcccagcggccattcttttggattttcatggacaacttgctgctgaccgaggatgaccaggaaactaccactcggttcctgcagaccgaagccgtgaccctgcaggacgtgagaggccgggactaccagaacgccatgcgggtgtggtccaacatccctggactgaaaagcaagcacgcacctctgacccctaaagaagaggagtacctgcaggcccaggtgcggagcagaagcaagctggacgcccctaaggtggatctgctggtgaagaattgcctcctgcccctgagagagtacttcaagtatttcagccagaatagtctgcccctgggaggcagcggcggcggcgccctggtgacatttgaggacgtcgccgtgcggttcacccaggaggaatgggctctgctggatccttctcagaaaatcctgtaccgggacgtgatgagagagacataccggaatctgacctccgtgggcatcaactgggaatgttgggaccttgaagcctgcttcagaagcctgggaagaaacctgagagtgcaggtggtgaagagaaagtgcgagctgaccaacagcggcccctgcgccgagggcggcccaagcagcggcgcccctcctcccagcggcggcagcccagccggctccccaacctctaccgaggagggcacctctgagtccgccacccccgagagcggccctggcacctccaccgagcccagcgagggcagcgcacccggcagccctgccggcagccccacctccacagaggagggaaccagcaccgagcccagcgaaggcagcgccccaggcaccagcaccgagcctagtgagcaggagattaaacggatcaacaagatcagaagaagacttgtgaaagacagcaacaccaagaaggccggcaagacaggccccatgaaaaccctgctggttagagtgatgacacccgatctgagagagcggctggaaaacctgagaaagaagcctgaaaatatcccccagcccatcagcaatacatctagagccaacctgaataagctgctgaccgattacaccgaaatgaagaaggcgatcctgcatgtgtactgggaagagttccagaaggaccctgtgggcctgatgagccgggtggcccagcctgccagcaagaagatcgatcagaacaagctgaaacctgagatggacgagaagggcaacctgaccaccgccggctttgcctgctctcagtgtggccagcccctgttcgtgtacaagctggagcaggtgtctgagaagggcaaggcttacaccaactacttcggacggtgcaatgtggccgagcacgaaaagctgatcctgctggcccagctgaagcccgagaaggatagcgacgaagccgtgacatatagcctgggaaagtttgggcagagggccctggatttctacagcattcatgtgaccaaggagtccacccaccccgtgaagcccctggcccagatcgccggaaacagatacgcctccggacctgtgggaaaggccctgagcgacgcatgtatgggcacaatcgcctccttcctgtctaagtaccaggacatcatcatcgaacaccagaaggtggtgaagggcaaccagaagagactggagagcctgcgggagctggccggcaaggaaaacctggaataccctagcgtgaccctgccacctcagcctcacaccaaggagggcgttgatgcctacaacgaagtgatcgcccgggtgcgaatgtgggtgaacctgaacctgtggcagaagctgaagctaagcagagatgatgccaagcctctgctgagactgaagggattcccttcctttcctctggtcgagagacaggccaacgaagtggactggtgggacatggtgtgtaacgtgaagaagctgatcaacgagaaaaaggaggatggcaaggtgttttggcagaatctggctggctacaagagacaggaagccctgagaccatacctgagcagcgaggaagatcggaagaagggaaagaaattcgctcggtaccagctgggcgacctgctgctgcacctggaaaagaagcacggcgaggactggggaaaggtgtacgacgaggcctgggagcggattgacaagaaagtggaaggcctgagcaagcacatcaagctggaagaggaacggagaagcgaggacgcccagagcaaggccgccctgaccgactggctgcgggctaaggccagcttcgtgatcgagggcctgaaggaggccgacaaggacgagttctgcagatgcgagctgaagctgcagaagtggtacggggacctgcggggaaagcccttcgccatcgaagccgagaacagcatcctggacatcagcggcttcagcaagcagtacaactgtgccttcatctggcagaaggacggcgtgaagaagctgaacctgtacctgatcatcaactacttcaagggcggcaagctgcggttcaagaagatcaaacctgaagccttcgaagccaacagattctacaccgtgatcaacaaaaagagcggcgagatcgtgcccatggaggtgaacttcaacttcgacgaccccaacctgatcatcctgcctctggcctttggcaagagacagggcagagaattcatctggaacgacctgctgtccctggaaaccggcagcctgaagctggccaacggaagagtgatcgagaagacactgtacaacagaagaacccggcaggatgagcctgccctgttcgtggccctgaccttcgagcggcgggaggtcctggactcctccaatatcaaaccaatgaacctgatcggcgtggcaagaggcgaaaacatccccgccgtgatcgccctgaccgaccccgagggctgcccactgagccggtttaaggatagcctgggaaacccaacccacatcctgagaatcggcgagagctataaggagaagcagcggaccatccaggccaagaaggaggtggagcagcggagagccggcggctacagccggaagtacgccagcaaagccaagaatctggcagacgatatggtgagaaacaccgctagagatctgctgtactacgccgtgacccaggatgccatgctgatcttcgccaacctgagccggggcttcggccggcagggcaagcggaccttcatggccgagagacagtacacacggatggaggactggctgaccgccaagctggcctacgagggcctgagcaagacctacctgtccaagacactggcccagtacacctccaagacatgcagcaactgtgggtttaccatcaccagcgccgactacgacagggtgctggagaagctgaagaagacagcaacaggctggatgaccacaattaacggcaaggagctgaaggtggagggccagattacctactacaacagatacaagagacagaacgtagtcaaggacctgtccgtcgagctggatagactgagcgaagaatctgtgaacaacgacatctcctcctggacaaagggcagaagcggagaagctctgagcctcctgaagaaaagattctcccatagacccgtgcaggagaagttcgtgtgcctgaactgcggcttcgagacacacgcagccgagcaagccgccctgaacatcgccagatcctggctgttcctgcggagccaggagtacaagaaataccagacaaacaagacaaccggcaacaccgataagagagccttcgtcgagacctggcagtccttttaccggaagaagcttaaggaggtgtggaaacctgccgtgcggtctggcggatctggcggaggctccatgggcctgctgaccttcagggacgtggccatcgagttcagcctggaggagtggcagtgcctggacaccgcccagaagaacctgtacaggaacgtgatgctggagaactacaggaacctggccttcctgggcatcgccgtgagcaagcccgacctgatcatctgcctggagaaggagaaggagccctggaacatgaagaggcacgagatggtggacgagccccccgacatctgcccccacttcggcggcccaagcagcggcgcccctcctcccagcggcggcagcccagccggctccccaacctctaccgaggagggcacctctgagtccgccacccccgagagcggccctggcacctccaccgagcccagcgagggcagcgcacccggcagccctgccggcagccccacctccacagaggagggaaccagcaccgagcccagcgaaggcagcgccccaggcaccagcaccgagcctagtgagcaggagattaaacggatcaacaagatcagaagaagacttgtgaaagacagcaacaccaagaaggccggcaagacaggccccatgaaaaccctgctggttagagtgatgacacccgatctgagagagcggctggaaaacctgagaaagaagcctgaaaatatcccccagcccatcagcaatacatctagagccaacctgaataagctgctgaccgattacaccgaaatgaagaaggcgatcctgcatgtgtactgggaagagttccagaaggaccctgtgggcctgatgagccgggtggcccagcctgccagcaagaagatcgatcagaacaagctgaaacctgagatggacgagaagggcaacctgaccaccgccggctttgcctgctctcagtgtggccagcccctgttcgtgtacaagctggagcaggtgtctgagaagggcaaggcttacaccaactacttcggacggtgcaatgtggccgagcacgaaaagctgatcctgctggcccagctgaagcccgagaaggatagcgacgaagccgtgacatatagcctgggaaagtttgggcagagggccctggatttctacagcattcatgtgaccaaggagtccacccaccccgtgaagcccctggcccagatcgccggaaacagatacgcctccggacctgtgggaaaggccctgagcgacgcatgtatgggcacaatcgcctccttcctgtctaagtaccaggacatcatcatcgaacaccagaaggtggtgaagggcaaccagaagagactggagagcctgcgggagctggccggcaaggaaaacctggaataccctagcgtgaccctgccacctcagcctcacaccaaggagggcgttgatgcctacaacgaagtgatcgcccgggtgcgaatgtgggtgaacctgaacctgtggcagaagctgaagctaagcagagatgatgccaagcctctgctgagactgaagggattcccttcctttcctctggtcgagagacaggccaacgaagtggactggtgggacatggtgtgtaacgtgaagaagctgatcaacgagaaaaaggaggatggcaaggtgttttggcagaatctggctggctacaagagacaggaagccctgagaccatacctgagcagcgaggaagatcggaagaagggaaagaaattcgctcggtaccagctgggcgacctgctgctgcacctggaaaagaagcacggcgaggactggggaaaggtgtacgacgaggcctgggagcggattgacaagaaagtggaaggcctgagcaagcacatcaagctggaagaggaacggagaagcgaggacgcccagagcaaggccgccctgaccgactggctgcgggctaaggccagcttcgtgatcgagggcctgaaggaggccgacaaggacgagttctgcagatgcgagctgaagctgcagaagtggtacggggacctgcggggaaagcccttcgccatcgaagccgagaacagcatcctggacatcagcggcttcagcaagcagtacaactgtgccttcatctggcagaaggacggcgtgaagaagctgaacctgtacctgatcatcaactacttcaagggcggcaagctgcggttcaagaagatcaaacctgaagccttcgaagccaacagattctacaccgtgatcaacaaaaagagcggcgagatcgtgcccatggaggtgaacttcaacttcgacgaccccaacctgatcatcctgcctctggcctttggcaagagacagggcagagaattcatctggaacgacctgctgtccctggaaaccggcagcctgaagctggccaacggaagagtgatcgagaagacactgtacaacagaagaacccggcaggatgagcctgccctgttcgtggccctgaccttcgagcggcgggaggtcctggactcctccaatatcaaaccaatgaacctgatcggcgtggcaagaggcgaaaacatccccgccgtgatcgccctgaccgaccccgagggctgcccactgagccggtttaaggatagcctgggaaacccaacccacatcctgagaatcggcgagagctataaggagaagcagcggaccatccaggccaagaaggaggtggagcagcggagagccggcggctacagccggaagtacgccagcaaagccaagaatctggcagacgatatggtgagaaacaccgctagagatctgctgtactacgccgtgacccaggatgccatgctgatcttcgccaacctgagccggggcttcggccggcagggcaagcggaccttcatggccgagagacagtacacacggatggaggactggctgaccgccaagctggcctacgagggcctgagcaagacctacctgtccaagacactggcccagtacacctccaagacatgcagcaactgtgggtttaccatcaccagcgccgactacgacagggtgctggagaagctgaagaagacagcaacaggctggatgaccacaattaacggcaaggagctgaaggtggagggccagattacctactacaacagatacaagagacagaacgtagtcaaggacctgtccgtcgagctggatagactgagcgaagaatctgtgaacaacgacatctcctcctggacaaagggcagaagcggagaagctctgagcctcctgaagaaaagattctcccatagacccgtgcaggagaagttcgtgtgcctgaactgcggcttcgagacacacgcagccgagcaagccgccctgaacatcgccagatcctggctgttcctgcggagccaggagtacaagaaataccagacaaacaagacaaccggcaacaccgataagagagccttcgtcgagacctggcagtccttttaccggaagaagcttaaggaggtgtggaaacctgccgtgcggtctggcggatctggcggaggctcctatgggcctgctgaccttcagggacgtggccatcgagttcagcctggaggagtggcagtgcctggacaccgcccagaagaacctgtacaggaacgtgatgctggagaactacaggaacctggccttcctgggcatcgccgtgagcaagcccgacctgatcatctgcctggagaaggagaaggagccctggaacatgaagaggcacgagatggtggacgagccccccgacatctgcccccacttcggatctggctccggcagcggccccaagaaaaagagaaaagtctaagctgccttctgcggggcttgccttctggccatgcccttcttctctcccttgcacctgtacctcttggtctttgaataaagcctgagtaggaaggctagcaaaaaaaaaaaaaaaaaaaaaaaaaaaaaaaaaaaaaaaaaaaaaaaaaaaaaaaaaaaaaaaaaaaaaaaaaaaaaaaa

SEQ ID NO: 15955 - RNA, 9503 nt, synthetic construct
  source 1..9503: mol_type = other RNA
aggaaataagagagaaaagaagagtaagaagaaatataagagccaccatggcccctaagaagaagcgtaaagtgagccggatggaacgcctcgtctacgaggtgcggcagaagtgcagaaacatcgaggacatctgcatctcctgcggatctctgaacgtgaccctggagcacccactgttcatcggcggcatgtgccagaactgtaaaaactgttttctggagtgtgcctatcaatacgacgatgacggctaccagagctactgcaccatctgttgcggcggaagagaggtgctgatgtgtggaaataacaactgctgccggtgcttctgcgtggaatgcgtggacctgctggtgggccccggcgccgcccaggccgctattaaggaagatccttggaactgctacatgtgcggccacaagggcacatacggcctgctgagacggagagaggactggcctagcagactgcagatgttcttcgccaataaccacgaccaggagttcgacccccctaaggtgtaccctcccgtccccgccgagaagagaaagcccatccgggtcctgagcctgttcgatggcatcgccaccggtctgctggtgctgaaggacctgggcatccaggtggataggtacattgcctccgaggtgtgcgaggactccatcaccgtgggaatggtgcgtcatcagggcaagatcatgtacgtgggcgacgtgcggagcgtgacacagaagcatatccaggagtggggccctttcgacctggtgatcggcggcagcccttgcaatgacctgagcatcgtgaacccagcccggaagggcctgtacgagggaaccggcagactgttcttcgagttttacagactgctgcacgacgcccggcctaaggaaggcgacgaccggcccttcttttggctgttcgagaatgtggtggccatgggagtcagcgacaagcgggatattagccggttcctggagagcaaccccgtgatgatcgatgccaaggaagtgagcgccgcccaccgggccagatacttctggggcaatctgcctggcatgaacagacccctggccagcaccgtgaacgacaagctggagctgcaggagtgcctggagcacggccggatcgccaagttcagcaaggtgagaaccatcaccacccgaagcaacagcatcaaacaaggcaaggaccagcactttcctgtgttcatgaacgagaaggaggacatcctgtggtgtaccgagatggagagagtgttcgggttcccagtccactacacagatgtcagcaacatgtctagactggccagacagagactgctgggaagaagctggtccgtccctgtgatcagacacctgttcgcccctctgaaggagtacttcgcctgcgtgagcagcggcaacagcaacgccaacagccggggccccagcttctctagcggcctggtgccactgtccctgagagggagccacatgggccccatggagatctacaaaaccgtgagcgcctggaagcggcagcctgtgcgcgtgctgagcctgtttcggaatatcgataaagtcctgaaaagcctgggattcctggagagcggctctggctccggcggtggcaccctgaagtacgtggaggatgtgacaaacgtggtcagacgggatgtggagaagtggggccccttcgatctggtgtacggcagcacccaacccctgggcagctcttgtgaccggtgccctggctggtacatgtttcagttccaccggatcctgcagtacgccctgccgagacaggagtcccagcggccattcttttggattttcatggacaacttgctgctgaccgaggatgaccaggaaactaccactcggttcctgcagaccgaagccgtgaccctgcaggacgtgagaggccgggactaccagaacgccatgcgggtgtggtccaacatccctggactgaaaagcaagcacgcacctctgacccctaaagaagaggagtacctgcaggcccaggtgcggagcagaagcaagctggacgcccctaaggtggatctgctggtgaagaattgcctcctgcccctgagagagtacttcaagtatttcagccagaatagtctgcccctgggaggcagcggcggcggcgccctggtgacatttgaggacgtcgccgtgcggttcacccaggaggaatgggctctgctggatccttctcagaaaatcctgtaccgggacgtgatgagagagacataccggaatctgacctccgtgggcatcaactgggaatgttgggaccttgaagcctgcttcagaagcctgggaagaaacctgagagtgcaggtggtgaagagaaagtgcgagctgaccaacagcggcccctgcgccgagggcggcccaagcagcggcgcccctcctcccagcggcggcagcccagccggctccccaacctctaccgaggagggcacctctgagtccgccacccccgagagcggccctggcacctccaccgagcccagcgagggcagcgcacccggcagccctgccggcagccccacctccacagaggagggaaccagcaccgagcccagcgaaggcagcgccccaggcaccagcaccgagcctagtgagcaggagattaaacggatcaacaagatcagaagaagacttgtgaaagacagcaacaccaagaaggccggcaagacaggccccatgaaaaccctgctggttagagtgatgacacccgatctgagagagcggctggaaaacctgagaaagaagcctgaaaatatcccccagcccatcagcaatacatctagagccaacctgaataagctgctgaccgattacaccgaaatgaagaaggcgatcctgcatgtgtactgggaagagttccagaaggaccctgtgggcctgatgagccgggtggcccagcctgccagcaagaagatcgatcagaacaagctgaaacctgagatggacgagaagggcaacctgaccaccgccggctttgcctgctctcagtgtggccagcccctgttcgtgtacaagctggagcaggtgtctgagaagggcaaggcttacaccaactacttcggacggtgcaatgtggccgagcacgaaaagctgatcctgctggcccagctgaagcccgagaaggatagcgacgaagccgtgacatatagcctgggaaagtttgggcagagggccctggatttctacagcattcatgtgaccaaggagtccacccaccccgtgaagcccctggcccagatcgccggaaacagatacgcctccggacctgtgggaaaggccctgagcgacgcatgtatgggcacaatcgcctccttcctgtctaagtaccaggacatcatcatcgaacaccagaaggtggtgaagggcaaccagaagagactggagagcctgcgggagctggccggcaaggaaaacctggaataccctagcgtgaccctgccacctcagcctcacaccaaggagggcgttgatgcctacaacgaagtgatcgcccgggtgcgaatgtgggtgaacctgaacctgtggcagaagctgaagctaagcagagatgatgccaagcctctgctgagactgaagggattcccttcctttcctctggtcgagagacaggccaacgaagtggactggtgggacatggtgtgtaacgtgaagaagctgatcaacgagaaaaaggaggatggcaaggtgttttggcagaatctggctggctacaagagacaggaagccctgagaccatacctgagcagcgaggaagatcggaagaagggaaagaaattcgctcggtaccagctgggcgacctgctgctgcacctggaaaagaagcacggcgaggactggggaaaggtgtacgacgaggcctgggagcggattgacaagaaagtggaaggcctgagcaagcacatcaagctggaagaggaacggagaagcgaggacgcccagagcaaggccgccctgaccgactggctgcgggctaaggccagcttcgtgatcgagggcctgaaggaggccgacaaggacgagttctgcagatgcgagctgaagctgcagaagtggtacggggacctgcggggaaagcccttcgccatcgaagccgagaacagcatcctggacatcagcggcttcagcaagcagtacaactgtgccttcatctggcagaaggacggcgtgaagaagctgaacctgtacctgatcatcaactacttcaagggcggcaagctgcggttcaagaagatcaaacctgaagccttcgaagccaacagattctacaccgtgatcaacaaaaagagcggcgagatcgtgcccatggaggtgaacttcaacttcgacgaccccaacctgatcatcctgcctctggcctttggcaagagacagggcagagaattcatctggaacgacctgctgtccctggaaaccggcagcctgaagctggccaacggaagagtgatcgagaagacactgtacaacagaagaacccggcaggatgagcctgccctgttcgtggccctgaccttcgagcggcgggaggtcctggactcctccaatatcaaaccaatgaacctgatcggcgtggcaagaggcgaaaacatccccgccgtgatcgccctgaccgaccccgagggctgcccactgagccggtttaaggatagcctgggaaacccaacccacatcctgagaatcggcgagagctataaggagaagcagcggaccatccaggccaagaaggaggtggagcagcggagagccggcggctacagccggaagtacgccagcaaagccaagaatctggcagacgatatggtgagaaacaccgctagagatctgctgtactacgccgtgacccaggatgccatgctgatcttcgccaacctgagccggggcttcggccggcagggcaagcggaccttcatggccgagagacagtacacacggatggaggactggctgaccgccaagctggcctacgagggcctgagcaagacctacctgtccaagacactggcccagtacacctccaagacatgcagcaactgtgggtttaccatcaccagcgccgactacgacagggtgctggagaagctgaagaagacagcaacaggctggatgaccacaattaacggcaaggagctgaaggtggagggccagattacctactacaacagatacaagagacagaacgtagtcaaggacctgtccgtcgagctggatagactgagcgaagaatctgtgaacaacgacatctcctcctggacaaagggcagaagcggagaagctctgagcctcctgaagaaaagattctcccatagacccgtgcaggagaagttcgtgtgcctgaactgcggcttcgagacacacgcagccgagcaagccgccctgaacatcgccagatcctggctgttcctgcggagccaggagtacaagaaataccagacaaacaagacaaccggcaacaccgataagagagccttcgtcgagacctggcagtccttttaccggaagaagcttaaggaggtgtggaaacctgccgtgcggtctggcggatctggcggaggctccgtgacctacgaggacgtgcacgtgaacttcagccacgaggagtgggccctgctggacagcagccagaagagcctgtacagggacgtgatgctggagacctgcaggaacctgatggccatcggctacaggctggaggaccacaacatcgaggagcactgccagagcagcaggaggcccggcaggtacaacatctgcaactgcggctacaagccctgcgagaacgaggaccacggcaagaagcagtgcaccttcggcggcccaagcagcggcgcccctcctcccagcggcggcagcccagccggctccccaacctctaccgaggagggcacctctgagtccgccacccccgagagcggccctggcacctccaccgagcccagcgagggcagcgcacccggcagccctgccggcagccccacctccacagaggagggaaccagcaccgagcccagcgaaggcagcgccccaggcaccagcaccgagcctagtgagcaggagattaaacggatcaacaagatcagaagaagacttgtgaaagacagcaacaccaagaaggccggcaagacaggccccatgaaaaccctgctggttagagtgatgacacccgatctgagagagcggctggaaaacctgagaaagaagcctgaaaatatcccccagcccatcagcaatacatctagagccaacctgaataagctgctgaccgattacaccgaaatgaagaaggcgatcctgcatgtgtactgggaagagttccagaaggaccctgtgggcctgatgagccgggtggcccagcctgccagcaagaagatcgatcagaacaagctgaaacctgagatggacgagaagggcaacctgaccaccgccggctttgcctgctctcagtgtggccagcccctgttcgtgtacaagctggagcaggtgtctgagaagggcaaggcttacaccaactacttcggacggtgcaatgtggccgagcacgaaaagctgatcctgctggcccagctgaagcccgagaaggatagcgacgaagccgtgacatatagcctgggaaagtttgggcagagggccctggatttctacagcattcatgtgaccaaggagtccacccaccccgtgaagcccctggcccagatcgccggaaacagatacgcctccggacctgtgggaaaggccctgagcgacgcatgtatgggcacaatcgcctccttcctgtctaagtaccaggacatcatcatcgaacaccagaaggtggtgaagggcaaccagaagagactggagagcctgcgggagctggccggcaaggaaaacctggaataccctagcgtgaccctgccacctcagcctcacaccaaggagggcgttgatgcctacaacgaagtgatcgcccgggtgcgaatgtgggtgaacctgaacctgtggcagaagctgaagctaagcagagatgatgccaagcctctgctgagactgaagggattcccttcctttcctctggtcgagagacaggccaacgaagtggactggtgggacatggtgtgtaacgtgaagaagctgatcaacgagaaaaaggaggatggcaaggtgttttggcagaatctggctggctacaagagacaggaagccctgagaccatacctgagcagcgaggaagatcggaagaagggaaagaaattcgctcggtaccagctgggcgacctgctgctgcacctggaaaagaagcacggcgaggactggggaaaggtgtacgacgaggcctgggagcggattgacaagaaagtggaaggcctgagcaagcacatcaagctggaagaggaacggagaagcgaggacgcccagagcaaggccgccctgaccgactggctgcgggctaaggccagcttcgtgatcgagggcctgaaggaggccgacaaggacgagttctgcagatgcgagctgaagctgcagaagtggtacggggacctgcggggaaagcccttcgccatcgaagccgagaacagcatcctggacatcagcggcttcagcaagcagtacaactgtgccttcatctggcagaaggacggcgtgaagaagctgaacctgtacctgatcatcaactacttcaagggcggcaagctgcggttcaagaagatcaaacctgaagccttcgaagccaacagattctacaccgtgatcaacaaaaagagcggcgagatcgtgcccatggaggtgaacttcaacttcgacgaccccaacctgatcatcctgcctctggcctttggcaagagacagggcagagaattcatctggaacgacctgctgtccctggaaaccggcagcctgaagctggccaacggaagagtgatcgagaagacactgtacaacagaagaacccggcaggatgagcctgccctgttcgtggccctgaccttcgagcggcgggaggtcctggactcctccaatatcaaaccaatgaacctgatcggcgtggcaagaggcgaaaacatccccgccgtgatcgccctgaccgaccccgagggctgcccactgagccggtttaaggatagcctgggaaacccaacccacatcctgagaatcggcgagagctataaggagaagcagcggaccatccaggccaagaaggaggtggagcagcggagagccggcggctacagccggaagtacgccagcaaagccaagaatctggcagacgatatggtgagaaacaccgctagagatctgctgtactacgccgtgacccaggatgccatgctgatcttcgccaacctgagccggggcttcggccggcagggcaagcggaccttcatggccgagagacagtacacacggatggaggactggctgaccgccaagctggcctacgagggcctgagcaagacctacctgtccaagacactggcccagtacacctccaagacatgcagcaactgtgggtttaccatcaccagcgccgactacgacagggtgctggagaagctgaagaagacagcaacaggctggatgaccacaattaacggcaaggagctgaaggtggagggccagattacctactacaacagatacaagagacagaacgtagtcaaggacctgtccgtcgagctggatagactgagcgaagaatctgtgaacaacgacatctcctcctggacaaagggcagaagcggagaagctctgagcctcctgaagaaaagattctcccatagacccgtgcaggagaagttcgtgtgcctgaactgcggcttcgagacacacgcagccgagcaagccgccctgaacatcgccagatcctggctgttcctgcggagccaggagtacaagaaataccagacaaacaagacaaccggcaacaccgataagagagccttcgtcgagacctggcagtccttttaccggaagaagcttaaggaggtgtggaaacctgccgtgcggtctggcggatctggcggaggctcctgtgacctacgaggacgtgcacgtgaacttcagccacgaggagtgggccctgctggacagcagccagaagagcctgtacagggacgtgatgctggagacctgcaggaacctgatggccatcggctacaggctggaggaccacaacatcgaggagcactgccagagcagcaggaggcccggcaggtacaacatctgcaactgcggctacaagccctgcgagaacgaggaccacggcaagaagcagtgcaccttcggatctggctccggcagcggccccaagaaaaagagaaaagtctaagctgccttctgcggggcttgccttctggccatgcccttcttctctcccttgcacctgtacctcttggtctttgaataaagcctgagtaggaaggctagcaaaaaaaaaaaaaaaaaaaaaaaaaaaaaaaaaaaaaaaaaaaaaaaaaaaaaaaaaaaaaaaaaaaaaaaaaaaaaaaa

SEQ ID NO: 15956 - RNA, 9503 nt, synthetic construct
  source 1..9503: mol_type = other RNA
aggaaataagagagaaaagaagagtaagaagaaatataagagccaccatggcccctaagaagaagcgtaaagtgagccggatggaacgcctcgtctacgaggtgcggcagaagtgcagaaacatcgaggacatctgcatctcctgcggatctctgaacgtgaccctggagcacccactgttcatcggcggcatgtgccagaactgtaaaaactgttttctggagtgtgcctatcaatacgacgatgacggctaccagagctactgcaccatctgttgcggcggaagagaggtgctgatgtgtggaaataacaactgctgccggtgcttctgcgtggaatgcgtggacctgctggtgggccccggcgccgcccaggccgctattaaggaagatccttggaactgctacatgtgcggccacaagggcacatacggcctgctgagacggagagaggactggcctagcagactgcagatgttcttcgccaataaccacgaccaggagttcgacccccctaaggtgtaccctcccgtccccgccgagaagagaaagcccatccgggtcctgagcctgttcgatggcatcgccaccggtctgctggtgctgaaggacctgggcatccaggtggataggtacattgcctccgaggtgtgcgaggactccatcaccgtgggaatggtgcgtcatcagggcaagatcatgtacgtgggcgacgtgcggagcgtgacacagaagcatatccaggagtggggccctttcgacctggtgatcggcggcagcccttgcaatgacctgagcatcgtgaacccagcccggaagggcctgtacgagggaaccggcagactgttcttcgagttttacagactgctgcacgacgcccggcctaaggaaggcgacgaccggcccttcttttggctgttcgagaatgtggtggccatgggagtcagcgacaagcgggatattagccggttcctggagagcaaccccgtgatgatcgatgccaaggaagtgagcgccgcccaccgggccagatacttctggggcaatctgcctggcatgaacagacccctggccagcaccgtgaacgacaagctggagctgcaggagtgcctggagcacggccggatcgccaagttcagcaaggtgagaaccatcaccacccgaagcaacagcatcaaacaaggcaaggaccagcactttcctgtgttcatgaacgagaaggaggacatcctgtggtgtaccgagatggagagagtgttcgggttcccagtccactacacagatgtcagcaacatgtctagactggccagacagagactgctgggaagaagctggtccgtccctgtgatcagacacctgttcgcccctctgaaggagtacttcgcctgcgtgagcagcggcaacagcaacgccaacagccggggccccagcttctctagcggcctggtgccactgtccctgagagggagccacatgggccccatggagatctacaaaaccgtgagcgcctggaagcggcagcctgtgcgcgtgctgagcctgtttcggaatatcgataaagtcctgaaaagcctgggattcctggagagcggctctggctccggcggtggcaccctgaagtacgtggaggatgtgacaaacgtggtcagacgggatgtggagaagtggggccccttcgatctggtgtacggcagcacccaacccctgggcagctcttgtgaccggtgccctggctggtacatgtttcagttccaccggatcctgcagtacgccctgccgagacaggagtcccagcggccattcttttggattttcatggacaacttgctgctgaccgaggatgaccaggaaactaccactcggttcctgcagaccgaagccgtgaccctgcaggacgtgagaggccgggactaccagaacgccatgcgggtgtggtccaacatccctggactgaaaagcaagcacgcacctctgacccctaaagaagaggagtacctgcaggcccaggtgcggagcagaagcaagctggacgcccctaaggtggatctgctggtgaagaattgcctcctgcccctgagagagtacttcaagtatttcagccagaatagtctgcccctgggaggcagcggcggcggcgccctggtgacatttgaggacgtcgccgtgcggttcacccaggaggaatgggctctgctggatccttctcagaaaatcctgtaccgggacgtgatgagagagacataccggaatctgacctccgtgggcatcaactgggaatgttgggaccttgaagcctgcttcagaagcctgggaagaaacctgagagtgcaggtggtgaagagaaagtgcgagctgaccaacagcggcccctgcgccgagggcggcccaagcagcggcgcccctcctcccagcggcggcagcccagccggctccccaacctctaccgaggagggcacctctgagtccgccacccccgagagcggccctggcacctccaccgagcccagcgagggcagcgcacccggcagccctgccggcagccccacctccacagaggagggaaccagcaccgagcccagcgaaggcagcgccccaggcaccagcaccgagcctagtgagcaggagattaaacggatcaacaagatcagaagaagacttgtgaaagacagcaacaccaagaaggccggcaagacaggccccatgaaaaccctgctggttagagtgatgacacccgatctgagagagcggctggaaaacctgagaaagaagcctgaaaatatcccccagcccatcagcaatacatctagagccaacctgaataagctgctgaccgattacaccgaaatgaagaaggcgatcctgcatgtgtactgggaagagttccagaaggaccctgtgggcctgatgagccgggtggcccagcctgccagcaagaagatcgatcagaacaagctgaaacctgagatggacgagaagggcaacctgaccaccgccggctttgcctgctctcagtgtggccagcccctgttcgtgtacaagctggagcaggtgtctgagaagggcaaggcttacaccaactacttcggacggtgcaatgtggccgagcacgaaaagctgatcctgctggcccagctgaagcccgagaaggatagcgacgaagccgtgacatatagcctgggaaagtttgggcagagggccctggatttctacagcattcatgtgaccaaggagtccacccaccccgtgaagcccctggcccagatcgccggaaacagatacgcctccggacctgtgggaaaggccctgagcgacgcatgtatgggcacaatcgcctccttcctgtctaagtaccaggacatcatcatcgaacaccagaaggtggtgaagggcaaccagaagagactggagagcctgcgggagctggccggcaaggaaaacctggaataccctagcgtgaccctgccacctcagcctcacaccaaggagggcgttgatgcctacaacgaagtgatcgcccgggtgcgaatgtgggtgaacctgaacctgtggcagaagctgaagctaagcagagatgatgccaagcctctgctgagactgaagggattcccttcctttcctctggtcgagagacaggccaacgaagtggactggtgggacatggtgtgtaacgtgaagaagctgatcaacgagaaaaaggaggatggcaaggtgttttggcagaatctggctggctacaagagacaggaagccctgagaccatacctgagcagcgaggaagatcggaagaagggaaagaaattcgctcggtaccagctgggcgacctgctgctgcacctggaaaagaagcacggcgaggactggggaaaggtgtacgacgaggcctgggagcggattgacaagaaagtggaaggcctgagcaagcacatcaagctggaagaggaacggagaagcgaggacgcccagagcaaggccgccctgaccgactggctgcgggctaaggccagcttcgtgatcgagggcctgaaggaggccgacaaggacgagttctgcagatgcgagctgaagctgcagaagtggtacggggacctgcggggaaagcccttcgccatcgaagccgagaacagcatcctggacatcagcggcttcagcaagcagtacaactgtgccttcatctggcagaaggacggcgtgaagaagctgaacctgtacctgatcatcaactacttcaagggcggcaagctgcggttcaagaagatcaaacctgaagccttcgaagccaacagattctacaccgtgatcaacaaaaagagcggcgagatcgtgcccatggaggtgaacttcaacttcgacgaccccaacctgatcatcctgcctctggcctttggcaagagacagggcagagaattcatctggaacgacctgctgtccctggaaaccggcagcctgaagctggccaacggaagagtgatcgagaagacactgtacaacagaagaacccggcaggatgagcctgccctgttcgtggccctgaccttcgagcggcgggaggtcctggactcctccaatatcaaaccaatgaacctgatcggcgtggcaagaggcgaaaacatccccgccgtgatcgccctgaccgaccccgagggctgcccactgagccggtttaaggatagcctgggaaacccaacccacatcctgagaatcggcgagagctataaggagaagcagcggaccatccaggccaagaaggaggtggagcagcggagagccggcggctacagccggaagtacgccagcaaagccaagaatctggcagacgatatggtgagaaacaccgctagagatctgctgtactacgccgtgacccaggatgccatgctgatcttcgccaacctgagccggggcttcggccggcagggcaagcggaccttcatggccgagagacagtacacacggatggaggactggctgaccgccaagctggcctacgagggcctgagcaagacctacctgtccaagacactggcccagtacacctccaagacatgcagcaactgtgggtttaccatcaccagcgccgactacgacagggtgctggagaagctgaagaagacagcaacaggctggatgaccacaattaacggcaaggagctgaaggtggagggccagattacctactacaacagatacaagagacagaacgtagtcaaggacctgtccgtcgagctggatagactgagcgaagaatctgtgaacaacgacatctcctcctggacaaagggcagaagcggagaagctctgagcctcctgaagaaaagattctcccatagacccgtgcaggagaagttcgtgtgcctgaactgcggcttcgagacacacgcagccgagcaagccgccctgaacatcgccagatcctggctgttcctgcggagccaggagtacaagaaataccagacaaacaagacaaccggcaacaccgataagagagccttcgtcgagacctggcagtccttttaccggaagaagcttaaggaggtgtggaaacctgccgtgcggtctggcggatctggcggaggctccctgacctacgacgacgtgtacgtgaacttcacccaggaggagtgggccctgctgaaccccagccagaagagcctgtacaaggacgtgatgctggagacctacaggaacctgatcgccgtgggctacaactgggaggaccacaacatcgaggagcactgccagagcagcaggaggcacggcaggaacgagaggatcctgaccggcgagaacccctacgagggcatccagtgcggcgaggccttcgtgcaccacggcggcccaagcagcggcgcccctcctcccagcggcggcagcccagccggctccccaacctctaccgaggagggcacctctgagtccgccacccccgagagcggccctggcacctccaccgagcccagcgagggcagcgcacccggcagccctgccggcagccccacctccacagaggagggaaccagcaccgagcccagcgaaggcagcgccccaggcaccagcaccgagcctagtgagcaggagattaaacggatcaacaagatcagaagaagacttgtgaaagacagcaacaccaagaaggccggcaagacaggccccatgaaaaccctgctggttagagtgatgacacccgatctgagagagcggctggaaaacctgagaaagaagcctgaaaatatcccccagcccatcagcaatacatctagagccaacctgaataagctgctgaccgattacaccgaaatgaagaaggcgatcctgcatgtgtactgggaagagttccagaaggaccctgtgggcctgatgagccgggtggcccagcctgccagcaagaagatcgatcagaacaagctgaaacctgagatggacgagaagggcaacctgaccaccgccggctttgcctgctctcagtgtggccagcccctgttcgtgtacaagctggagcaggtgtctgagaagggcaaggcttacaccaactacttcggacggtgcaatgtggccgagcacgaaaagctgatcctgctggcccagctgaagcccgagaaggatagcgacgaagccgtgacatatagcctgggaaagtttgggcagagggccctggatttctacagcattcatgtgaccaaggagtccacccaccccgtgaagcccctggcccagatcgccggaaacagatacgcctccggacctgtgggaaaggccctgagcgacgcatgtatgggcacaatcgcctccttcctgtctaagtaccaggacatcatcatcgaacaccagaaggtggtgaagggcaaccagaagagactggagagcctgcgggagctggccggcaaggaaaacctggaataccctagcgtgaccctgccacctcagcctcacaccaaggagggcgttgatgcctacaacgaagtgatcgcccgggtgcgaatgtgggtgaacctgaacctgtggcagaagctgaagctaagcagagatgatgccaagcctctgctgagactgaagggattcccttcctttcctctggtcgagagacaggccaacgaagtggactggtgggacatggtgtgtaacgtgaagaagctgatcaacgagaaaaaggaggatggcaaggtgttttggcagaatctggctggctacaagagacaggaagccctgagaccatacctgagcagcgaggaagatcggaagaagggaaagaaattcgctcggtaccagctgggcgacctgctgctgcacctggaaaagaagcacggcgaggactggggaaaggtgtacgacgaggcctgggagcggattgacaagaaagtggaaggcctgagcaagcacatcaagctggaagaggaacggagaagcgaggacgcccagagcaaggccgccctgaccgactggctgcgggctaaggccagcttcgtgatcgagggcctgaaggaggccgacaaggacgagttctgcagatgcgagctgaagctgcagaagtggtacggggacctgcggggaaagcccttcgccatcgaagccgagaacagcatcctggacatcagcggcttcagcaagcagtacaactgtgccttcatctggcagaaggacggcgtgaagaagctgaacctgtacctgatcatcaactacttcaagggcggcaagctgcggttcaagaagatcaaacctgaagccttcgaagccaacagattctacaccgtgatcaacaaaaagagcggcgagatcgtgcccatggaggtgaacttcaacttcgacgaccccaacctgatcatcctgcctctggcctttggcaagagacagggcagagaattcatctggaacgacctgctgtccctggaaaccggcagcctgaagctggccaacggaagagtgatcgagaagacactgtacaacagaagaacccggcaggatgagcctgccctgttcgtggccctgaccttcgagcggcgggaggtcctggactcctccaatatcaaaccaatgaacctgatcggcgtggcaagaggcgaaaacatccccgccgtgatcgccctgaccgaccccgagggctgcccactgagccggtttaaggatagcctgggaaacccaacccacatcctgagaatcggcgagagctataaggagaagcagcggaccatccaggccaagaaggaggtggagcagcggagagccggcggctacagccggaagtacgccagcaaagccaagaatctggcagacgatatggtgagaaacaccgctagagatctgctgtactacgccgtgacccaggatgccatgctgatcttcgccaacctgagccggggcttcggccggcagggcaagcggaccttcatggccgagagacagtacacacggatggaggactggctgaccgccaagctggcctacgagggcctgagcaagacctacctgtccaagacactggcccagtacacctccaagacatgcagcaactgtgggtttaccatcaccagcgccgactacgacagggtgctggagaagctgaagaagacagcaacaggctggatgaccacaattaacggcaaggagctgaaggtggagggccagattacctactacaacagatacaagagacagaacgtagtcaaggacctgtccgtcgagctggatagactgagcgaagaatctgtgaacaacgacatctcctcctggacaaagggcagaagcggagaagctctgagcctcctgaagaaaagattctcccatagacccgtgcaggagaagttcgtgtgcctgaactgcggcttcgagacacacgcagccgagcaagccgccctgaacatcgccagatcctggctgttcctgcggagccaggagtacaagaaataccagacaaacaagacaaccggcaacaccgataagagagccttcgtcgagacctggcagtccttttaccggaagaagcttaaggaggtgtggaaacctgccgtgcggtctggcggatctggcggaggctcctctgacctacgacgacgtgtacgtgaacttcacccaggaggagtgggccctgctgaaccccagccagaagagcctgtacaaggacgtgatgctggagacctacaggaacctgatcgccgtgggctacaactgggaggaccacaacatcgaggagcactgccagagcagcaggaggcacggcaggaacgagaggatcctgaccggcgagaacccctacgagggcatccagtgcggcgaggccttcgtgcaccacggatctggctccggcagcggccccaagaaaaagagaaaagtctaagctgccttctgcggggcttgccttctggccatgcccttcttctctcccttgcacctgtacctcttggtctttgaataaagcctgagtaggaaggctagcaaaaaaaaaaaaaaaaaaaaaaaaaaaaaaaaaaaaaaaaaaaaaaaaaaaaaaaaaaaaaaaaaaaaaaaaaaaaaaaa

SEQ ID NO: 15957 - RNA, 9485 nt, synthetic construct
  source 1..9485: mol_type = other RNA
aggaaataagagagaaaagaagagtaagaagaaatataagagccaccatggcccctaagaagaagcgtaaagtgagccggatggaacgcctcgtctacgaggtgcggcagaagtgcagaaacatcgaggacatctgcatctcctgcggatctctgaacgtgaccctggagcacccactgttcatcggcggcatgtgccagaactgtaaaaactgttttctggagtgtgcctatcaatacgacgatgacggctaccagagctactgcaccatctgttgcggcggaagagaggtgctgatgtgtggaaataacaactgctgccggtgcttctgcgtggaatgcgtggacctgctggtgggccccggcgccgcccaggccgctattaaggaagatccttggaactgctacatgtgcggccacaagggcacatacggcctgctgagacggagagaggactggcctagcagactgcagatgttcttcgccaataaccacgaccaggagttcgacccccctaaggtgtaccctcccgtccccgccgagaagagaaagcccatccgggtcctgagcctgttcgatggcatcgccaccggtctgctggtgctgaaggacctgggcatccaggtggataggtacattgcctccgaggtgtgcgaggactccatcaccgtgggaatggtgcgtcatcagggcaagatcatgtacgtgggcgacgtgcggagcgtgacacagaagcatatccaggagtggggccctttcgacctggtgatcggcggcagcccttgcaatgacctgagcatcgtgaacccagcccggaagggcctgtacgagggaaccggcagactgttcttcgagttttacagactgctgcacgacgcccggcctaaggaaggcgacgaccggcccttcttttggctgttcgagaatgtggtggccatgggagtcagcgacaagcgggatattagccggttcctggagagcaaccccgtgatgatcgatgccaaggaagtgagcgccgcccaccgggccagatacttctggggcaatctgcctggcatgaacagacccctggccagcaccgtgaacgacaagctggagctgcaggagtgcctggagcacggccggatcgccaagttcagcaaggtgagaaccatcaccacccgaagcaacagcatcaaacaaggcaaggaccagcactttcctgtgttcatgaacgagaaggaggacatcctgtggtgtaccgagatggagagagtgttcgggttcccagtccactacacagatgtcagcaacatgtctagactggccagacagagactgctgggaagaagctggtccgtccctgtgatcagacacctgttcgcccctctgaaggagtacttcgcctgcgtgagcagcggcaacagcaacgccaacagccggggccccagcttctctagcggcctggtgccactgtccctgagagggagccacatgggccccatggagatctacaaaaccgtgagcgcctggaagcggcagcctgtgcgcgtgctgagcctgtttcggaatatcgataaagtcctgaaaagcctgggattcctggagagcggctctggctccggcggtggcaccctgaagtacgtggaggatgtgacaaacgtggtcagacgggatgtggagaagtggggccccttcgatctggtgtacggcagcacccaacccctgggcagctcttgtgaccggtgccctggctggtacatgtttcagttccaccggatcctgcagtacgccctgccgagacaggagtcccagcggccattcttttggattttcatggacaacttgctgctgaccgaggatgaccaggaaactaccactcggttcctgcagaccgaagccgtgaccctgcaggacgtgagaggccgggactaccagaacgccatgcgggtgtggtccaacatccctggactgaaaagcaagcacgcacctctgacccctaaagaagaggagtacctgcaggcccaggtgcggagcagaagcaagctggacgcccctaaggtggatctgctggtgaagaattgcctcctgcccctgagagagtacttcaagtatttcagccagaatagtctgcccctgggaggcagcggcggcggcgccctggtgacatttgaggacgtcgccgtgcggttcacccaggaggaatgggctctgctggatccttctcagaaaatcctgtaccgggacgtgatgagagagacataccggaatctgacctccgtgggcatcaactgggaatgttgggaccttgaagcctgcttcagaagcctgggaagaaacctgagagtgcaggtggtgaagagaaagtgcgagctgaccaacagcggcccctgcgccgagggcggcccaagcagcggcgcccctcctcccagcggcggcagcccagccggctccccaacctctaccgaggagggcacctctgagtccgccacccccgagagcggccctggcacctccaccgagcccagcgagggcagcgcacccggcagccctgccggcagccccacctccacagaggagggaaccagcaccgagcccagcgaaggcagcgccccaggcaccagcaccgagcctagtgagcaggagattaaacggatcaacaagatcagaagaagacttgtgaaagacagcaacaccaagaaggccggcaagacaggccccatgaaaaccctgctggttagagtgatgacacccgatctgagagagcggctggaaaacctgagaaagaagcctgaaaatatcccccagcccatcagcaatacatctagagccaacctgaataagctgctgaccgattacaccgaaatgaagaaggcgatcctgcatgtgtactgggaagagttccagaaggaccctgtgggcctgatgagccgggtggcccagcctgccagcaagaagatcgatcagaacaagctgaaacctgagatggacgagaagggcaacctgaccaccgccggctttgcctgctctcagtgtggccagcccctgttcgtgtacaagctggagcaggtgtctgagaagggcaaggcttacaccaactacttcggacggtgcaatgtggccgagcacgaaaagctgatcctgctggcccagctgaagcccgagaaggatagcgacgaagccgtgacatatagcctgggaaagtttgggcagagggccctggatttctacagcattcatgtgaccaaggagtccacccaccccgtgaagcccctggcccagatcgccggaaacagatacgcctccggacctgtgggaaaggccctgagcgacgcatgtatgggcacaatcgcctccttcctgtctaagtaccaggacatcatcatcgaacaccagaaggtggtgaagggcaaccagaagagactggagagcctgcgggagctggccggcaaggaaaacctggaataccctagcgtgaccctgccacctcagcctcacaccaaggagggcgttgatgcctacaacgaagtgatcgcccgggtgcgaatgtgggtgaacctgaacctgtggcagaagctgaagctaagcagagatgatgccaagcctctgctgagactgaagggattcccttcctttcctctggtcgagagacaggccaacgaagtggactggtgggacatggtgtgtaacgtgaagaagctgatcaacgagaaaaaggaggatggcaaggtgttttggcagaatctggctggctacaagagacaggaagccctgagaccatacctgagcagcgaggaagatcggaagaagggaaagaaattcgctcggtaccagctgggcgacctgctgctgcacctggaaaagaagcacggcgaggactggggaaaggtgtacgacgaggcctgggagcggattgacaagaaagtggaaggcctgagcaagcacatcaagctggaagaggaacggagaagcgaggacgcccagagcaaggccgccctgaccgactggctgcgggctaaggccagcttcgtgatcgagggcctgaaggaggccgacaaggacgagttctgcagatgcgagctgaagctgcagaagtggtacggggacctgcggggaaagcccttcgccatcgaagccgagaacagcatcctggacatcagcggcttcagcaagcagtacaactgtgccttcatctggcagaaggacggcgtgaagaagctgaacctgtacctgatcatcaactacttcaagggcggcaagctgcggttcaagaagatcaaacctgaagccttcgaagccaacagattctacaccgtgatcaacaaaaagagcggcgagatcgtgcccatggaggtgaacttcaacttcgacgaccccaacctgatcatcctgcctctggcctttggcaagagacagggcagagaattcatctggaacgacctgctgtccctggaaaccggcagcctgaagctggccaacggaagagtgatcgagaagacactgtacaacagaagaacccggcaggatgagcctgccctgttcgtggccctgaccttcgagcggcgggaggtcctggactcctccaatatcaaaccaatgaacctgatcggcgtggcaagaggcgaaaacatccccgccgtgatcgccctgaccgaccccgagggctgcccactgagccggtttaaggatagcctgggaaacccaacccacatcctgagaatcggcgagagctataaggagaagcagcggaccatccaggccaagaaggaggtggagcagcggagagccggcggctacagccggaagtacgccagcaaagccaagaatctggcagacgatatggtgagaaacaccgctagagatctgctgtactacgccgtgacccaggatgccatgctgatcttcgccaacctgagccggggcttcggccggcagggcaagcggaccttcatggccgagagacagtacacacggatggaggactggctgaccgccaagctggcctacgagggcctgagcaagacctacctgtccaagacactggcccagtacacctccaagacatgcagcaactgtgggtttaccatcaccagcgccgactacgacagggtgctggagaagctgaagaagacagcaacaggctggatgaccacaattaacggcaaggagctgaaggtggagggccagattacctactacaacagatacaagagacagaacgtagtcaaggacctgtccgtcgagctggatagactgagcgaagaatctgtgaacaacgacatctcctcctggacaaagggcagaagcggagaagctctgagcctcctgaagaaaagattctcccatagacccgtgcaggagaagttcgtgtgcctgaactgcggcttcgagacacacgcagccgagcaagccgccctgaacatcgccagatcctggctgttcctgcggagccaggagtacaagaaataccagacaaacaagacaaccggcaacaccgataagagagccttcgtcgagacctggcagtccttttaccggaagaagcttaaggaggtgtggaaacctgccgtgcggtctggcggatctggcggaggctccctggagggcctggtgaccttcgaggaggtggccgtgtacttcaccgagagcgagtggagcctgctggaccccgcccagagggccctgtacagggacgtgatggaggagaactacgagaacgtgaccagcctgggcttccccgtgagcaagcccgacgtgatcagctggctggagaggggcgaggacccctgggtgcccgacctgcaggaccccgagaagagggagaccctgagggaggcctgcggcggcccaagcagcggcgcccctcctcccagcggcggcagcccagccggctccccaacctctaccgaggagggcacctctgagtccgccacccccgagagcggccctggcacctccaccgagcccagcgagggcagcgcacccggcagccctgccggcagccccacctccacagaggagggaaccagcaccgagcccagcgaaggcagcgccccaggcaccagcaccgagcctagtgagcaggagattaaacggatcaacaagatcagaagaagacttgtgaaagacagcaacaccaagaaggccggcaagacaggccccatgaaaaccctgctggttagagtgatgacacccgatctgagagagcggctggaaaacctgagaaagaagcctgaaaatatcccccagcccatcagcaatacatctagagccaacctgaataagctgctgaccgattacaccgaaatgaagaaggcgatcctgcatgtgtactgggaagagttccagaaggaccctgtgggcctgatgagccgggtggcccagcctgccagcaagaagatcgatcagaacaagctgaaacctgagatggacgagaagggcaacctgaccaccgccggctttgcctgctctcagtgtggccagcccctgttcgtgtacaagctggagcaggtgtctgagaagggcaaggcttacaccaactacttcggacggtgcaatgtggccgagcacgaaaagctgatcctgctggcccagctgaagcccgagaaggatagcgacgaagccgtgacatatagcctgggaaagtttgggcagagggccctggatttctacagcattcatgtgaccaaggagtccacccaccccgtgaagcccctggcccagatcgccggaaacagatacgcctccggacctgtgggaaaggccctgagcgacgcatgtatgggcacaatcgcctccttcctgtctaagtaccaggacatcatcatcgaacaccagaaggtggtgaagggcaaccagaagagactggagagcctgcgggagctggccggcaaggaaaacctggaataccctagcgtgaccctgccacctcagcctcacaccaaggagggcgttgatgcctacaacgaagtgatcgcccgggtgcgaatgtgggtgaacctgaacctgtggcagaagctgaagctaagcagagatgatgccaagcctctgctgagactgaagggattcccttcctttcctctggtcgagagacaggccaacgaagtggactggtgggacatggtgtgtaacgtgaagaagctgatcaacgagaaaaaggaggatggcaaggtgttttggcagaatctggctggctacaagagacaggaagccctgagaccatacctgagcagcgaggaagatcggaagaagggaaagaaattcgctcggtaccagctgggcgacctgctgctgcacctggaaaagaagcacggcgaggactggggaaaggtgtacgacgaggcctgggagcggattgacaagaaagtggaaggcctgagcaagcacatcaagctggaagaggaacggagaagcgaggacgcccagagcaaggccgccctgaccgactggctgcgggctaaggccagcttcgtgatcgagggcctgaaggaggccgacaaggacgagttctgcagatgcgagctgaagctgcagaagtggtacggggacctgcggggaaagcccttcgccatcgaagccgagaacagcatcctggacatcagcggcttcagcaagcagtacaactgtgccttcatctggcagaaggacggcgtgaagaagctgaacctgtacctgatcatcaactacttcaagggcggcaagctgcggttcaagaagatcaaacctgaagccttcgaagccaacagattctacaccgtgatcaacaaaaagagcggcgagatcgtgcccatggaggtgaacttcaacttcgacgaccccaacctgatcatcctgcctctggcctttggcaagagacagggcagagaattcatctggaacgacctgctgtccctggaaaccggcagcctgaagctggccaacggaagagtgatcgagaagacactgtacaacagaagaacccggcaggatgagcctgccctgttcgtggccctgaccttcgagcggcgggaggtcctggactcctccaatatcaaaccaatgaacctgatcggcgtggcaagaggcgaaaacatccccgccgtgatcgccctgaccgaccccgagggctgcccactgagccggtttaaggatagcctgggaaacccaacccacatcctgagaatcggcgagagctataaggagaagcagcggaccatccaggccaagaaggaggtggagcagcggagagccggcggctacagccggaagtacgccagcaaagccaagaatctggcagacgatatggtgagaaacaccgctagagatctgctgtactacgccgtgacccaggatgccatgctgatcttcgccaacctgagccggggcttcggccggcagggcaagcggaccttcatggccgagagacagtacacacggatggaggactggctgaccgccaagctggcctacgagggcctgagcaagacctacctgtccaagacactggcccagtacacctccaagacatgcagcaactgtgggtttaccatcaccagcgccgactacgacagggtgctggagaagctgaagaagacagcaacaggctggatgaccacaattaacggcaaggagctgaaggtggagggccagattacctactacaacagatacaagagacagaacgtagtcaaggacctgtccgtcgagctggatagactgagcgaagaatctgtgaacaacgacatctcctcctggacaaagggcagaagcggagaagctctgagcctcctgaagaaaagattctcccatagacccgtgcaggagaagttcgtgtgcctgaactgcggcttcgagacacacgcagccgagcaagccgccctgaacatcgccagatcctggctgttcctgcggagccaggagtacaagaaataccagacaaacaagacaaccggcaacaccgataagagagccttcgtcgagacctggcagtccttttaccggaagaagcttaaggaggtgtggaaacctgccgtgcggtctggcggatctggcggaggctcctctggagggcctggtgaccttcgaggaggtggccgtgtacttcaccgagagcgagtggagcctgctggaccccgcccagagggccctgtacagggacgtgatggaggagaactacgagaacgtgaccagcctgggcttccccgtgagcaagcccgacgtgatcagctggctggagaggggcgaggacccctgggtgcccgacctgcaggaccccgagaagagggagaccctgagggaggcctgcggatctggctccggcagcggccccaagaaaaagagaaaagtctaagctgccttctgcggggcttgccttctggccatgcccttcttctctcccttgcacctgtacctcttggtctttgaataaagcctgagtaggaaggctagcaaaaaaaaaaaaaaaaaaaaaaaaaaaaaaaaaaaaaaaaaaaaaaaaaaaaaaaaaaaaaaaaaaaaaaaaaaaaaaaa

SEQ ID NO: 15958 - RNA, 9485 nt, synthetic construct
  source 1..9485: mol_type = other RNA
aggaaataagagagaaaagaagagtaagaagaaatataagagccaccatggcccctaagaagaagcgtaaagtgagccggatggaacgcctcgtctacgaggtgcggcagaagtgcagaaacatcgaggacatctgcatctcctgcggatctctgaacgtgaccctggagcacccactgttcatcggcggcatgtgccagaactgtaaaaactgttttctggagtgtgcctatcaatacgacgatgacggctaccagagctactgcaccatctgttgcggcggaagagaggtgctgatgtgtggaaataacaactgctgccggtgcttctgcgtggaatgcgtggacctgctggtgggccccggcgccgcccaggccgctattaaggaagatccttggaactgctacatgtgcggccacaagggcacatacggcctgctgagacggagagaggactggcctagcagactgcagatgttcttcgccaataaccacgaccaggagttcgacccccctaaggtgtaccctcccgtccccgccgagaagagaaagcccatccgggtcctgagcctgttcgatggcatcgccaccggtctgctggtgctgaaggacctgggcatccaggtggataggtacattgcctccgaggtgtgcgaggactccatcaccgtgggaatggtgcgtcatcagggcaagatcatgtacgtgggcgacgtgcggagcgtgacacagaagcatatccaggagtggggccctttcgacctggtgatcggcggcagcccttgcaatgacctgagcatcgtgaacccagcccggaagggcctgtacgagggaaccggcagactgttcttcgagttttacagactgctgcacgacgcccggcctaaggaaggcgacgaccggcccttcttttggctgttcgagaatgtggtggccatgggagtcagcgacaagcgggatattagccggttcctggagagcaaccccgtgatgatcgatgccaaggaagtgagcgccgcccaccgggccagatacttctggggcaatctgcctggcatgaacagacccctggccagcaccgtgaacgacaagctggagctgcaggagtgcctggagcacggccggatcgccaagttcagcaaggtgagaaccatcaccacccgaagcaacagcatcaaacaaggcaaggaccagcactttcctgtgttcatgaacgagaaggaggacatcctgtggtgtaccgagatggagagagtgttcgggttcccagtccactacacagatgtcagcaacatgtctagactggccagacagagactgctgggaagaagctggtccgtccctgtgatcagacacctgttcgcccctctgaaggagtacttcgcctgcgtgagcagcggcaacagcaacgccaacagccggggccccagcttctctagcggcctggtgccactgtccctgagagggagccacatgggccccatggagatctacaaaaccgtgagcgcctggaagcggcagcctgtgcgcgtgctgagcctgtttcggaatatcgataaagtcctgaaaagcctgggattcctggagagcggctctggctccggcggtggcaccctgaagtacgtggaggatgtgacaaacgtggtcagacgggatgtggagaagtggggccccttcgatctggtgtacggcagcacccaacccctgggcagctcttgtgaccggtgccctggctggtacatgtttcagttccaccggatcctgcagtacgccctgccgagacaggagtcccagcggccattcttttggattttcatggacaacttgctgctgaccgaggatgaccaggaaactaccactcggttcctgcagaccgaagccgtgaccctgcaggacgtgagaggccgggactaccagaacgccatgcgggtgtggtccaacatccctggactgaaaagcaagcacgcacctctgacccctaaagaagaggagtacctgcaggcccaggtgcggagcagaagcaagctggacgcccctaaggtggatctgctggtgaagaattgcctcctgcccctgagagagtacttcaagtatttcagccagaatagtctgcccctgggaggcagcggcggcggcgccctggtgacatttgaggacgtcgccgtgcggttcacccaggaggaatgggctctgctggatccttctcagaaaatcctgtaccgggacgtgatgagagagacataccggaatctgacctccgtgggcatcaactgggaatgttgggaccttgaagcctgcttcagaagcctgggaagaaacctgagagtgcaggtggtgaagagaaagtgcgagctgaccaacagcggcccctgcgccgagggcggcccaagcagcggcgcccctcctcccagcggcggcagcccagccggctccccaacctctaccgaggagggcacctctgagtccgccacccccgagagcggccctggcacctccaccgagcccagcgagggcagcgcacccggcagccctgccggcagccccacctccacagaggagggaaccagcaccgagcccagcgaaggcagcgccccaggcaccagcaccgagcctagtgagcaggagattaaacggatcaacaagatcagaagaagacttgtgaaagacagcaacaccaagaaggccggcaagacaggccccatgaaaaccctgctggttagagtgatgacacccgatctgagagagcggctggaaaacctgagaaagaagcctgaaaatatcccccagcccatcagcaatacatctagagccaacctgaataagctgctgaccgattacaccgaaatgaagaaggcgatcctgcatgtgtactgggaagagttccagaaggaccctgtgggcctgatgagccgggtggcccagcctgccagcaagaagatcgatcagaacaagctgaaacctgagatggacgagaagggcaacctgaccaccgccggctttgcctgctctcagtgtggccagcccctgttcgtgtacaagctggagcaggtgtctgagaagggcaaggcttacaccaactacttcggacggtgcaatgtggccgagcacgaaaagctgatcctgctggcccagctgaagcccgagaaggatagcgacgaagccgtgacatatagcctgggaaagtttgggcagagggccctggatttctacagcattcatgtgaccaaggagtccacccaccccgtgaagcccctggcccagatcgccggaaacagatacgcctccggacctgtgggaaaggccctgagcgacgcatgtatgggcacaatcgcctccttcctgtctaagtaccaggacatcatcatcgaacaccagaaggtggtgaagggcaaccagaagagactggagagcctgcgggagctggccggcaaggaaaacctggaataccctagcgtgaccctgccacctcagcctcacaccaaggagggcgttgatgcctacaacgaagtgatcgcccgggtgcgaatgtgggtgaacctgaacctgtggcagaagctgaagctaagcagagatgatgccaagcctctgctgagactgaagggattcccttcctttcctctggtcgagagacaggccaacgaagtggactggtgggacatggtgtgtaacgtgaagaagctgatcaacgagaaaaaggaggatggcaaggtgttttggcagaatctggctggctacaagagacaggaagccctgagaccatacctgagcagcgaggaagatcggaagaagggaaagaaattcgctcggtaccagctgggcgacctgctgctgcacctggaaaagaagcacggcgaggactggggaaaggtgtacgacgaggcctgggagcggattgacaagaaagtggaaggcctgagcaagcacatcaagctggaagaggaacggagaagcgaggacgcccagagcaaggccgccctgaccgactggctgcgggctaaggccagcttcgtgatcgagggcctgaaggaggccgacaaggacgagttctgcagatgcgagctgaagctgcagaagtggtacggggacctgcggggaaagcccttcgccatcgaagccgagaacagcatcctggacatcagcggcttcagcaagcagtacaactgtgccttcatctggcagaaggacggcgtgaagaagctgaacctgtacctgatcatcaactacttcaagggcggcaagctgcggttcaagaagatcaaacctgaagccttcgaagccaacagattctacaccgtgatcaacaaaaagagcggcgagatcgtgcccatggaggtgaacttcaacttcgacgaccccaacctgatcatcctgcctctggcctttggcaagagacagggcagagaattcatctggaacgacctgctgtccctggaaaccggcagcctgaagctggccaacggaagagtgatcgagaagacactgtacaacagaagaacccggcaggatgagcctgccctgttcgtggccctgaccttcgagcggcgggaggtcctggactcctccaatatcaaaccaatgaacctgatcggcgtggcaagaggcgaaaacatccccgccgtgatcgccctgaccgaccccgagggctgcccactgagccggtttaaggatagcctgggaaacccaacccacatcctgagaatcggcgagagctataaggagaagcagcggaccatccaggccaagaaggaggtggagcagcggagagccggcggctacagccggaagtacgccagcaaagccaagaatctggcagacgatatggtgagaaacaccgctagagatctgctgtactacgccgtgacccaggatgccatgctgatcttcgccaacctgagccggggcttcggccggcagggcaagcggaccttcatggccgagagacagtacacacggatggaggactggctgaccgccaagctggcctacgagggcctgagcaagacctacctgtccaagacactggcccagtacacctccaagacatgcagcaactgtgggtttaccatcaccagcgccgactacgacagggtgctggagaagctgaagaagacagcaacaggctggatgaccacaattaacggcaaggagctgaaggtggagggccagattacctactacaacagatacaagagacagaacgtagtcaaggacctgtccgtcgagctggatagactgagcgaagaatctgtgaacaacgacatctcctcctggacaaagggcagaagcggagaagctctgagcctcctgaagaaaagattctcccatagacccgtgcaggagaagttcgtgtgcctgaactgcggcttcgagacacacgcagccgagcaagccgccctgaacatcgccagatcctggctgttcctgcggagccaggagtacaagaaataccagacaaacaagacaaccggcaacaccgataagagagccttcgtcgagacctggcagtccttttaccggaagaagcttaaggaggtgtggaaacctgccgtgcggtctggcggatctggcggaggctccatccaggagagcgtgaccttcaaggacgtgagcgtggacttcacctgggaggagtggaggcacctggaccccgcccagagggacctgtacaggaacgtgatgctggagaactacgagaacctggtgagcgtgggcatcagcgtgagcaccgtggacatgatcagcctgctggagaagagggacggcccctggatgcccgagggcgaggtgagcggcgccatctgccccgacagcctgaacgagggcggcccaagcagcggcgcccctcctcccagcggcggcagcccagccggctccccaacctctaccgaggagggcacctctgagtccgccacccccgagagcggccctggcacctccaccgagcccagcgagggcagcgcacccggcagccctgccggcagccccacctccacagaggagggaaccagcaccgagcccagcgaaggcagcgccccaggcaccagcaccgagcctagtgagcaggagattaaacggatcaacaagatcagaagaagacttgtgaaagacagcaacaccaagaaggccggcaagacaggccccatgaaaaccctgctggttagagtgatgacacccgatctgagagagcggctggaaaacctgagaaagaagcctgaaaatatcccccagcccatcagcaatacatctagagccaacctgaataagctgctgaccgattacaccgaaatgaagaaggcgatcctgcatgtgtactgggaagagttccagaaggaccctgtgggcctgatgagccgggtggcccagcctgccagcaagaagatcgatcagaacaagctgaaacctgagatggacgagaagggcaacctgaccaccgccggctttgcctgctctcagtgtggccagcccctgttcgtgtacaagctggagcaggtgtctgagaagggcaaggcttacaccaactacttcggacggtgcaatgtggccgagcacgaaaagctgatcctgctggcccagctgaagcccgagaaggatagcgacgaagccgtgacatatagcctgggaaagtttgggcagagggccctggatttctacagcattcatgtgaccaaggagtccacccaccccgtgaagcccctggcccagatcgccggaaacagatacgcctccggacctgtgggaaaggccctgagcgacgcatgtatgggcacaatcgcctccttcctgtctaagtaccaggacatcatcatcgaacaccagaaggtggtgaagggcaaccagaagagactggagagcctgcgggagctggccggcaaggaaaacctggaataccctagcgtgaccctgccacctcagcctcacaccaaggagggcgttgatgcctacaacgaagtgatcgcccgggtgcgaatgtgggtgaacctgaacctgtggcagaagctgaagctaagcagagatgatgccaagcctctgctgagactgaagggattcccttcctttcctctggtcgagagacaggccaacgaagtggactggtgggacatggtgtgtaacgtgaagaagctgatcaacgagaaaaaggaggatggcaaggtgttttggcagaatctggctggctacaagagacaggaagccctgagaccatacctgagcagcgaggaagatcggaagaagggaaagaaattcgctcggtaccagctgggcgacctgctgctgcacctggaaaagaagcacggcgaggactggggaaaggtgtacgacgaggcctgggagcggattgacaagaaagtggaaggcctgagcaagcacatcaagctggaagaggaacggagaagcgaggacgcccagagcaaggccgccctgaccgactggctgcgggctaaggccagcttcgtgatcgagggcctgaaggaggccgacaaggacgagttctgcagatgcgagctgaagctgcagaagtggtacggggacctgcggggaaagcccttcgccatcgaagccgagaacagcatcctggacatcagcggcttcagcaagcagtacaactgtgccttcatctggcagaaggacggcgtgaagaagctgaacctgtacctgatcatcaactacttcaagggcggcaagctgcggttcaagaagatcaaacctgaagccttcgaagccaacagattctacaccgtgatcaacaaaaagagcggcgagatcgtgcccatggaggtgaacttcaacttcgacgaccccaacctgatcatcctgcctctggcctttggcaagagacagggcagagaattcatctggaacgacctgctgtccctggaaaccggcagcctgaagctggccaacggaagagtgatcgagaagacactgtacaacagaagaacccggcaggatgagcctgccctgttcgtggccctgaccttcgagcggcgggaggtcctggactcctccaatatcaaaccaatgaacctgatcggcgtggcaagaggcgaaaacatccccgccgtgatcgccctgaccgaccccgagggctgcccactgagccggtttaaggatagcctgggaaacccaacccacatcctgagaatcggcgagagctataaggagaagcagcggaccatccaggccaagaaggaggtggagcagcggagagccggcggctacagccggaagtacgccagcaaagccaagaatctggcagacgatatggtgagaaacaccgctagagatctgctgtactacgccgtgacccaggatgccatgctgatcttcgccaacctgagccggggcttcggccggcagggcaagcggaccttcatggccgagagacagtacacacggatggaggactggctgaccgccaagctggcctacgagggcctgagcaagacctacctgtccaagacactggcccagtacacctccaagacatgcagcaactgtgggtttaccatcaccagcgccgactacgacagggtgctggagaagctgaagaagacagcaacaggctggatgaccacaattaacggcaaggagctgaaggtggagggccagattacctactacaacagatacaagagacagaacgtagtcaaggacctgtccgtcgagctggatagactgagcgaagaatctgtgaacaacgacatctcctcctggacaaagggcagaagcggagaagctctgagcctcctgaagaaaagattctcccatagacccgtgcaggagaagttcgtgtgcctgaactgcggcttcgagacacacgcagccgagcaagccgccctgaacatcgccagatcctggctgttcctgcggagccaggagtacaagaaataccagacaaacaagacaaccggcaacaccgataagagagccttcgtcgagacctggcagtccttttaccggaagaagcttaaggaggtgtggaaacctgccgtgcggtctggcggatctggcggaggctcctatccaggagagcgtgaccttcaaggacgtgagcgtggacttcacctgggaggagtggaggcacctggaccccgcccagagggacctgtacaggaacgtgatgctggagaactacgagaacctggtgagcgtgggcatcagcgtgagcaccgtggacatgatcagcctgctggagaagagggacggcccctggatgcccgagggcgaggtgagcggcgccatctgccccgacagcctgaacgagggatctggctccggcagcggccccaagaaaaagagaaaagtctaagctgccttctgcggggcttgccttctggccatgcccttcttctctcccttgcacctgtacctcttggtctttgaataaagcctgagtaggaaggctagcaaaaaaaaaaaaaaaaaaaaaaaaaaaaaaaaaaaaaaaaaaaaaaaaaaaaaaaaaaaaaaaaaaaaaaaaaaaaaaaa

SEQ ID NO: 15959 - RNA, 9485 nt, synthetic construct
  source 1..9485: mol_type = other RNA
aggaaataagagagaaaagaagagtaagaagaaatataagagccaccatggcccctaagaagaagcgtaaagtgagccggatggaacgcctcgtctacgaggtgcggcagaagtgcagaaacatcgaggacatctgcatctcctgcggatctctgaacgtgaccctggagcacccactgttcatcggcggcatgtgccagaactgtaaaaactgttttctggagtgtgcctatcaatacgacgatgacggctaccagagctactgcaccatctgttgcggcggaagagaggtgctgatgtgtggaaataacaactgctgccggtgcttctgcgtggaatgcgtggacctgctggtgggccccggcgccgcccaggccgctattaaggaagatccttggaactgctacatgtgcggccacaagggcacatacggcctgctgagacggagagaggactggcctagcagactgcagatgttcttcgccaataaccacgaccaggagttcgacccccctaaggtgtaccctcccgtccccgccgagaagagaaagcccatccgggtcctgagcctgttcgatggcatcgccaccggtctgctggtgctgaaggacctgggcatccaggtggataggtacattgcctccgaggtgtgcgaggactccatcaccgtgggaatggtgcgtcatcagggcaagatcatgtacgtgggcgacgtgcggagcgtgacacagaagcatatccaggagtggggccctttcgacctggtgatcggcggcagcccttgcaatgacctgagcatcgtgaacccagcccggaagggcctgtacgagggaaccggcagactgttcttcgagttttacagactgctgcacgacgcccggcctaaggaaggcgacgaccggcccttcttttggctgttcgagaatgtggtggccatgggagtcagcgacaagcgggatattagccggttcctggagagcaaccccgtgatgatcgatgccaaggaagtgagcgccgcccaccgggccagatacttctggggcaatctgcctggcatgaacagacccctggccagcaccgtgaacgacaagctggagctgcaggagtgcctggagcacggccggatcgccaagttcagcaaggtgagaaccatcaccacccgaagcaacagcatcaaacaaggcaaggaccagcactttcctgtgttcatgaacgagaaggaggacatcctgtggtgtaccgagatggagagagtgttcgggttcccagtccactacacagatgtcagcaacatgtctagactggccagacagagactgctgggaagaagctggtccgtccctgtgatcagacacctgttcgcccctctgaaggagtacttcgcctgcgtgagcagcggcaacagcaacgccaacagccggggccccagcttctctagcggcctggtgccactgtccctgagagggagccacatgggccccatggagatctacaaaaccgtgagcgcctggaagcggcagcctgtgcgcgtgctgagcctgtttcggaatatcgataaagtcctgaaaagcctgggattcctggagagcggctctggctccggcggtggcaccctgaagtacgtggaggatgtgacaaacgtggtcagacgggatgtggagaagtggggccccttcgatctggtgtacggcagcacccaacccctgggcagctcttgtgaccggtgccctggctggtacatgtttcagttccaccggatcctgcagtacgccctgccgagacaggagtcccagcggccattcttttggattttcatggacaacttgctgctgaccgaggatgaccaggaaactaccactcggttcctgcagaccgaagccgtgaccctgcaggacgtgagaggccgggactaccagaacgccatgcgggtgtggtccaacatccctggactgaaaagcaagcacgcacctctgacccctaaagaagaggagtacctgcaggcccaggtgcggagcagaagcaagctggacgcccctaaggtggatctgctggtgaagaattgcctcctgcccctgagagagtacttcaagtatttcagccagaatagtctgcccctgggaggcagcggcggcggcgccctggtgacatttgaggacgtcgccgtgcggttcacccaggaggaatgggctctgctggatccttctcagaaaatcctgtaccgggacgtgatgagagagacataccggaatctgacctccgtgggcatcaactgggaatgttgggaccttgaagcctgcttcagaagcctgggaagaaacctgagagtgcaggtggtgaagagaaagtgcgagctgaccaacagcggcccctgcgccgagggcggcccaagcagcggcgcccctcctcccagcggcggcagcccagccggctccccaacctctaccgaggagggcacctctgagtccgccacccccgagagcggccctggcacctccaccgagcccagcgagggcagcgcacccggcagccctgccggcagccccacctccacagaggagggaaccagcaccgagcccagcgaaggcagcgccccaggcaccagcaccgagcctagtgagcaggagattaaacggatcaacaagatcagaagaagacttgtgaaagacagcaacaccaagaaggccggcaagacaggccccatgaaaaccctgctggttagagtgatgacacccgatctgagagagcggctggaaaacctgagaaagaagcctgaaaatatcccccagcccatcagcaatacatctagagccaacctgaataagctgctgaccgattacaccgaaatgaagaaggcgatcctgcatgtgtactgggaagagttccagaaggaccctgtgggcctgatgagccgggtggcccagcctgccagcaagaagatcgatcagaacaagctgaaacctgagatggacgagaagggcaacctgaccaccgccggctttgcctgctctcagtgtggccagcccctgttcgtgtacaagctggagcaggtgtctgagaagggcaaggcttacaccaactacttcggacggtgcaatgtggccgagcacgaaaagctgatcctgctggcccagctgaagcccgagaaggatagcgacgaagccgtgacatatagcctgggaaagtttgggcagagggccctggatttctacagcattcatgtgaccaaggagtccacccaccccgtgaagcccctggcccagatcgccggaaacagatacgcctccggacctgtgggaaaggccctgagcgacgcatgtatgggcacaatcgcctccttcctgtctaagtaccaggacatcatcatcgaacaccagaaggtggtgaagggcaaccagaagagactggagagcctgcgggagctggccggcaaggaaaacctggaataccctagcgtgaccctgccacctcagcctcacaccaaggagggcgttgatgcctacaacgaagtgatcgcccgggtgcgaatgtgggtgaacctgaacctgtggcagaagctgaagctaagcagagatgatgccaagcctctgctgagactgaagggattcccttcctttcctctggtcgagagacaggccaacgaagtggactggtgggacatggtgtgtaacgtgaagaagctgatcaacgagaaaaaggaggatggcaaggtgttttggcagaatctggctggctacaagagacaggaagccctgagaccatacctgagcagcgaggaagatcggaagaagggaaagaaattcgctcggtaccagctgggcgacctgctgctgcacctggaaaagaagcacggcgaggactggggaaaggtgtacgacgaggcctgggagcggattgacaagaaagtggaaggcctgagcaagcacatcaagctggaagaggaacggagaagcgaggacgcccagagcaaggccgccctgaccgactggctgcgggctaaggccagcttcgtgatcgagggcctgaaggaggccgacaaggacgagttctgcagatgcgagctgaagctgcagaagtggtacggggacctgcggggaaagcccttcgccatcgaagccgagaacagcatcctggacatcagcggcttcagcaagcagtacaactgtgccttcatctggcagaaggacggcgtgaagaagctgaacctgtacctgatcatcaactacttcaagggcggcaagctgcggttcaagaagatcaaacctgaagccttcgaagccaacagattctacaccgtgatcaacaaaaagagcggcgagatcgtgcccatggaggtgaacttcaacttcgacgaccccaacctgatcatcctgcctctggcctttggcaagagacagggcagagaattcatctggaacgacctgctgtccctggaaaccggcagcctgaagctggccaacggaagagtgatcgagaagacactgtacaacagaagaacccggcaggatgagcctgccctgttcgtggccctgaccttcgagcggcgggaggtcctggactcctccaatatcaaaccaatgaacctgatcggcgtggcaagaggcgaaaacatccccgccgtgatcgccctgaccgaccccgagggctgcccactgagccggtttaaggatagcctgggaaacccaacccacatcctgagaatcggcgagagctataaggagaagcagcggaccatccaggccaagaaggaggtggagcagcggagagccggcggctacagccggaagtacgccagcaaagccaagaatctggcagacgatatggtgagaaacaccgctagagatctgctgtactacgccgtgacccaggatgccatgctgatcttcgccaacctgagccggggcttcggccggcagggcaagcggaccttcatggccgagagacagtacacacggatggaggactggctgaccgccaagctggcctacgagggcctgagcaagacctacctgtccaagacactggcccagtacacctccaagacatgcagcaactgtgggtttaccatcaccagcgccgactacgacagggtgctggagaagctgaagaagacagcaacaggctggatgaccacaattaacggcaaggagctgaaggtggagggccagattacctactacaacagatacaagagacagaacgtagtcaaggacctgtccgtcgagctggatagactgagcgaagaatctgtgaacaacgacatctcctcctggacaaagggcagaagcggagaagctctgagcctcctgaagaaaagattctcccatagacccgtgcaggagaagttcgtgtgcctgaactgcggcttcgagacacacgcagccgagcaagccgccctgaacatcgccagatcctggctgttcctgcggagccaggagtacaagaaataccagacaaacaagacaaccggcaacaccgataagagagccttcgtcgagacctggcagtccttttaccggaagaagcttaaggaggtgtggaaacctgccgtgcggtctggcggatctggcggaggctccaagacccaggtgagcctggagttcaacgacgtggccgtggagttcgcctgggaggagtggcagctgctggaccccgcccagaaggacctgtacagggaggtgatgctggagaacttccacaacctggtgagcgtgggctgccaggtgggcaagcccgacgtgctgttcaggctggagagggagcccccctggagcctggaggacgagatccacagccagaacttcagcgagatccaggaggtgggcggcccaagcagcggcgcccctcctcccagcggcggcagcccagccggctccccaacctctaccgaggagggcacctctgagtccgccacccccgagagcggccctggcacctccaccgagcccagcgagggcagcgcacccggcagccctgccggcagccccacctccacagaggagggaaccagcaccgagcccagcgaaggcagcgccccaggcaccagcaccgagcctagtgagcaggagattaaacggatcaacaagatcagaagaagacttgtgaaagacagcaacaccaagaaggccggcaagacaggccccatgaaaaccctgctggttagagtgatgacacccgatctgagagagcggctggaaaacctgagaaagaagcctgaaaatatcccccagcccatcagcaatacatctagagccaacctgaataagctgctgaccgattacaccgaaatgaagaaggcgatcctgcatgtgtactgggaagagttccagaaggaccctgtgggcctgatgagccgggtggcccagcctgccagcaagaagatcgatcagaacaagctgaaacctgagatggacgagaagggcaacctgaccaccgccggctttgcctgctctcagtgtggccagcccctgttcgtgtacaagctggagcaggtgtctgagaagggcaaggcttacaccaactacttcggacggtgcaatgtggccgagcacgaaaagctgatcctgctggcccagctgaagcccgagaaggatagcgacgaagccgtgacatatagcctgggaaagtttgggcagagggccctggatttctacagcattcatgtgaccaaggagtccacccaccccgtgaagcccctggcccagatcgccggaaacagatacgcctccggacctgtgggaaaggccctgagcgacgcatgtatgggcacaatcgcctccttcctgtctaagtaccaggacatcatcatcgaacaccagaaggtggtgaagggcaaccagaagagactggagagcctgcgggagctggccggcaaggaaaacctggaataccctagcgtgaccctgccacctcagcctcacaccaaggagggcgttgatgcctacaacgaagtgatcgcccgggtgcgaatgtgggtgaacctgaacctgtggcagaagctgaagctaagcagagatgatgccaagcctctgctgagactgaagggattcccttcctttcctctggtcgagagacaggccaacgaagtggactggtgggacatggtgtgtaacgtgaagaagctgatcaacgagaaaaaggaggatggcaaggtgttttggcagaatctggctggctacaagagacaggaagccctgagaccatacctgagcagcgaggaagatcggaagaagggaaagaaattcgctcggtaccagctgggcgacctgctgctgcacctggaaaagaagcacggcgaggactggggaaaggtgtacgacgaggcctgggagcggattgacaagaaagtggaaggcctgagcaagcacatcaagctggaagaggaacggagaagcgaggacgcccagagcaaggccgccctgaccgactggctgcgggctaaggccagcttcgtgatcgagggcctgaaggaggccgacaaggacgagttctgcagatgcgagctgaagctgcagaagtggtacggggacctgcggggaaagcccttcgccatcgaagccgagaacagcatcctggacatcagcggcttcagcaagcagtacaactgtgccttcatctggcagaaggacggcgtgaagaagctgaacctgtacctgatcatcaactacttcaagggcggcaagctgcggttcaagaagatcaaacctgaagccttcgaagccaacagattctacaccgtgatcaacaaaaagagcggcgagatcgtgcccatggaggtgaacttcaacttcgacgaccccaacctgatcatcctgcctctggcctttggcaagagacagggcagagaattcatctggaacgacctgctgtccctggaaaccggcagcctgaagctggccaacggaagagtgatcgagaagacactgtacaacagaagaacccggcaggatgagcctgccctgttcgtggccctgaccttcgagcggcgggaggtcctggactcctccaatatcaaaccaatgaacctgatcggcgtggcaagaggcgaaaacatccccgccgtgatcgccctgaccgaccccgagggctgcccactgagccggtttaaggatagcctgggaaacccaacccacatcctgagaatcggcgagagctataaggagaagcagcggaccatccaggccaagaaggaggtggagcagcggagagccggcggctacagccggaagtacgccagcaaagccaagaatctggcagacgatatggtgagaaacaccgctagagatctgctgtactacgccgtgacccaggatgccatgctgatcttcgccaacctgagccggggcttcggccggcagggcaagcggaccttcatggccgagagacagtacacacggatggaggactggctgaccgccaagctggcctacgagggcctgagcaagacctacctgtccaagacactggcccagtacacctccaagacatgcagcaactgtgggtttaccatcaccagcgccgactacgacagggtgctggagaagctgaagaagacagcaacaggctggatgaccacaattaacggcaaggagctgaaggtggagggccagattacctactacaacagatacaagagacagaacgtagtcaaggacctgtccgtcgagctggatagactgagcgaagaatctgtgaacaacgacatctcctcctggacaaagggcagaagcggagaagctctgagcctcctgaagaaaagattctcccatagacccgtgcaggagaagttcgtgtgcctgaactgcggcttcgagacacacgcagccgagcaagccgccctgaacatcgccagatcctggctgttcctgcggagccaggagtacaagaaataccagacaaacaagacaaccggcaacaccgataagagagccttcgtcgagacctggcagtccttttaccggaagaagcttaaggaggtgtggaaacctgccgtgcggtctggcggatctggcggaggctcctaagacccaggtgagcctggagttcaacgacgtggccgtggagttcgcctgggaggagtggcagctgctggaccccgcccagaaggacctgtacagggaggtgatgctggagaacttccacaacctggtgagcgtgggctgccaggtgggcaagcccgacgtgctgttcaggctggagagggagcccccctggagcctggaggacgagatccacagccagaacttcagcgagatccaggaggtgggatctggctccggcagcggccccaagaaaaagagaaaagtctaagctgccttctgcggggcttgccttctggccatgcccttcttctctcccttgcacctgtacctcttggtctttgaataaagcctgagtaggaaggctagcaaaaaaaaaaaaaaaaaaaaaaaaaaaaaaaaaaaaaaaaaaaaaaaaaaaaaaaaaaaaaaaaaaaaaaaaaaaaaaaa

SEQ ID NO: 15960 - RNA, 9485 nt, synthetic construct
  source 1..9485: mol_type = other RNA
aggaaataagagagaaaagaagagtaagaagaaatataagagccaccatggcccctaagaagaagcgtaaagtgagccggatggaacgcctcgtctacgaggtgcggcagaagtgcagaaacatcgaggacatctgcatctcctgcggatctctgaacgtgaccctggagcacccactgttcatcggcggcatgtgccagaactgtaaaaactgttttctggagtgtgcctatcaatacgacgatgacggctaccagagctactgcaccatctgttgcggcggaagagaggtgctgatgtgtggaaataacaactgctgccggtgcttctgcgtggaatgcgtggacctgctggtgggccccggcgccgcccaggccgctattaaggaagatccttggaactgctacatgtgcggccacaagggcacatacggcctgctgagacggagagaggactggcctagcagactgcagatgttcttcgccaataaccacgaccaggagttcgacccccctaaggtgtaccctcccgtccccgccgagaagagaaagcccatccgggtcctgagcctgttcgatggcatcgccaccggtctgctggtgctgaaggacctgggcatccaggtggataggtacattgcctccgaggtgtgcgaggactccatcaccgtgggaatggtgcgtcatcagggcaagatcatgtacgtgggcgacgtgcggagcgtgacacagaagcatatccaggagtggggccctttcgacctggtgatcggcggcagcccttgcaatgacctgagcatcgtgaacccagcccggaagggcctgtacgagggaaccggcagactgttcttcgagttttacagactgctgcacgacgcccggcctaaggaaggcgacgaccggcccttcttttggctgttcgagaatgtggtggccatgggagtcagcgacaagcgggatattagccggttcctggagagcaaccccgtgatgatcgatgccaaggaagtgagcgccgcccaccgggccagatacttctggggcaatctgcctggcatgaacagacccctggccagcaccgtgaacgacaagctggagctgcaggagtgcctggagcacggccggatcgccaagttcagcaaggtgagaaccatcaccacccgaagcaacagcatcaaacaaggcaaggaccagcactttcctgtgttcatgaacgagaaggaggacatcctgtggtgtaccgagatggagagagtgttcgggttcccagtccactacacagatgtcagcaacatgtctagactggccagacagagactgctgggaagaagctggtccgtccctgtgatcagacacctgttcgcccctctgaaggagtacttcgcctgcgtgagcagcggcaacagcaacgccaacagccggggccccagcttctctagcggcctggtgccactgtccctgagagggagccacatgggccccatggagatctacaaaaccgtgagcgcctggaagcggcagcctgtgcgcgtgctgagcctgtttcggaatatcgataaagtcctgaaaagcctgggattcctggagagcggctctggctccggcggtggcaccctgaagtacgtggaggatgtgacaaacgtggtcagacgggatgtggagaagtggggccccttcgatctggtgtacggcagcacccaacccctgggcagctcttgtgaccggtgccctggctggtacatgtttcagttccaccggatcctgcagtacgccctgccgagacaggagtcccagcggccattcttttggattttcatggacaacttgctgctgaccgaggatgaccaggaaactaccactcggttcctgcagaccgaagccgtgaccctgcaggacgtgagaggccgggactaccagaacgccatgcgggtgtggtccaacatccctggactgaaaagcaagcacgcacctctgacccctaaagaagaggagtacctgcaggcccaggtgcggagcagaagcaagctggacgcccctaaggtggatctgctggtgaagaattgcctcctgcccctgagagagtacttcaagtatttcagccagaatagtctgcccctgggaggcagcggcggcggcgccctggtgacatttgaggacgtcgccgtgcggttcacccaggaggaatgggctctgctggatccttctcagaaaatcctgtaccgggacgtgatgagagagacataccggaatctgacctccgtgggcatcaactgggaatgttgggaccttgaagcctgcttcagaagcctgggaagaaacctgagagtgcaggtggtgaagagaaagtgcgagctgaccaacagcggcccctgcgccgagggcggcccaagcagcggcgcccctcctcccagcggcggcagcccagccggctccccaacctctaccgaggagggcacctctgagtccgccacccccgagagcggccctggcacctccaccgagcccagcgagggcagcgcacccggcagccctgccggcagccccacctccacagaggagggaaccagcaccgagcccagcgaaggcagcgccccaggcaccagcaccgagcctagtgagcaggagattaaacggatcaacaagatcagaagaagacttgtgaaagacagcaacaccaagaaggccggcaagacaggccccatgaaaaccctgctggttagagtgatgacacccgatctgagagagcggctggaaaacctgagaaagaagcctgaaaatatcccccagcccatcagcaatacatctagagccaacctgaataagctgctgaccgattacaccgaaatgaagaaggcgatcctgcatgtgtactgggaagagttccagaaggaccctgtgggcctgatgagccgggtggcccagcctgccagcaagaagatcgatcagaacaagctgaaacctgagatggacgagaagggcaacctgaccaccgccggctttgcctgctctcagtgtggccagcccctgttcgtgtacaagctggagcaggtgtctgagaagggcaaggcttacaccaactacttcggacggtgcaatgtggccgagcacgaaaagctgatcctgctggcccagctgaagcccgagaaggatagcgacgaagccgtgacatatagcctgggaaagtttgggcagagggccctggatttctacagcattcatgtgaccaaggagtccacccaccccgtgaagcccctggcccagatcgccggaaacagatacgcctccggacctgtgggaaaggccctgagcgacgcatgtatgggcacaatcgcctccttcctgtctaagtaccaggacatcatcatcgaacaccagaaggtggtgaagggcaaccagaagagactggagagcctgcgggagctggccggcaaggaaaacctggaataccctagcgtgaccctgccacctcagcctcacaccaaggagggcgttgatgcctacaacgaagtgatcgcccgggtgcgaatgtgggtgaacctgaacctgtggcagaagctgaagctaagcagagatgatgccaagcctctgctgagactgaagggattcccttcctttcctctggtcgagagacaggccaacgaagtggactggtgggacatggtgtgtaacgtgaagaagctgatcaacgagaaaaaggaggatggcaaggtgttttggcagaatctggctggctacaagagacaggaagccctgagaccatacctgagcagcgaggaagatcggaagaagggaaagaaattcgctcggtaccagctgggcgacctgctgctgcacctggaaaagaagcacggcgaggactggggaaaggtgtacgacgaggcctgggagcggattgacaagaaagtggaaggcctgagcaagcacatcaagctggaagaggaacggagaagcgaggacgcccagagcaaggccgccctgaccgactggctgcgggctaaggccagcttcgtgatcgagggcctgaaggaggccgacaaggacgagttctgcagatgcgagctgaagctgcagaagtggtacggggacctgcggggaaagcccttcgccatcgaagccgagaacagcatcctggacatcagcggcttcagcaagcagtacaactgtgccttcatctggcagaaggacggcgtgaagaagctgaacctgtacctgatcatcaactacttcaagggcggcaagctgcggttcaagaagatcaaacctgaagccttcgaagccaacagattctacaccgtgatcaacaaaaagagcggcgagatcgtgcccatggaggtgaacttcaacttcgacgaccccaacctgatcatcctgcctctggcctttggcaagagacagggcagagaattcatctggaacgacctgctgtccctggaaaccggcagcctgaagctggccaacggaagagtgatcgagaagacactgtacaacagaagaacccggcaggatgagcctgccctgttcgtggccctgaccttcgagcggcgggaggtcctggactcctccaatatcaaaccaatgaacctgatcggcgtggcaagaggcgaaaacatccccgccgtgatcgccctgaccgaccccgagggctgcccactgagccggtttaaggatagcctgggaaacccaacccacatcctgagaatcggcgagagctataaggagaagcagcggaccatccaggccaagaaggaggtggagcagcggagagccggcggctacagccggaagtacgccagcaaagccaagaatctggcagacgatatggtgagaaacaccgctagagatctgctgtactacgccgtgacccaggatgccatgctgatcttcgccaacctgagccggggcttcggccggcagggcaagcggaccttcatggccgagagacagtacacacggatggaggactggctgaccgccaagctggcctacgagggcctgagcaagacctacctgtccaagacactggcccagtacacctccaagacatgcagcaactgtgggtttaccatcaccagcgccgactacgacagggtgctggagaagctgaagaagacagcaacaggctggatgaccacaattaacggcaaggagctgaaggtggagggccagattacctactacaacagatacaagagacagaacgtagtcaaggacctgtccgtcgagctggatagactgagcgaagaatctgtgaacaacgacatctcctcctggacaaagggcagaagcggagaagctctgagcctcctgaagaaaagattctcccatagacccgtgcaggagaagttcgtgtgcctgaactgcggcttcgagacacacgcagccgagcaagccgccctgaacatcgccagatcctggctgttcctgcggagccaggagtacaagaaataccagacaaacaagacaaccggcaacaccgataagagagccttcgtcgagacctggcagtccttttaccggaagaagcttaaggaggtgtggaaacctgccgtgcggtctggcggatctggcggaggctcctgcgagggcagcgtgagcttcgaggacgtgaccatggacttcagcagggaggagtggcagcagctggaccccgcccagaggtgcctgtaccaggacgtgatgctggagatctacagccacctgctgttcgtgggctacaacatccccaaccccgagatcatcagcaggatggagaagggcgaggagccctggatgagggaggtgcagctgccccaccagaggcacagggagagggccttcggcggcggcccaagcagcggcgcccctcctcccagcggcggcagcccagccggctccccaacctctaccgaggagggcacctctgagtccgccacccccgagagcggccctggcacctccaccgagcccagcgagggcagcgcacccggcagccctgccggcagccccacctccacagaggagggaaccagcaccgagcccagcgaaggcagcgccccaggcaccagcaccgagcctagtgagcaggagattaaacggatcaacaagatcagaagaagacttgtgaaagacagcaacaccaagaaggccggcaagacaggccccatgaaaaccctgctggttagagtgatgacacccgatctgagagagcggctggaaaacctgagaaagaagcctgaaaatatcccccagcccatcagcaatacatctagagccaacctgaataagctgctgaccgattacaccgaaatgaagaaggcgatcctgcatgtgtactgggaagagttccagaaggaccctgtgggcctgatgagccgggtggcccagcctgccagcaagaagatcgatcagaacaagctgaaacctgagatggacgagaagggcaacctgaccaccgccggctttgcctgctctcagtgtggccagcccctgttcgtgtacaagctggagcaggtgtctgagaagggcaaggcttacaccaactacttcggacggtgcaatgtggccgagcacgaaaagctgatcctgctggcccagctgaagcccgagaaggatagcgacgaagccgtgacatatagcctgggaaagtttgggcagagggccctggatttctacagcattcatgtgaccaaggagtccacccaccccgtgaagcccctggcccagatcgccggaaacagatacgcctccggacctgtgggaaaggccctgagcgacgcatgtatgggcacaatcgcctccttcctgtctaagtaccaggacatcatcatcgaacaccagaaggtggtgaagggcaaccagaagagactggagagcctgcgggagctggccggcaaggaaaacctggaataccctagcgtgaccctgccacctcagcctcacaccaaggagggcgttgatgcctacaacgaagtgatcgcccgggtgcgaatgtgggtgaacctgaacctgtggcagaagctgaagctaagcagagatgatgccaagcctctgctgagactgaagggattcccttcctttcctctggtcgagagacaggccaacgaagtggactggtgggacatggtgtgtaacgtgaagaagctgatcaacgagaaaaaggaggatggcaaggtgttttggcagaatctggctggctacaagagacaggaagccctgagaccatacctgagcagcgaggaagatcggaagaagggaaagaaattcgctcggtaccagctgggcgacctgctgctgcacctggaaaagaagcacggcgaggactggggaaaggtgtacgacgaggcctgggagcggattgacaagaaagtggaaggcctgagcaagcacatcaagctggaagaggaacggagaagcgaggacgcccagagcaaggccgccctgaccgactggctgcgggctaaggccagcttcgtgatcgagggcctgaaggaggccgacaaggacgagttctgcagatgcgagctgaagctgcagaagtggtacggggacctgcggggaaagcccttcgccatcgaagccgagaacagcatcctggacatcagcggcttcagcaagcagtacaactgtgccttcatctggcagaaggacggcgtgaagaagctgaacctgtacctgatcatcaactacttcaagggcggcaagctgcggttcaagaagatcaaacctgaagccttcgaagccaacagattctacaccgtgatcaacaaaaagagcggcgagatcgtgcccatggaggtgaacttcaacttcgacgaccccaacctgatcatcctgcctctggcctttggcaagagacagggcagagaattcatctggaacgacctgctgtccctggaaaccggcagcctgaagctggccaacggaagagtgatcgagaagacactgtacaacagaagaacccggcaggatgagcctgccctgttcgtggccctgaccttcgagcggcgggaggtcctggactcctccaatatcaaaccaatgaacctgatcggcgtggcaagaggcgaaaacatccccgccgtgatcgccctgaccgaccccgagggctgcccactgagccggtttaaggatagcctgggaaacccaacccacatcctgagaatcggcgagagctataaggagaagcagcggaccatccaggccaagaaggaggtggagcagcggagagccggcggctacagccggaagtacgccagcaaagccaagaatctggcagacgatatggtgagaaacaccgctagagatctgctgtactacgccgtgacccaggatgccatgctgatcttcgccaacctgagccggggcttcggccggcagggcaagcggaccttcatggccgagagacagtacacacggatggaggactggctgaccgccaagctggcctacgagggcctgagcaagacctacctgtccaagacactggcccagtacacctccaagacatgcagcaactgtgggtttaccatcaccagcgccgactacgacagggtgctggagaagctgaagaagacagcaacaggctggatgaccacaattaacggcaaggagctgaaggtggagggccagattacctactacaacagatacaagagacagaacgtagtcaaggacctgtccgtcgagctggatagactgagcgaagaatctgtgaacaacgacatctcctcctggacaaagggcagaagcggagaagctctgagcctcctgaagaaaagattctcccatagacccgtgcaggagaagttcgtgtgcctgaactgcggcttcgagacacacgcagccgagcaagccgccctgaacatcgccagatcctggctgttcctgcggagccaggagtacaagaaataccagacaaacaagacaaccggcaacaccgataagagagccttcgtcgagacctggcagtccttttaccggaagaagcttaaggaggtgtggaaacctgccgtgcggtctggcggatctggcggaggctccttgcgagggcagcgtgagcttcgaggacgtgaccatggacttcagcagggaggagtggcagcagctggaccccgcccagaggtgcctgtaccaggacgtgatgctggagatctacagccacctgctgttcgtgggctacaacatccccaaccccgagatcatcagcaggatggagaagggcgaggagccctggatgagggaggtgcagctgccccaccagaggcacagggagagggccttcggcggatctggctccggcagcggccccaagaaaaagagaaaagtctaagctgccttctgcggggcttgccttctggccatgcccttcttctctcccttgcacctgtacctcttggtctttgaataaagcctgagtaggaaggctagcaaaaaaaaaaaaaaaaaaaaaaaaaaaaaaaaaaaaaaaaaaaaaaaaaaaaaaaaaaaaaaaaaaaaaaaaaaaaaaaa

SEQ ID NO: 15961 - RNA, 9485 nt, synthetic construct
  source 1..9485: mol_type = other RNA
aggaaataagagagaaaagaagagtaagaagaaatataagagccaccatggcccctaagaagaagcgtaaagtgagccggatggaacgcctcgtctacgaggtgcggcagaagtgcagaaacatcgaggacatctgcatctcctgcggatctctgaacgtgaccctggagcacccactgttcatcggcggcatgtgccagaactgtaaaaactgttttctggagtgtgcctatcaatacgacgatgacggctaccagagctactgcaccatctgttgcggcggaagagaggtgctgatgtgtggaaataacaactgctgccggtgcttctgcgtggaatgcgtggacctgctggtgggccccggcgccgcccaggccgctattaaggaagatccttggaactgctacatgtgcggccacaagggcacatacggcctgctgagacggagagaggactggcctagcagactgcagatgttcttcgccaataaccacgaccaggagttcgacccccctaaggtgtaccctcccgtccccgccgagaagagaaagcccatccgggtcctgagcctgttcgatggcatcgccaccggtctgctggtgctgaaggacctgggcatccaggtggataggtacattgcctccgaggtgtgcgaggactccatcaccgtgggaatggtgcgtcatcagggcaagatcatgtacgtgggcgacgtgcggagcgtgacacagaagcatatccaggagtggggccctttcgacctggtgatcggcggcagcccttgcaatgacctgagcatcgtgaacccagcccggaagggcctgtacgagggaaccggcagactgttcttcgagttttacagactgctgcacgacgcccggcctaaggaaggcgacgaccggcccttcttttggctgttcgagaatgtggtggccatgggagtcagcgacaagcgggatattagccggttcctggagagcaaccccgtgatgatcgatgccaaggaagtgagcgccgcccaccgggccagatacttctggggcaatctgcctggcatgaacagacccctggccagcaccgtgaacgacaagctggagctgcaggagtgcctggagcacggccggatcgccaagttcagcaaggtgagaaccatcaccacccgaagcaacagcatcaaacaaggcaaggaccagcactttcctgtgttcatgaacgagaaggaggacatcctgtggtgtaccgagatggagagagtgttcgggttcccagtccactacacagatgtcagcaacatgtctagactggccagacagagactgctgggaagaagctggtccgtccctgtgatcagacacctgttcgcccctctgaaggagtacttcgcctgcgtgagcagcggcaacagcaacgccaacagccggggccccagcttctctagcggcctggtgccactgtccctgagagggagccacatgggccccatggagatctacaaaaccgtgagcgcctggaagcggcagcctgtgcgcgtgctgagcctgtttcggaatatcgataaagtcctgaaaagcctgggattcctggagagcggctctggctccggcggtggcaccctgaagtacgtggaggatgtgacaaacgtggtcagacgggatgtggagaagtggggccccttcgatctggtgtacggcagcacccaacccctgggcagctcttgtgaccggtgccctggctggtacatgtttcagttccaccggatcctgcagtacgccctgccgagacaggagtcccagcggccattcttttggattttcatggacaacttgctgctgaccgaggatgaccaggaaactaccactcggttcctgcagaccgaagccgtgaccctgcaggacgtgagaggccgggactaccagaacgccatgcgggtgtggtccaacatccctggactgaaaagcaagcacgcacctctgacccctaaagaagaggagtacctgcaggcccaggtgcggagcagaagcaagctggacgcccctaaggtggatctgctggtgaagaattgcctcctgcccctgagagagtacttcaagtatttcagccagaatagtctgcccctgggaggcagcggcggcggcgccctggtgacatttgaggacgtcgccgtgcggttcacccaggaggaatgggctctgctggatccttctcagaaaatcctgtaccgggacgtgatgagagagacataccggaatctgacctccgtgggcatcaactgggaatgttgggaccttgaagcctgcttcagaagcctgggaagaaacctgagagtgcaggtggtgaagagaaagtgcgagctgaccaacagcggcccctgcgccgagggcggcccaagcagcggcgcccctcctcccagcggcggcagcccagccggctccccaacctctaccgaggagggcacctctgagtccgccacccccgagagcggccctggcacctccaccgagcccagcgagggcagcgcacccggcagccctgccggcagccccacctccacagaggagggaaccagcaccgagcccagcgaaggcagcgccccaggcaccagcaccgagcctagtgagcaggagattaaacggatcaacaagatcagaagaagacttgtgaaagacagcaacaccaagaaggccggcaagacaggccccatgaaaaccctgctggttagagtgatgacacccgatctgagagagcggctggaaaacctgagaaagaagcctgaaaatatcccccagcccatcagcaatacatctagagccaacctgaataagctgctgaccgattacaccgaaatgaagaaggcgatcctgcatgtgtactgggaagagttccagaaggaccctgtgggcctgatgagccgggtggcccagcctgccagcaagaagatcgatcagaacaagctgaaacctgagatggacgagaagggcaacctgaccaccgccggctttgcctgctctcagtgtggccagcccctgttcgtgtacaagctggagcaggtgtctgagaagggcaaggcttacaccaactacttcggacggtgcaatgtggccgagcacgaaaagctgatcctgctggcccagctgaagcccgagaaggatagcgacgaagccgtgacatatagcctgggaaagtttgggcagagggccctggatttctacagcattcatgtgaccaaggagtccacccaccccgtgaagcccctggcccagatcgccggaaacagatacgcctccggacctgtgggaaaggccctgagcgacgcatgtatgggcacaatcgcctccttcctgtctaagtaccaggacatcatcatcgaacaccagaaggtggtgaagggcaaccagaagagactggagagcctgcgggagctggccggcaaggaaaacctggaataccctagcgtgaccctgccacctcagcctcacaccaaggagggcgttgatgcctacaacgaagtgatcgcccgggtgcgaatgtgggtgaacctgaacctgtggcagaagctgaagctaagcagagatgatgccaagcctctgctgagactgaagggattcccttcctttcctctggtcgagagacaggccaacgaagtggactggtgggacatggtgtgtaacgtgaagaagctgatcaacgagaaaaaggaggatggcaaggtgttttggcagaatctggctggctacaagagacaggaagccctgagaccatacctgagcagcgaggaagatcggaagaagggaaagaaattcgctcggtaccagctgggcgacctgctgctgcacctggaaaagaagcacggcgaggactggggaaaggtgtacgacgaggcctgggagcggattgacaagaaagtggaaggcctgagcaagcacatcaagctggaagaggaacggagaagcgaggacgcccagagcaaggccgccctgaccgactggctgcgggctaaggccagcttcgtgatcgagggcctgaaggaggccgacaaggacgagttctgcagatgcgagctgaagctgcagaagtggtacggggacctgcggggaaagcccttcgccatcgaagccgagaacagcatcctggacatcagcggcttcagcaagcagtacaactgtgccttcatctggcagaaggacggcgtgaagaagctgaacctgtacctgatcatcaactacttcaagggcggcaagctgcggttcaagaagatcaaacctgaagccttcgaagccaacagattctacaccgtgatcaacaaaaagagcggcgagatcgtgcccatggaggtgaacttcaacttcgacgaccccaacctgatcatcctgcctctggcctttggcaagagacagggcagagaattcatctggaacgacctgctgtccctggaaaccggcagcctgaagctggccaacggaagagtgatcgagaagacactgtacaacagaagaacccggcaggatgagcctgccctgttcgtggccctgaccttcgagcggcgggaggtcctggactcctccaatatcaaaccaatgaacctgatcggcgtggcaagaggcgaaaacatccccgccgtgatcgccctgaccgaccccgagggctgcccactgagccggtttaaggatagcctgggaaacccaacccacatcctgagaatcggcgagagctataaggagaagcagcggaccatccaggccaagaaggaggtggagcagcggagagccggcggctacagccggaagtacgccagcaaagccaagaatctggcagacgatatggtgagaaacaccgctagagatctgctgtactacgccgtgacccaggatgccatgctgatcttcgccaacctgagccggggcttcggccggcagggcaagcggaccttcatggccgagagacagtacacacggatggaggactggctgaccgccaagctggcctacgagggcctgagcaagacctacctgtccaagacactggcccagtacacctccaagacatgcagcaactgtgggtttaccatcaccagcgccgactacgacagggtgctggagaagctgaagaagacagcaacaggctggatgaccacaattaacggcaaggagctgaaggtggagggccagattacctactacaacagatacaagagacagaacgtagtcaaggacctgtccgtcgagctggatagactgagcgaagaatctgtgaacaacgacatctcctcctggacaaagggcagaagcggagaagctctgagcctcctgaagaaaagattctcccatagacccgtgcaggagaagttcgtgtgcctgaactgcggcttcgagacacacgcagccgagcaagccgccctgaacatcgccagatcctggctgttcctgcggagccaggagtacaagaaataccagacaaacaagacaaccggcaacaccgataagagagccttcgtcgagacctggcagtccttttaccggaagaagcttaaggaggtgtggaaacctgccgtgcggtctggcggatctggcggaggctccctgcaggagagcgtgaccttcagcgacgtggccgtggacttcaccctggaggagtggggctgcctgtgccccccccagaaggagatgtacagggaggtgatgctggagaactacggcaacctggtgtgcctgggcctggccatgagcaagcccgacgtgatcagcaggctggagaggggcgaggcccccaggagccccggcggcgacctgggcagcgccgactggggcaccgagagcggcgccggcggcccaagcagcggcgcccctcctcccagcggcggcagcccagccggctccccaacctctaccgaggagggcacctctgagtccgccacccccgagagcggccctggcacctccaccgagcccagcgagggcagcgcacccggcagccctgccggcagccccacctccacagaggagggaaccagcaccgagcccagcgaaggcagcgccccaggcaccagcaccgagcctagtgagcaggagattaaacggatcaacaagatcagaagaagacttgtgaaagacagcaacaccaagaaggccggcaagacaggccccatgaaaaccctgctggttagagtgatgacacccgatctgagagagcggctggaaaacctgagaaagaagcctgaaaatatcccccagcccatcagcaatacatctagagccaacctgaataagctgctgaccgattacaccgaaatgaagaaggcgatcctgcatgtgtactgggaagagttccagaaggaccctgtgggcctgatgagccgggtggcccagcctgccagcaagaagatcgatcagaacaagctgaaacctgagatggacgagaagggcaacctgaccaccgccggctttgcctgctctcagtgtggccagcccctgttcgtgtacaagctggagcaggtgtctgagaagggcaaggcttacaccaactacttcggacggtgcaatgtggccgagcacgaaaagctgatcctgctggcccagctgaagcccgagaaggatagcgacgaagccgtgacatatagcctgggaaagtttgggcagagggccctggatttctacagcattcatgtgaccaaggagtccacccaccccgtgaagcccctggcccagatcgccggaaacagatacgcctccggacctgtgggaaaggccctgagcgacgcatgtatgggcacaatcgcctccttcctgtctaagtaccaggacatcatcatcgaacaccagaaggtggtgaagggcaaccagaagagactggagagcctgcgggagctggccggcaaggaaaacctggaataccctagcgtgaccctgccacctcagcctcacaccaaggagggcgttgatgcctacaacgaagtgatcgcccgggtgcgaatgtgggtgaacctgaacctgtggcagaagctgaagctaagcagagatgatgccaagcctctgctgagactgaagggattcccttcctttcctctggtcgagagacaggccaacgaagtggactggtgggacatggtgtgtaacgtgaagaagctgatcaacgagaaaaaggaggatggcaaggtgttttggcagaatctggctggctacaagagacaggaagccctgagaccatacctgagcagcgaggaagatcggaagaagggaaagaaattcgctcggtaccagctgggcgacctgctgctgcacctggaaaagaagcacggcgaggactggggaaaggtgtacgacgaggcctgggagcggattgacaagaaagtggaaggcctgagcaagcacatcaagctggaagaggaacggagaagcgaggacgcccagagcaaggccgccctgaccgactggctgcgggctaaggccagcttcgtgatcgagggcctgaaggaggccgacaaggacgagttctgcagatgcgagctgaagctgcagaagtggtacggggacctgcggggaaagcccttcgccatcgaagccgagaacagcatcctggacatcagcggcttcagcaagcagtacaactgtgccttcatctggcagaaggacggcgtgaagaagctgaacctgtacctgatcatcaactacttcaagggcggcaagctgcggttcaagaagatcaaacctgaagccttcgaagccaacagattctacaccgtgatcaacaaaaagagcggcgagatcgtgcccatggaggtgaacttcaacttcgacgaccccaacctgatcatcctgcctctggcctttggcaagagacagggcagagaattcatctggaacgacctgctgtccctggaaaccggcagcctgaagctggccaacggaagagtgatcgagaagacactgtacaacagaagaacccggcaggatgagcctgccctgttcgtggccctgaccttcgagcggcgggaggtcctggactcctccaatatcaaaccaatgaacctgatcggcgtggcaagaggcgaaaacatccccgccgtgatcgccctgaccgaccccgagggctgcccactgagccggtttaaggatagcctgggaaacccaacccacatcctgagaatcggcgagagctataaggagaagcagcggaccatccaggccaagaaggaggtggagcagcggagagccggcggctacagccggaagtacgccagcaaagccaagaatctggcagacgatatggtgagaaacaccgctagagatctgctgtactacgccgtgacccaggatgccatgctgatcttcgccaacctgagccggggcttcggccggcagggcaagcggaccttcatggccgagagacagtacacacggatggaggactggctgaccgccaagctggcctacgagggcctgagcaagacctacctgtccaagacactggcccagtacacctccaagacatgcagcaactgtgggtttaccatcaccagcgccgactacgacagggtgctggagaagctgaagaagacagcaacaggctggatgaccacaattaacggcaaggagctgaaggtggagggccagattacctactacaacagatacaagagacagaacgtagtcaaggacctgtccgtcgagctggatagactgagcgaagaatctgtgaacaacgacatctcctcctggacaaagggcagaagcggagaagctctgagcctcctgaagaaaagattctcccatagacccgtgcaggagaagttcgtgtgcctgaactgcggcttcgagacacacgcagccgagcaagccgccctgaacatcgccagatcctggctgttcctgcggagccaggagtacaagaaataccagacaaacaagacaaccggcaacaccgataagagagccttcgtcgagacctggcagtccttttaccggaagaagcttaaggaggtgtggaaacctgccgtgcggtctggcggatctggcggaggctcctctgcaggagagcgtgaccttcagcgacgtggccgtggacttcaccctggaggagtggggctgcctgtgccccccccagaaggagatgtacagggaggtgatgctggagaactacggcaacctggtgtgcctgggcctggccatgagcaagcccgacgtgatcagcaggctggagaggggcgaggcccccaggagccccggcggcgacctgggcagcgccgactggggcaccgagagcggcgccggatctggctccggcagcggccccaagaaaaagagaaaagtctaagctgccttctgcggggcttgccttctggccatgcccttcttctctcccttgcacctgtacctcttggtctttgaataaagcctgagtaggaaggctagcaaaaaaaaaaaaaaaaaaaaaaaaaaaaaaaaaaaaaaaaaaaaaaaaaaaaaaaaaaaaaaaaaaaaaaaaaaaaaaaa

SEQ ID NO: 15962 - RNA, 9485 nt, synthetic construct
  source 1..9485: mol_type = other RNA
aggaaataagagagaaaagaagagtaagaagaaatataagagccaccatggcccctaagaagaagcgtaaagtgagccggatggaacgcctcgtctacgaggtgcggcagaagtgcagaaacatcgaggacatctgcatctcctgcggatctctgaacgtgaccctggagcacccactgttcatcggcggcatgtgccagaactgtaaaaactgttttctggagtgtgcctatcaatacgacgatgacggctaccagagctactgcaccatctgttgcggcggaagagaggtgctgatgtgtggaaataacaactgctgccggtgcttctgcgtggaatgcgtggacctgctggtgggccccggcgccgcccaggccgctattaaggaagatccttggaactgctacatgtgcggccacaagggcacatacggcctgctgagacggagagaggactggcctagcagactgcagatgttcttcgccaataaccacgaccaggagttcgacccccctaaggtgtaccctcccgtccccgccgagaagagaaagcccatccgggtcctgagcctgttcgatggcatcgccaccggtctgctggtgctgaaggacctgggcatccaggtggataggtacattgcctccgaggtgtgcgaggactccatcaccgtgggaatggtgcgtcatcagggcaagatcatgtacgtgggcgacgtgcggagcgtgacacagaagcatatccaggagtggggccctttcgacctggtgatcggcggcagcccttgcaatgacctgagcatcgtgaacccagcccggaagggcctgtacgagggaaccggcagactgttcttcgagttttacagactgctgcacgacgcccggcctaaggaaggcgacgaccggcccttcttttggctgttcgagaatgtggtggccatgggagtcagcgacaagcgggatattagccggttcctggagagcaaccccgtgatgatcgatgccaaggaagtgagcgccgcccaccgggccagatacttctggggcaatctgcctggcatgaacagacccctggccagcaccgtgaacgacaagctggagctgcaggagtgcctggagcacggccggatcgccaagttcagcaaggtgagaaccatcaccacccgaagcaacagcatcaaacaaggcaaggaccagcactttcctgtgttcatgaacgagaaggaggacatcctgtggtgtaccgagatggagagagtgttcgggttcccagtccactacacagatgtcagcaacatgtctagactggccagacagagactgctgggaagaagctggtccgtccctgtgatcagacacctgttcgcccctctgaaggagtacttcgcctgcgtgagcagcggcaacagcaacgccaacagccggggccccagcttctctagcggcctggtgccactgtccctgagagggagccacatgggccccatggagatctacaaaaccgtgagcgcctggaagcggcagcctgtgcgcgtgctgagcctgtttcggaatatcgataaagtcctgaaaagcctgggattcctggagagcggctctggctccggcggtggcaccctgaagtacgtggaggatgtgacaaacgtggtcagacgggatgtggagaagtggggccccttcgatctggtgtacggcagcacccaacccctgggcagctcttgtgaccggtgccctggctggtacatgtttcagttccaccggatcctgcagtacgccctgccgagacaggagtcccagcggccattcttttggattttcatggacaacttgctgctgaccgaggatgaccaggaaactaccactcggttcctgcagaccgaagccgtgaccctgcaggacgtgagaggccgggactaccagaacgccatgcgggtgtggtccaacatccctggactgaaaagcaagcacgcacctctgacccctaaagaagaggagtacctgcaggcccaggtgcggagcagaagcaagctggacgcccctaaggtggatctgctggtgaagaattgcctcctgcccctgagagagtacttcaagtatttcagccagaatagtctgcccctgggaggcagcggcggcggcgccctggtgacatttgaggacgtcgccgtgcggttcacccaggaggaatgggctctgctggatccttctcagaaaatcctgtaccgggacgtgatgagagagacataccggaatctgacctccgtgggcatcaactgggaatgttgggaccttgaagcctgcttcagaagcctgggaagaaacctgagagtgcaggtggtgaagagaaagtgcgagctgaccaacagcggcccctgcgccgagggcggcccaagcagcggcgcccctcctcccagcggcggcagcccagccggctccccaacctctaccgaggagggcacctctgagtccgccacccccgagagcggccctggcacctccaccgagcccagcgagggcagcgcacccggcagccctgccggcagccccacctccacagaggagggaaccagcaccgagcccagcgaaggcagcgccccaggcaccagcaccgagcctagtgagcaggagattaaacggatcaacaagatcagaagaagacttgtgaaagacagcaacaccaagaaggccggcaagacaggccccatgaaaaccctgctggttagagtgatgacacccgatctgagagagcggctggaaaacctgagaaagaagcctgaaaatatcccccagcccatcagcaatacatctagagccaacctgaataagctgctgaccgattacaccgaaatgaagaaggcgatcctgcatgtgtactgggaagagttccagaaggaccctgtgggcctgatgagccgggtggcccagcctgccagcaagaagatcgatcagaacaagctgaaacctgagatggacgagaagggcaacctgaccaccgccggctttgcctgctctcagtgtggccagcccctgttcgtgtacaagctggagcaggtgtctgagaagggcaaggcttacaccaactacttcggacggtgcaatgtggccgagcacgaaaagctgatcctgctggcccagctgaagcccgagaaggatagcgacgaagccgtgacatatagcctgggaaagtttgggcagagggccctggatttctacagcattcatgtgaccaaggagtccacccaccccgtgaagcccctggcccagatcgccggaaacagatacgcctccggacctgtgggaaaggccctgagcgacgcatgtatgggcacaatcgcctccttcctgtctaagtaccaggacatcatcatcgaacaccagaaggtggtgaagggcaaccagaagagactggagagcctgcgggagctggccggcaaggaaaacctggaataccctagcgtgaccctgccacctcagcctcacaccaaggagggcgttgatgcctacaacgaagtgatcgcccgggtgcgaatgtgggtgaacctgaacctgtggcagaagctgaagctaagcagagatgatgccaagcctctgctgagactgaagggattcccttcctttcctctggtcgagagacaggccaacgaagtggactggtgggacatggtgtgtaacgtgaagaagctgatcaacgagaaaaaggaggatggcaaggtgttttggcagaatctggctggctacaagagacaggaagccctgagaccatacctgagcagcgaggaagatcggaagaagggaaagaaattcgctcggtaccagctgggcgacctgctgctgcacctggaaaagaagcacggcgaggactggggaaaggtgtacgacgaggcctgggagcggattgacaagaaagtggaaggcctgagcaagcacatcaagctggaagaggaacggagaagcgaggacgcccagagcaaggccgccctgaccgactggctgcgggctaaggccagcttcgtgatcgagggcctgaaggaggccgacaaggacgagttctgcagatgcgagctgaagctgcagaagtggtacggggacctgcggggaaagcccttcgccatcgaagccgagaacagcatcctggacatcagcggcttcagcaagcagtacaactgtgccttcatctggcagaaggacggcgtgaagaagctgaacctgtacctgatcatcaactacttcaagggcggcaagctgcggttcaagaagatcaaacctgaagccttcgaagccaacagattctacaccgtgatcaacaaaaagagcggcgagatcgtgcccatggaggtgaacttcaacttcgacgaccccaacctgatcatcctgcctctggcctttggcaagagacagggcagagaattcatctggaacgacctgctgtccctggaaaccggcagcctgaagctggccaacggaagagtgatcgagaagacactgtacaacagaagaacccggcaggatgagcctgccctgttcgtggccctgaccttcgagcggcgggaggtcctggactcctccaatatcaaaccaatgaacctgatcggcgtggcaagaggcgaaaacatccccgccgtgatcgccctgaccgaccccgagggctgcccactgagccggtttaaggatagcctgggaaacccaacccacatcctgagaatcggcgagagctataaggagaagcagcggaccatccaggccaagaaggaggtggagcagcggagagccggcggctacagccggaagtacgccagcaaagccaagaatctggcagacgatatggtgagaaacaccgctagagatctgctgtactacgccgtgacccaggatgccatgctgatcttcgccaacctgagccggggcttcggccggcagggcaagcggaccttcatggccgagagacagtacacacggatggaggactggctgaccgccaagctggcctacgagggcctgagcaagacctacctgtccaagacactggcccagtacacctccaagacatgcagcaactgtgggtttaccatcaccagcgccgactacgacagggtgctggagaagctgaagaagacagcaacaggctggatgaccacaattaacggcaaggagctgaaggtggagggccagattacctactacaacagatacaagagacagaacgtagtcaaggacctgtccgtcgagctggatagactgagcgaagaatctgtgaacaacgacatctcctcctggacaaagggcagaagcggagaagctctgagcctcctgaagaaaagattctcccatagacccgtgcaggagaagttcgtgtgcctgaactgcggcttcgagacacacgcagccgagcaagccgccctgaacatcgccagatcctggctgttcctgcggagccaggagtacaagaaataccagacaaacaagacaaccggcaacaccgataagagagccttcgtcgagacctggcagtccttttaccggaagaagcttaaggaggtgtggaaacctgccgtgcggtctggcggatctggcggaggctccagctgggccagcgtggtgttcgaggacgtggccgtgaacttcacccccgaggagtgggccctgctgaacaggggccagaggaagctgtacagggacgtgatgctggagacctgcaggaacctgagcgccgtggagaagaggaagttccacagcagcggcgacctgaccaggatgcaggagggcctgctgaggagccccctggtggagagcgtgtgcgagaggatcgagggcgacccctgcggcggcggcccaagcagcggcgcccctcctcccagcggcggcagcccagccggctccccaacctctaccgaggagggcacctctgagtccgccacccccgagagcggccctggcacctccaccgagcccagcgagggcagcgcacccggcagccctgccggcagccccacctccacagaggagggaaccagcaccgagcccagcgaaggcagcgccccaggcaccagcaccgagcctagtgagcaggagattaaacggatcaacaagatcagaagaagacttgtgaaagacagcaacaccaagaaggccggcaagacaggccccatgaaaaccctgctggttagagtgatgacacccgatctgagagagcggctggaaaacctgagaaagaagcctgaaaatatcccccagcccatcagcaatacatctagagccaacctgaataagctgctgaccgattacaccgaaatgaagaaggcgatcctgcatgtgtactgggaagagttccagaaggaccctgtgggcctgatgagccgggtggcccagcctgccagcaagaagatcgatcagaacaagctgaaacctgagatggacgagaagggcaacctgaccaccgccggctttgcctgctctcagtgtggccagcccctgttcgtgtacaagctggagcaggtgtctgagaagggcaaggcttacaccaactacttcggacggtgcaatgtggccgagcacgaaaagctgatcctgctggcccagctgaagcccgagaaggatagcgacgaagccgtgacatatagcctgggaaagtttgggcagagggccctggatttctacagcattcatgtgaccaaggagtccacccaccccgtgaagcccctggcccagatcgccggaaacagatacgcctccggacctgtgggaaaggccctgagcgacgcatgtatgggcacaatcgcctccttcctgtctaagtaccaggacatcatcatcgaacaccagaaggtggtgaagggcaaccagaagagactggagagcctgcgggagctggccggcaaggaaaacctggaataccctagcgtgaccctgccacctcagcctcacaccaaggagggcgttgatgcctacaacgaagtgatcgcccgggtgcgaatgtgggtgaacctgaacctgtggcagaagctgaagctaagcagagatgatgccaagcctctgctgagactgaagggattcccttcctttcctctggtcgagagacaggccaacgaagtggactggtgggacatggtgtgtaacgtgaagaagctgatcaacgagaaaaaggaggatggcaaggtgttttggcagaatctggctggctacaagagacaggaagccctgagaccatacctgagcagcgaggaagatcggaagaagggaaagaaattcgctcggtaccagctgggcgacctgctgctgcacctggaaaagaagcacggcgaggactggggaaaggtgtacgacgaggcctgggagcggattgacaagaaagtggaaggcctgagcaagcacatcaagctggaagaggaacggagaagcgaggacgcccagagcaaggccgccctgaccgactggctgcgggctaaggccagcttcgtgatcgagggcctgaaggaggccgacaaggacgagttctgcagatgcgagctgaagctgcagaagtggtacggggacctgcggggaaagcccttcgccatcgaagccgagaacagcatcctggacatcagcggcttcagcaagcagtacaactgtgccttcatctggcagaaggacggcgtgaagaagctgaacctgtacctgatcatcaactacttcaagggcggcaagctgcggttcaagaagatcaaacctgaagccttcgaagccaacagattctacaccgtgatcaacaaaaagagcggcgagatcgtgcccatggaggtgaacttcaacttcgacgaccccaacctgatcatcctgcctctggcctttggcaagagacagggcagagaattcatctggaacgacctgctgtccctggaaaccggcagcctgaagctggccaacggaagagtgatcgagaagacactgtacaacagaagaacccggcaggatgagcctgccctgttcgtggccctgaccttcgagcggcgggaggtcctggactcctccaatatcaaaccaatgaacctgatcggcgtggcaagaggcgaaaacatccccgccgtgatcgccctgaccgaccccgagggctgcccactgagccggtttaaggatagcctgggaaacccaacccacatcctgagaatcggcgagagctataaggagaagcagcggaccatccaggccaagaaggaggtggagcagcggagagccggcggctacagccggaagtacgccagcaaagccaagaatctggcagacgatatggtgagaaacaccgctagagatctgctgtactacgccgtgacccaggatgccatgctgatcttcgccaacctgagccggggcttcggccggcagggcaagcggaccttcatggccgagagacagtacacacggatggaggactggctgaccgccaagctggcctacgagggcctgagcaagacctacctgtccaagacactggcccagtacacctccaagacatgcagcaactgtgggtttaccatcaccagcgccgactacgacagggtgctggagaagctgaagaagacagcaacaggctggatgaccacaattaacggcaaggagctgaaggtggagggccagattacctactacaacagatacaagagacagaacgtagtcaaggacctgtccgtcgagctggatagactgagcgaagaatctgtgaacaacgacatctcctcctggacaaagggcagaagcggagaagctctgagcctcctgaagaaaagattctcccatagacccgtgcaggagaagttcgtgtgcctgaactgcggcttcgagacacacgcagccgagcaagccgccctgaacatcgccagatcctggctgttcctgcggagccaggagtacaagaaataccagacaaacaagacaaccggcaacaccgataagagagccttcgtcgagacctggcagtccttttaccggaagaagcttaaggaggtgtggaaacctgccgtgcggtctggcggatctggcggaggctcctagctgggccagcgtggtgttcgaggacgtggccgtgaacttcacccccgaggagtgggccctgctgaacaggggccagaggaagctgtacagggacgtgatgctggagacctgcaggaacctgagcgccgtggagaagaggaagttccacagcagcggcgacctgaccaggatgcaggagggcctgctgaggagccccctggtggagagcgtgtgcgagaggatcgagggcgacccctgcggcggatctggctccggcagcggccccaagaaaaagagaaaagtctaagctgccttctgcggggcttgccttctggccatgcccttcttctctcccttgcacctgtacctcttggtctttgaataaagcctgagtaggaaggctagcaaaaaaaaaaaaaaaaaaaaaaaaaaaaaaaaaaaaaaaaaaaaaaaaaaaaaaaaaaaaaaaaaaaaaaaaaaaaaaaa

SEQ ID NO: 15963 - RNA, 9485 nt, synthetic construct
  source 1..9485: mol_type = other RNA
aggaaataagagagaaaagaagagtaagaagaaatataagagccaccatggcccctaagaagaagcgtaaagtgagccggatggaacgcctcgtctacgaggtgcggcagaagtgcagaaacatcgaggacatctgcatctcctgcggatctctgaacgtgaccctggagcacccactgttcatcggcggcatgtgccagaactgtaaaaactgttttctggagtgtgcctatcaatacgacgatgacggctaccagagctactgcaccatctgttgcggcggaagagaggtgctgatgtgtggaaataacaactgctgccggtgcttctgcgtggaatgcgtggacctgctggtgggccccggcgccgcccaggccgctattaaggaagatccttggaactgctacatgtgcggccacaagggcacatacggcctgctgagacggagagaggactggcctagcagactgcagatgttcttcgccaataaccacgaccaggagttcgacccccctaaggtgtaccctcccgtccccgccgagaagagaaagcccatccgggtcctgagcctgttcgatggcatcgccaccggtctgctggtgctgaaggacctgggcatccaggtggataggtacattgcctccgaggtgtgcgaggactccatcaccgtgggaatggtgcgtcatcagggcaagatcatgtacgtgggcgacgtgcggagcgtgacacagaagcatatccaggagtggggccctttcgacctggtgatcggcggcagcccttgcaatgacctgagcatcgtgaacccagcccggaagggcctgtacgagggaaccggcagactgttcttcgagttttacagactgctgcacgacgcccggcctaaggaaggcgacgaccggcccttcttttggctgttcgagaatgtggtggccatgggagtcagcgacaagcgggatattagccggttcctggagagcaaccccgtgatgatcgatgccaaggaagtgagcgccgcccaccgggccagatacttctggggcaatctgcctggcatgaacagacccctggccagcaccgtgaacgacaagctggagctgcaggagtgcctggagcacggccggatcgccaagttcagcaaggtgagaaccatcaccacccgaagcaacagcatcaaacaaggcaaggaccagcactttcctgtgttcatgaacgagaaggaggacatcctgtggtgtaccgagatggagagagtgttcgggttcccagtccactacacagatgtcagcaacatgtctagactggccagacagagactgctgggaagaagctggtccgtccctgtgatcagacacctgttcgcccctctgaaggagtacttcgcctgcgtgagcagcggcaacagcaacgccaacagccggggccccagcttctctagcggcctggtgccactgtccctgagagggagccacatgggccccatggagatctacaaaaccgtgagcgcctggaagcggcagcctgtgcgcgtgctgagcctgtttcggaatatcgataaagtcctgaaaagcctgggattcctggagagcggctctggctccggcggtggcaccctgaagtacgtggaggatgtgacaaacgtggtcagacgggatgtggagaagtggggccccttcgatctggtgtacggcagcacccaacccctgggcagctcttgtgaccggtgccctggctggtacatgtttcagttccaccggatcctgcagtacgccctgccgagacaggagtcccagcggccattcttttggattttcatggacaacttgctgctgaccgaggatgaccaggaaactaccactcggttcctgcagaccgaagccgtgaccctgcaggacgtgagaggccgggactaccagaacgccatgcgggtgtggtccaacatccctggactgaaaagcaagcacgcacctctgacccctaaagaagaggagtacctgcaggcccaggtgcggagcagaagcaagctggacgcccctaaggtggatctgctggtgaagaattgcctcctgcccctgagagagtacttcaagtatttcagccagaatagtctgcccctgggaggcagcggcggcggcgccctggtgacatttgaggacgtcgccgtgcggttcacccaggaggaatgggctctgctggatccttctcagaaaatcctgtaccgggacgtgatgagagagacataccggaatctgacctccgtgggcatcaactgggaatgttgggaccttgaagcctgcttcagaagcctgggaagaaacctgagagtgcaggtggtgaagagaaagtgcgagctgaccaacagcggcccctgcgccgagggcggcccaagcagcggcgcccctcctcccagcggcggcagcccagccggctccccaacctctaccgaggagggcacctctgagtccgccacccccgagagcggccctggcacctccaccgagcccagcgagggcagcgcacccggcagccctgccggcagccccacctccacagaggagggaaccagcaccgagcccagcgaaggcagcgccccaggcaccagcaccgagcctagtgagcaggagattaaacggatcaacaagatcagaagaagacttgtgaaagacagcaacaccaagaaggccggcaagacaggccccatgaaaaccctgctggttagagtgatgacacccgatctgagagagcggctggaaaacctgagaaagaagcctgaaaatatcccccagcccatcagcaatacatctagagccaacctgaataagctgctgaccgattacaccgaaatgaagaaggcgatcctgcatgtgtactgggaagagttccagaaggaccctgtgggcctgatgagccgggtggcccagcctgccagcaagaagatcgatcagaacaagctgaaacctgagatggacgagaagggcaacctgaccaccgccggctttgcctgctctcagtgtggccagcccctgttcgtgtacaagctggagcaggtgtctgagaagggcaaggcttacaccaactacttcggacggtgcaatgtggccgagcacgaaaagctgatcctgctggcccagctgaagcccgagaaggatagcgacgaagccgtgacatatagcctgggaaagtttgggcagagggccctggatttctacagcattcatgtgaccaaggagtccacccaccccgtgaagcccctggcccagatcgccggaaacagatacgcctccggacctgtgggaaaggccctgagcgacgcatgtatgggcacaatcgcctccttcctgtctaagtaccaggacatcatcatcgaacaccagaaggtggtgaagggcaaccagaagagactggagagcctgcgggagctggccggcaaggaaaacctggaataccctagcgtgaccctgccacctcagcctcacaccaaggagggcgttgatgcctacaacgaagtgatcgcccgggtgcgaatgtgggtgaacctgaacctgtggcagaagctgaagctaagcagagatgatgccaagcctctgctgagactgaagggattcccttcctttcctctggtcgagagacaggccaacgaagtggactggtgggacatggtgtgtaacgtgaagaagctgatcaacgagaaaaaggaggatggcaaggtgttttggcagaatctggctggctacaagagacaggaagccctgagaccatacctgagcagcgaggaagatcggaagaagggaaagaaattcgctcggtaccagctgggcgacctgctgctgcacctggaaaagaagcacggcgaggactggggaaaggtgtacgacgaggcctgggagcggattgacaagaaagtggaaggcctgagcaagcacatcaagctggaagaggaacggagaagcgaggacgcccagagcaaggccgccctgaccgactggctgcgggctaaggccagcttcgtgatcgagggcctgaaggaggccgacaaggacgagttctgcagatgcgagctgaagctgcagaagtggtacggggacctgcggggaaagcccttcgccatcgaagccgagaacagcatcctggacatcagcggcttcagcaagcagtacaactgtgccttcatctggcagaaggacggcgtgaagaagctgaacctgtacctgatcatcaactacttcaagggcggcaagctgcggttcaagaagatcaaacctgaagccttcgaagccaacagattctacaccgtgatcaacaaaaagagcggcgagatcgtgcccatggaggtgaacttcaacttcgacgaccccaacctgatcatcctgcctctggcctttggcaagagacagggcagagaattcatctggaacgacctgctgtccctggaaaccggcagcctgaagctggccaacggaagagtgatcgagaagacactgtacaacagaagaacccggcaggatgagcctgccctgttcgtggccctgaccttcgagcggcgggaggtcctggactcctccaatatcaaaccaatgaacctgatcggcgtggcaagaggcgaaaacatccccgccgtgatcgccctgaccgaccccgagggctgcccactgagccggtttaaggatagcctgggaaacccaacccacatcctgagaatcggcgagagctataaggagaagcagcggaccatccaggccaagaaggaggtggagcagcggagagccggcggctacagccggaagtacgccagcaaagccaagaatctggcagacgatatggtgagaaacaccgctagagatctgctgtactacgccgtgacccaggatgccatgctgatcttcgccaacctgagccggggcttcggccggcagggcaagcggaccttcatggccgagagacagtacacacggatggaggactggctgaccgccaagctggcctacgagggcctgagcaagacctacctgtccaagacactggcccagtacacctccaagacatgcagcaactgtgggtttaccatcaccagcgccgactacgacagggtgctggagaagctgaagaagacagcaacaggctggatgaccacaattaacggcaaggagctgaaggtggagggccagattacctactacaacagatacaagagacagaacgtagtcaaggacctgtccgtcgagctggatagactgagcgaagaatctgtgaacaacgacatctcctcctggacaaagggcagaagcggagaagctctgagcctcctgaagaaaagattctcccatagacccgtgcaggagaagttcgtgtgcctgaactgcggcttcgagacacacgcagccgagcaagccgccctgaacatcgccagatcctggctgttcctgcggagccaggagtacaagaaataccagacaaacaagacaaccggcaacaccgataagagagccttcgtcgagacctggcagtccttttaccggaagaagcttaaggaggtgtggaaacctgccgtgcggtctggcggatctggcggaggctccgcccaggagagcctgaccctggaggacgtggccgtggacttcagcagggaggagtggaggctgctggcccccgcccagaaggacctgtacagggacgtgatgctggagaactacaggaacctggtgagcgtgggccaccaggccagcaagcccgacgtgctggccaggctggagaggggcgaggagccctgggccatcgaggaggaggtgaggagcggcaccagccccgagaccggcaaggtgggcggcccaagcagcggcgcccctcctcccagcggcggcagcccagccggctccccaacctctaccgaggagggcacctctgagtccgccacccccgagagcggccctggcacctccaccgagcccagcgagggcagcgcacccggcagccctgccggcagccccacctccacagaggagggaaccagcaccgagcccagcgaaggcagcgccccaggcaccagcaccgagcctagtgagcaggagattaaacggatcaacaagatcagaagaagacttgtgaaagacagcaacaccaagaaggccggcaagacaggccccatgaaaaccctgctggttagagtgatgacacccgatctgagagagcggctggaaaacctgagaaagaagcctgaaaatatcccccagcccatcagcaatacatctagagccaacctgaataagctgctgaccgattacaccgaaatgaagaaggcgatcctgcatgtgtactgggaagagttccagaaggaccctgtgggcctgatgagccgggtggcccagcctgccagcaagaagatcgatcagaacaagctgaaacctgagatggacgagaagggcaacctgaccaccgccggctttgcctgctctcagtgtggccagcccctgttcgtgtacaagctggagcaggtgtctgagaagggcaaggcttacaccaactacttcggacggtgcaatgtggccgagcacgaaaagctgatcctgctggcccagctgaagcccgagaaggatagcgacgaagccgtgacatatagcctgggaaagtttgggcagagggccctggatttctacagcattcatgtgaccaaggagtccacccaccccgtgaagcccctggcccagatcgccggaaacagatacgcctccggacctgtgggaaaggccctgagcgacgcatgtatgggcacaatcgcctccttcctgtctaagtaccaggacatcatcatcgaacaccagaaggtggtgaagggcaaccagaagagactggagagcctgcgggagctggccggcaaggaaaacctggaataccctagcgtgaccctgccacctcagcctcacaccaaggagggcgttgatgcctacaacgaagtgatcgcccgggtgcgaatgtgggtgaacctgaacctgtggcagaagctgaagctaagcagagatgatgccaagcctctgctgagactgaagggattcccttcctttcctctggtcgagagacaggccaacgaagtggactggtgggacatggtgtgtaacgtgaagaagctgatcaacgagaaaaaggaggatggcaaggtgttttggcagaatctggctggctacaagagacaggaagccctgagaccatacctgagcagcgaggaagatcggaagaagggaaagaaattcgctcggtaccagctgggcgacctgctgctgcacctggaaaagaagcacggcgaggactggggaaaggtgtacgacgaggcctgggagcggattgacaagaaagtggaaggcctgagcaagcacatcaagctggaagaggaacggagaagcgaggacgcccagagcaaggccgccctgaccgactggctgcgggctaaggccagcttcgtgatcgagggcctgaaggaggccgacaaggacgagttctgcagatgcgagctgaagctgcagaagtggtacggggacctgcggggaaagcccttcgccatcgaagccgagaacagcatcctggacatcagcggcttcagcaagcagtacaactgtgccttcatctggcagaaggacggcgtgaagaagctgaacctgtacctgatcatcaactacttcaagggcggcaagctgcggttcaagaagatcaaacctgaagccttcgaagccaacagattctacaccgtgatcaacaaaaagagcggcgagatcgtgcccatggaggtgaacttcaacttcgacgaccccaacctgatcatcctgcctctggcctttggcaagagacagggcagagaattcatctggaacgacctgctgtccctggaaaccggcagcctgaagctggccaacggaagagtgatcgagaagacactgtacaacagaagaacccggcaggatgagcctgccctgttcgtggccctgaccttcgagcggcgggaggtcctggactcctccaatatcaaaccaatgaacctgatcggcgtggcaagaggcgaaaacatccccgccgtgatcgccctgaccgaccccgagggctgcccactgagccggtttaaggatagcctgggaaacccaacccacatcctgagaatcggcgagagctataaggagaagcagcggaccatccaggccaagaaggaggtggagcagcggagagccggcggctacagccggaagtacgccagcaaagccaagaatctggcagacgatatggtgagaaacaccgctagagatctgctgtactacgccgtgacccaggatgccatgctgatcttcgccaacctgagccggggcttcggccggcagggcaagcggaccttcatggccgagagacagtacacacggatggaggactggctgaccgccaagctggcctacgagggcctgagcaagacctacctgtccaagacactggcccagtacacctccaagacatgcagcaactgtgggtttaccatcaccagcgccgactacgacagggtgctggagaagctgaagaagacagcaacaggctggatgaccacaattaacggcaaggagctgaaggtggagggccagattacctactacaacagatacaagagacagaacgtagtcaaggacctgtccgtcgagctggatagactgagcgaagaatctgtgaacaacgacatctcctcctggacaaagggcagaagcggagaagctctgagcctcctgaagaaaagattctcccatagacccgtgcaggagaagttcgtgtgcctgaactgcggcttcgagacacacgcagccgagcaagccgccctgaacatcgccagatcctggctgttcctgcggagccaggagtacaagaaataccagacaaacaagacaaccggcaacaccgataagagagccttcgtcgagacctggcagtccttttaccggaagaagcttaaggaggtgtggaaacctgccgtgcggtctggcggatctggcggaggctcctgcccaggagagcctgaccctggaggacgtggccgtggacttcagcagggaggagtggaggctgctggcccccgcccagaaggacctgtacagggacgtgatgctggagaactacaggaacctggtgagcgtgggccaccaggccagcaagcccgacgtgctggccaggctggagaggggcgaggagccctgggccatcgaggaggaggtgaggagcggcaccagccccgagaccggcaaggtgggatctggctccggcagcggccccaagaaaaagagaaaagtctaagctgccttctgcggggcttgccttctggccatgcccttcttctctcccttgcacctgtacctcttggtctttgaataaagcctgagtaggaaggctagcaaaaaaaaaaaaaaaaaaaaaaaaaaaaaaaaaaaaaaaaaaaaaaaaaaaaaaaaaaaaaaaaaaaaaaaaaaaaaaaa

SEQ ID NO: 15964 - RNA, 9485 nt, synthetic construct
  source 1..9485: mol_type = other RNA
aggaaataagagagaaaagaagagtaagaagaaatataagagccaccatggcccctaagaagaagcgtaaagtgagccggatggaacgcctcgtctacgaggtgcggcagaagtgcagaaacatcgaggacatctgcatctcctgcggatctctgaacgtgaccctggagcacccactgttcatcggcggcatgtgccagaactgtaaaaactgttttctggagtgtgcctatcaatacgacgatgacggctaccagagctactgcaccatctgttgcggcggaagagaggtgctgatgtgtggaaataacaactgctgccggtgcttctgcgtggaatgcgtggacctgctggtgggccccggcgccgcccaggccgctattaaggaagatccttggaactgctacatgtgcggccacaagggcacatacggcctgctgagacggagagaggactggcctagcagactgcagatgttcttcgccaataaccacgaccaggagttcgacccccctaaggtgtaccctcccgtccccgccgagaagagaaagcccatccgggtcctgagcctgttcgatggcatcgccaccggtctgctggtgctgaaggacctgggcatccaggtggataggtacattgcctccgaggtgtgcgaggactccatcaccgtgggaatggtgcgtcatcagggcaagatcatgtacgtgggcgacgtgcggagcgtgacacagaagcatatccaggagtggggccctttcgacctggtgatcggcggcagcccttgcaatgacctgagcatcgtgaacccagcccggaagggcctgtacgagggaaccggcagactgttcttcgagttttacagactgctgcacgacgcccggcctaaggaaggcgacgaccggcccttcttttggctgttcgagaatgtggtggccatgggagtcagcgacaagcgggatattagccggttcctggagagcaaccccgtgatgatcgatgccaaggaagtgagcgccgcccaccgggccagatacttctggggcaatctgcctggcatgaacagacccctggccagcaccgtgaacgacaagctggagctgcaggagtgcctggagcacggccggatcgccaagttcagcaaggtgagaaccatcaccacccgaagcaacagcatcaaacaaggcaaggaccagcactttcctgtgttcatgaacgagaaggaggacatcctgtggtgtaccgagatggagagagtgttcgggttcccagtccactacacagatgtcagcaacatgtctagactggccagacagagactgctgggaagaagctggtccgtccctgtgatcagacacctgttcgcccctctgaaggagtacttcgcctgcgtgagcagcggcaacagcaacgccaacagccggggccccagcttctctagcggcctggtgccactgtccctgagagggagccacatgggccccatggagatctacaaaaccgtgagcgcctggaagcggcagcctgtgcgcgtgctgagcctgtttcggaatatcgataaagtcctgaaaagcctgggattcctggagagcggctctggctccggcggtggcaccctgaagtacgtggaggatgtgacaaacgtggtcagacgggatgtggagaagtggggccccttcgatctggtgtacggcagcacccaacccctgggcagctcttgtgaccggtgccctggctggtacatgtttcagttccaccggatcctgcagtacgccctgccgagacaggagtcccagcggccattcttttggattttcatggacaacttgctgctgaccgaggatgaccaggaaactaccactcggttcctgcagaccgaagccgtgaccctgcaggacgtgagaggccgggactaccagaacgccatgcgggtgtggtccaacatccctggactgaaaagcaagcacgcacctctgacccctaaagaagaggagtacctgcaggcccaggtgcggagcagaagcaagctggacgcccctaaggtggatctgctggtgaagaattgcctcctgcccctgagagagtacttcaagtatttcagccagaatagtctgcccctgggaggcagcggcggcggcgccctggtgacatttgaggacgtcgccgtgcggttcacccaggaggaatgggctctgctggatccttctcagaaaatcctgtaccgggacgtgatgagagagacataccggaatctgacctccgtgggcatcaactgggaatgttgggaccttgaagcctgcttcagaagcctgggaagaaacctgagagtgcaggtggtgaagagaaagtgcgagctgaccaacagcggcccctgcgccgagggcggcccaagcagcggcgcccctcctcccagcggcggcagcccagccggctccccaacctctaccgaggagggcacctctgagtccgccacccccgagagcggccctggcacctccaccgagcccagcgagggcagcgcacccggcagccctgccggcagccccacctccacagaggagggaaccagcaccgagcccagcgaaggcagcgccccaggcaccagcaccgagcctagtgagcaggagattaaacggatcaacaagatcagaagaagacttgtgaaagacagcaacaccaagaaggccggcaagacaggccccatgaaaaccctgctggttagagtgatgacacccgatctgagagagcggctggaaaacctgagaaagaagcctgaaaatatcccccagcccatcagcaatacatctagagccaacctgaataagctgctgaccgattacaccgaaatgaagaaggcgatcctgcatgtgtactgggaagagttccagaaggaccctgtgggcctgatgagccgggtggcccagcctgccagcaagaagatcgatcagaacaagctgaaacctgagatggacgagaagggcaacctgaccaccgccggctttgcctgctctcagtgtggccagcccctgttcgtgtacaagctggagcaggtgtctgagaagggcaaggcttacaccaactacttcggacggtgcaatgtggccgagcacgaaaagctgatcctgctggcccagctgaagcccgagaaggatagcgacgaagccgtgacatatagcctgggaaagtttgggcagagggccctggatttctacagcattcatgtgaccaaggagtccacccaccccgtgaagcccctggcccagatcgccggaaacagatacgcctccggacctgtgggaaaggccctgagcgacgcatgtatgggcacaatcgcctccttcctgtctaagtaccaggacatcatcatcgaacaccagaaggtggtgaagggcaaccagaagagactggagagcctgcgggagctggccggcaaggaaaacctggaataccctagcgtgaccctgccacctcagcctcacaccaaggagggcgttgatgcctacaacgaagtgatcgcccgggtgcgaatgtgggtgaacctgaacctgtggcagaagctgaagctaagcagagatgatgccaagcctctgctgagactgaagggattcccttcctttcctctggtcgagagacaggccaacgaagtggactggtgggacatggtgtgtaacgtgaagaagctgatcaacgagaaaaaggaggatggcaaggtgttttggcagaatctggctggctacaagagacaggaagccctgagaccatacctgagcagcgaggaagatcggaagaagggaaagaaattcgctcggtaccagctgggcgacctgctgctgcacctggaaaagaagcacggcgaggactggggaaaggtgtacgacgaggcctgggagcggattgacaagaaagtggaaggcctgagcaagcacatcaagctggaagaggaacggagaagcgaggacgcccagagcaaggccgccctgaccgactggctgcgggctaaggccagcttcgtgatcgagggcctgaaggaggccgacaaggacgagttctgcagatgcgagctgaagctgcagaagtggtacggggacctgcggggaaagcccttcgccatcgaagccgagaacagcatcctggacatcagcggcttcagcaagcagtacaactgtgccttcatctggcagaaggacggcgtgaagaagctgaacctgtacctgatcatcaactacttcaagggcggcaagctgcggttcaagaagatcaaacctgaagccttcgaagccaacagattctacaccgtgatcaacaaaaagagcggcgagatcgtgcccatggaggtgaacttcaacttcgacgaccccaacctgatcatcctgcctctggcctttggcaagagacagggcagagaattcatctggaacgacctgctgtccctggaaaccggcagcctgaagctggccaacggaagagtgatcgagaagacactgtacaacagaagaacccggcaggatgagcctgccctgttcgtggccctgaccttcgagcggcgggaggtcctggactcctccaatatcaaaccaatgaacctgatcggcgtggcaagaggcgaaaacatccccgccgtgatcgccctgaccgaccccgagggctgcccactgagccggtttaaggatagcctgggaaacccaacccacatcctgagaatcggcgagagctataaggagaagcagcggaccatccaggccaagaaggaggtggagcagcggagagccggcggctacagccggaagtacgccagcaaagccaagaatctggcagacgatatggtgagaaacaccgctagagatctgctgtactacgccgtgacccaggatgccatgctgatcttcgccaacctgagccggggcttcggccggcagggcaagcggaccttcatggccgagagacagtacacacggatggaggactggctgaccgccaagctggcctacgagggcctgagcaagacctacctgtccaagacactggcccagtacacctccaagacatgcagcaactgtgggtttaccatcaccagcgccgactacgacagggtgctggagaagctgaagaagacagcaacaggctggatgaccacaattaacggcaaggagctgaaggtggagggccagattacctactacaacagatacaagagacagaacgtagtcaaggacctgtccgtcgagctggatagactgagcgaagaatctgtgaacaacgacatctcctcctggacaaagggcagaagcggagaagctctgagcctcctgaagaaaagattctcccatagacccgtgcaggagaagttcgtgtgcctgaactgcggcttcgagacacacgcagccgagcaagccgccctgaacatcgccagatcctggctgttcctgcggagccaggagtacaagaaataccagacaaacaagacaaccggcaacaccgataagagagccttcgtcgagacctggcagtccttttaccggaagaagcttaaggaggtgtggaaacctgccgtgcggtctggcggatctggcggaggctcccaggagagcgtgaccttcaaggacgtggccgtggacttcacccaggaggagtggcaccacatggaccccacccagaggatcctgtacagggacgtgatgctggagacctacagccacctggtgagcctgggctaccaggtgagcaagcccgaggtgatcttcaagctggagcagggcgaggagccctggatcagcgaggaggagatccagaggcccttctgccccgactgggagatcaggcccggcggcccaagcagcggcgcccctcctcccagcggcggcagcccagccggctccccaacctctaccgaggagggcacctctgagtccgccacccccgagagcggccctggcacctccaccgagcccagcgagggcagcgcacccggcagccctgccggcagccccacctccacagaggagggaaccagcaccgagcccagcgaaggcagcgccccaggcaccagcaccgagcctagtgagcaggagattaaacggatcaacaagatcagaagaagacttgtgaaagacagcaacaccaagaaggccggcaagacaggccccatgaaaaccctgctggttagagtgatgacacccgatctgagagagcggctggaaaacctgagaaagaagcctgaaaatatcccccagcccatcagcaatacatctagagccaacctgaataagctgctgaccgattacaccgaaatgaagaaggcgatcctgcatgtgtactgggaagagttccagaaggaccctgtgggcctgatgagccgggtggcccagcctgccagcaagaagatcgatcagaacaagctgaaacctgagatggacgagaagggcaacctgaccaccgccggctttgcctgctctcagtgtggccagcccctgttcgtgtacaagctggagcaggtgtctgagaagggcaaggcttacaccaactacttcggacggtgcaatgtggccgagcacgaaaagctgatcctgctggcccagctgaagcccgagaaggatagcgacgaagccgtgacatatagcctgggaaagtttgggcagagggccctggatttctacagcattcatgtgaccaaggagtccacccaccccgtgaagcccctggcccagatcgccggaaacagatacgcctccggacctgtgggaaaggccctgagcgacgcatgtatgggcacaatcgcctccttcctgtctaagtaccaggacatcatcatcgaacaccagaaggtggtgaagggcaaccagaagagactggagagcctgcgggagctggccggcaaggaaaacctggaataccctagcgtgaccctgccacctcagcctcacaccaaggagggcgttgatgcctacaacgaagtgatcgcccgggtgcgaatgtgggtgaacctgaacctgtggcagaagctgaagctaagcagagatgatgccaagcctctgctgagactgaagggattcccttcctttcctctggtcgagagacaggccaacgaagtggactggtgggacatggtgtgtaacgtgaagaagctgatcaacgagaaaaaggaggatggcaaggtgttttggcagaatctggctggctacaagagacaggaagccctgagaccatacctgagcagcgaggaagatcggaagaagggaaagaaattcgctcggtaccagctgggcgacctgctgctgcacctggaaaagaagcacggcgaggactggggaaaggtgtacgacgaggcctgggagcggattgacaagaaagtggaaggcctgagcaagcacatcaagctggaagaggaacggagaagcgaggacgcccagagcaaggccgccctgaccgactggctgcgggctaaggccagcttcgtgatcgagggcctgaaggaggccgacaaggacgagttctgcagatgcgagctgaagctgcagaagtggtacggggacctgcggggaaagcccttcgccatcgaagccgagaacagcatcctggacatcagcggcttcagcaagcagtacaactgtgccttcatctggcagaaggacggcgtgaagaagctgaacctgtacctgatcatcaactacttcaagggcggcaagctgcggttcaagaagatcaaacctgaagccttcgaagccaacagattctacaccgtgatcaacaaaaagagcggcgagatcgtgcccatggaggtgaacttcaacttcgacgaccccaacctgatcatcctgcctctggcctttggcaagagacagggcagagaattcatctggaacgacctgctgtccctggaaaccggcagcctgaagctggccaacggaagagtgatcgagaagacactgtacaacagaagaacccggcaggatgagcctgccctgttcgtggccctgaccttcgagcggcgggaggtcctggactcctccaatatcaaaccaatgaacctgatcggcgtggcaagaggcgaaaacatccccgccgtgatcgccctgaccgaccccgagggctgcccactgagccggtttaaggatagcctgggaaacccaacccacatcctgagaatcggcgagagctataaggagaagcagcggaccatccaggccaagaaggaggtggagcagcggagagccggcggctacagccggaagtacgccagcaaagccaagaatctggcagacgatatggtgagaaacaccgctagagatctgctgtactacgccgtgacccaggatgccatgctgatcttcgccaacctgagccggggcttcggccggcagggcaagcggaccttcatggccgagagacagtacacacggatggaggactggctgaccgccaagctggcctacgagggcctgagcaagacctacctgtccaagacactggcccagtacacctccaagacatgcagcaactgtgggtttaccatcaccagcgccgactacgacagggtgctggagaagctgaagaagacagcaacaggctggatgaccacaattaacggcaaggagctgaaggtggagggccagattacctactacaacagatacaagagacagaacgtagtcaaggacctgtccgtcgagctggatagactgagcgaagaatctgtgaacaacgacatctcctcctggacaaagggcagaagcggagaagctctgagcctcctgaagaaaagattctcccatagacccgtgcaggagaagttcgtgtgcctgaactgcggcttcgagacacacgcagccgagcaagccgccctgaacatcgccagatcctggctgttcctgcggagccaggagtacaagaaataccagacaaacaagacaaccggcaacaccgataagagagccttcgtcgagacctggcagtccttttaccggaagaagcttaaggaggtgtggaaacctgccgtgcggtctggcggatctggcggaggctcctcaggagagcgtgaccttcaaggacgtggccgtggacttcacccaggaggagtggcaccacatggaccccacccagaggatcctgtacagggacgtgatgctggagacctacagccacctggtgagcctgggctaccaggtgagcaagcccgaggtgatcttcaagctggagcagggcgaggagccctggatcagcgaggaggagatccagaggcccttctgccccgactgggagatcaggcccggatctggctccggcagcggccccaagaaaaagagaaaagtctaagctgccttctgcggggcttgccttctggccatgcccttcttctctcccttgcacctgtacctcttggtctttgaataaagcctgagtaggaaggctagcaaaaaaaaaaaaaaaaaaaaaaaaaaaaaaaaaaaaaaaaaaaaaaaaaaaaaaaaaaaaaaaaaaaaaaaaaaaaaaaa

SEQ ID NO: 15965 - RNA, 9485 nt, synthetic construct
  source 1..9485: mol_type = other RNA
aggaaataagagagaaaagaagagtaagaagaaatataagagccaccatggcccctaagaagaagcgtaaagtgagccggatggaacgcctcgtctacgaggtgcggcagaagtgcagaaacatcgaggacatctgcatctcctgcggatctctgaacgtgaccctggagcacccactgttcatcggcggcatgtgccagaactgtaaaaactgttttctggagtgtgcctatcaatacgacgatgacggctaccagagctactgcaccatctgttgcggcggaagagaggtgctgatgtgtggaaataacaactgctgccggtgcttctgcgtggaatgcgtggacctgctggtgggccccggcgccgcccaggccgctattaaggaagatccttggaactgctacatgtgcggccacaagggcacatacggcctgctgagacggagagaggactggcctagcagactgcagatgttcttcgccaataaccacgaccaggagttcgacccccctaaggtgtaccctcccgtccccgccgagaagagaaagcccatccgggtcctgagcctgttcgatggcatcgccaccggtctgctggtgctgaaggacctgggcatccaggtggataggtacattgcctccgaggtgtgcgaggactccatcaccgtgggaatggtgcgtcatcagggcaagatcatgtacgtgggcgacgtgcggagcgtgacacagaagcatatccaggagtggggccctttcgacctggtgatcggcggcagcccttgcaatgacctgagcatcgtgaacccagcccggaagggcctgtacgagggaaccggcagactgttcttcgagttttacagactgctgcacgacgcccggcctaaggaaggcgacgaccggcccttcttttggctgttcgagaatgtggtggccatgggagtcagcgacaagcgggatattagccggttcctggagagcaaccccgtgatgatcgatgccaaggaagtgagcgccgcccaccgggccagatacttctggggcaatctgcctggcatgaacagacccctggccagcaccgtgaacgacaagctggagctgcaggagtgcctggagcacggccggatcgccaagttcagcaaggtgagaaccatcaccacccgaagcaacagcatcaaacaaggcaaggaccagcactttcctgtgttcatgaacgagaaggaggacatcctgtggtgtaccgagatggagagagtgttcgggttcccagtccactacacagatgtcagcaacatgtctagactggccagacagagactgctgggaagaagctggtccgtccctgtgatcagacacctgttcgcccctctgaaggagtacttcgcctgcgtgagcagcggcaacagcaacgccaacagccggggccccagcttctctagcggcctggtgccactgtccctgagagggagccacatgggccccatggagatctacaaaaccgtgagcgcctggaagcggcagcctgtgcgcgtgctgagcctgtttcggaatatcgataaagtcctgaaaagcctgggattcctggagagcggctctggctccggcggtggcaccctgaagtacgtggaggatgtgacaaacgtggtcagacgggatgtggagaagtggggccccttcgatctggtgtacggcagcacccaacccctgggcagctcttgtgaccggtgccctggctggtacatgtttcagttccaccggatcctgcagtacgccctgccgagacaggagtcccagcggccattcttttggattttcatggacaacttgctgctgaccgaggatgaccaggaaactaccactcggttcctgcagaccgaagccgtgaccctgcaggacgtgagaggccgggactaccagaacgccatgcgggtgtggtccaacatccctggactgaaaagcaagcacgcacctctgacccctaaagaagaggagtacctgcaggcccaggtgcggagcagaagcaagctggacgcccctaaggtggatctgctggtgaagaattgcctcctgcccctgagagagtacttcaagtatttcagccagaatagtctgcccctgggaggcagcggcggcggcgccctggtgacatttgaggacgtcgccgtgcggttcacccaggaggaatgggctctgctggatccttctcagaaaatcctgtaccgggacgtgatgagagagacataccggaatctgacctccgtgggcatcaactgggaatgttgggaccttgaagcctgcttcagaagcctgggaagaaacctgagagtgcaggtggtgaagagaaagtgcgagctgaccaacagcggcccctgcgccgagggcggcccaagcagcggcgcccctcctcccagcggcggcagcccagccggctccccaacctctaccgaggagggcacctctgagtccgccacccccgagagcggccctggcacctccaccgagcccagcgagggcagcgcacccggcagccctgccggcagccccacctccacagaggagggaaccagcaccgagcccagcgaaggcagcgccccaggcaccagcaccgagcctagtgagcaggagattaaacggatcaacaagatcagaagaagacttgtgaaagacagcaacaccaagaaggccggcaagacaggccccatgaaaaccctgctggttagagtgatgacacccgatctgagagagcggctggaaaacctgagaaagaagcctgaaaatatcccccagcccatcagcaatacatctagagccaacctgaataagctgctgaccgattacaccgaaatgaagaaggcgatcctgcatgtgtactgggaagagttccagaaggaccctgtgggcctgatgagccgggtggcccagcctgccagcaagaagatcgatcagaacaagctgaaacctgagatggacgagaagggcaacctgaccaccgccggctttgcctgctctcagtgtggccagcccctgttcgtgtacaagctggagcaggtgtctgagaagggcaaggcttacaccaactacttcggacggtgcaatgtggccgagcacgaaaagctgatcctgctggcccagctgaagcccgagaaggatagcgacgaagccgtgacatatagcctgggaaagtttgggcagagggccctggatttctacagcattcatgtgaccaaggagtccacccaccccgtgaagcccctggcccagatcgccggaaacagatacgcctccggacctgtgggaaaggccctgagcgacgcatgtatgggcacaatcgcctccttcctgtctaagtaccaggacatcatcatcgaacaccagaaggtggtgaagggcaaccagaagagactggagagcctgcgggagctggccggcaaggaaaacctggaataccctagcgtgaccctgccacctcagcctcacaccaaggagggcgttgatgcctacaacgaagtgatcgcccgggtgcgaatgtgggtgaacctgaacctgtggcagaagctgaagctaagcagagatgatgccaagcctctgctgagactgaagggattcccttcctttcctctggtcgagagacaggccaacgaagtggactggtgggacatggtgtgtaacgtgaagaagctgatcaacgagaaaaaggaggatggcaaggtgttttggcagaatctggctggctacaagagacaggaagccctgagaccatacctgagcagcgaggaagatcggaagaagggaaagaaattcgctcggtaccagctgggcgacctgctgctgcacctggaaaagaagcacggcgaggactggggaaaggtgtacgacgaggcctgggagcggattgacaagaaagtggaaggcctgagcaagcacatcaagctggaagaggaacggagaagcgaggacgcccagagcaaggccgccctgaccgactggctgcgggctaaggccagcttcgtgatcgagggcctgaaggaggccgacaaggacgagttctgcagatgcgagctgaagctgcagaagtggtacggggacctgcggggaaagcccttcgccatcgaagccgagaacagcatcctggacatcagcggcttcagcaagcagtacaactgtgccttcatctggcagaaggacggcgtgaagaagctgaacctgtacctgatcatcaactacttcaagggcggcaagctgcggttcaagaagatcaaacctgaagccttcgaagccaacagattctacaccgtgatcaacaaaaagagcggcgagatcgtgcccatggaggtgaacttcaacttcgacgaccccaacctgatcatcctgcctctggcctttggcaagagacagggcagagaattcatctggaacgacctgctgtccctggaaaccggcagcctgaagctggccaacggaagagtgatcgagaagacactgtacaacagaagaacccggcaggatgagcctgccctgttcgtggccctgaccttcgagcggcgggaggtcctggactcctccaatatcaaaccaatgaacctgatcggcgtggcaagaggcgaaaacatccccgccgtgatcgccctgaccgaccccgagggctgcccactgagccggtttaaggatagcctgggaaacccaacccacatcctgagaatcggcgagagctataaggagaagcagcggaccatccaggccaagaaggaggtggagcagcggagagccggcggctacagccggaagtacgccagcaaagccaagaatctggcagacgatatggtgagaaacaccgctagagatctgctgtactacgccgtgacccaggatgccatgctgatcttcgccaacctgagccggggcttcggccggcagggcaagcggaccttcatggccgagagacagtacacacggatggaggactggctgaccgccaagctggcctacgagggcctgagcaagacctacctgtccaagacactggcccagtacacctccaagacatgcagcaactgtgggtttaccatcaccagcgccgactacgacagggtgctggagaagctgaagaagacagcaacaggctggatgaccacaattaacggcaaggagctgaaggtggagggccagattacctactacaacagatacaagagacagaacgtagtcaaggacctgtccgtcgagctggatagactgagcgaagaatctgtgaacaacgacatctcctcctggacaaagggcagaagcggagaagctctgagcctcctgaagaaaagattctcccatagacccgtgcaggagaagttcgtgtgcctgaactgcggcttcgagacacacgcagccgagcaagccgccctgaacatcgccagatcctggctgttcctgcggagccaggagtacaagaaataccagacaaacaagacaaccggcaacaccgataagagagccttcgtcgagacctggcagtccttttaccggaagaagcttaaggaggtgtggaaacctgccgtgcggtctggcggatctggcggaggctccgccagggacctggtgatgttcagggacgtggccgtggacttcagccaggaggagtgggagtgcctgaacagctaccagaggaacctgtacagggacgtgatcctggagaactacagcaacctggtgagcctgggctgcagcatcagcaagcccgacgtgatcaccctgctggagcagggcaaggagccctggctggtggtgagggacgagaagaggaggtggagcctgggccccaccttcaagggcggcccaagcagcggcgcccctcctcccagcggcggcagcccagccggctccccaacctctaccgaggagggcacctctgagtccgccacccccgagagcggccctggcacctccaccgagcccagcgagggcagcgcacccggcagccctgccggcagccccacctccacagaggagggaaccagcaccgagcccagcgaaggcagcgccccaggcaccagcaccgagcctagtgagcaggagattaaacggatcaacaagatcagaagaagacttgtgaaagacagcaacaccaagaaggccggcaagacaggccccatgaaaaccctgctggttagagtgatgacacccgatctgagagagcggctggaaaacctgagaaagaagcctgaaaatatcccccagcccatcagcaatacatctagagccaacctgaataagctgctgaccgattacaccgaaatgaagaaggcgatcctgcatgtgtactgggaagagttccagaaggaccctgtgggcctgatgagccgggtggcccagcctgccagcaagaagatcgatcagaacaagctgaaacctgagatggacgagaagggcaacctgaccaccgccggctttgcctgctctcagtgtggccagcccctgttcgtgtacaagctggagcaggtgtctgagaagggcaaggcttacaccaactacttcggacggtgcaatgtggccgagcacgaaaagctgatcctgctggcccagctgaagcccgagaaggatagcgacgaagccgtgacatatagcctgggaaagtttgggcagagggccctggatttctacagcattcatgtgaccaaggagtccacccaccccgtgaagcccctggcccagatcgccggaaacagatacgcctccggacctgtgggaaaggccctgagcgacgcatgtatgggcacaatcgcctccttcctgtctaagtaccaggacatcatcatcgaacaccagaaggtggtgaagggcaaccagaagagactggagagcctgcgggagctggccggcaaggaaaacctggaataccctagcgtgaccctgccacctcagcctcacaccaaggagggcgttgatgcctacaacgaagtgatcgcccgggtgcgaatgtgggtgaacctgaacctgtggcagaagctgaagctaagcagagatgatgccaagcctctgctgagactgaagggattcccttcctttcctctggtcgagagacaggccaacgaagtggactggtgggacatggtgtgtaacgtgaagaagctgatcaacgagaaaaaggaggatggcaaggtgttttggcagaatctggctggctacaagagacaggaagccctgagaccatacctgagcagcgaggaagatcggaagaagggaaagaaattcgctcggtaccagctgggcgacctgctgctgcacctggaaaagaagcacggcgaggactggggaaaggtgtacgacgaggcctgggagcggattgacaagaaagtggaaggcctgagcaagcacatcaagctggaagaggaacggagaagcgaggacgcccagagcaaggccgccctgaccgactggctgcgggctaaggccagcttcgtgatcgagggcctgaaggaggccgacaaggacgagttctgcagatgcgagctgaagctgcagaagtggtacggggacctgcggggaaagcccttcgccatcgaagccgagaacagcatcctggacatcagcggcttcagcaagcagtacaactgtgccttcatctggcagaaggacggcgtgaagaagctgaacctgtacctgatcatcaactacttcaagggcggcaagctgcggttcaagaagatcaaacctgaagccttcgaagccaacagattctacaccgtgatcaacaaaaagagcggcgagatcgtgcccatggaggtgaacttcaacttcgacgaccccaacctgatcatcctgcctctggcctttggcaagagacagggcagagaattcatctggaacgacctgctgtccctggaaaccggcagcctgaagctggccaacggaagagtgatcgagaagacactgtacaacagaagaacccggcaggatgagcctgccctgttcgtggccctgaccttcgagcggcgggaggtcctggactcctccaatatcaaaccaatgaacctgatcggcgtggcaagaggcgaaaacatccccgccgtgatcgccctgaccgaccccgagggctgcccactgagccggtttaaggatagcctgggaaacccaacccacatcctgagaatcggcgagagctataaggagaagcagcggaccatccaggccaagaaggaggtggagcagcggagagccggcggctacagccggaagtacgccagcaaagccaagaatctggcagacgatatggtgagaaacaccgctagagatctgctgtactacgccgtgacccaggatgccatgctgatcttcgccaacctgagccggggcttcggccggcagggcaagcggaccttcatggccgagagacagtacacacggatggaggactggctgaccgccaagctggcctacgagggcctgagcaagacctacctgtccaagacactggcccagtacacctccaagacatgcagcaactgtgggtttaccatcaccagcgccgactacgacagggtgctggagaagctgaagaagacagcaacaggctggatgaccacaattaacggcaaggagctgaaggtggagggccagattacctactacaacagatacaagagacagaacgtagtcaaggacctgtccgtcgagctggatagactgagcgaagaatctgtgaacaacgacatctcctcctggacaaagggcagaagcggagaagctctgagcctcctgaagaaaagattctcccatagacccgtgcaggagaagttcgtgtgcctgaactgcggcttcgagacacacgcagccgagcaagccgccctgaacatcgccagatcctggctgttcctgcggagccaggagtacaagaaataccagacaaacaagacaaccggcaacaccgataagagagccttcgtcgagacctggcagtccttttaccggaagaagcttaaggaggtgtggaaacctgccgtgcggtctggcggatctggcggaggctcctgccagggacctggtgatgttcagggacgtggccgtggacttcagccaggaggagtgggagtgcctgaacagctaccagaggaacctgtacagggacgtgatcctggagaactacagcaacctggtgagcctgggctgcagcatcagcaagcccgacgtgatcaccctgctggagcagggcaaggagccctggctggtggtgagggacgagaagaggaggtggagcctgggccccaccttcaagggatctggctccggcagcggccccaagaaaaagagaaaagtctaagctgccttctgcggggcttgccttctggccatgcccttcttctctcccttgcacctgtacctcttggtctttgaataaagcctgagtaggaaggctagcaaaaaaaaaaaaaaaaaaaaaaaaaaaaaaaaaaaaaaaaaaaaaaaaaaaaaaaaaaaaaaaaaaaaaaaaaaaaaaaa

SEQ ID NO: 15966 - RNA, 9485 nt, synthetic construct
  source 1..9485: mol_type = other RNA
aggaaataagagagaaaagaagagtaagaagaaatataagagccaccatggcccctaagaagaagcgtaaagtgagccggatggaacgcctcgtctacgaggtgcggcagaagtgcagaaacatcgaggacatctgcatctcctgcggatctctgaacgtgaccctggagcacccactgttcatcggcggcatgtgccagaactgtaaaaactgttttctggagtgtgcctatcaatacgacgatgacggctaccagagctactgcaccatctgttgcggcggaagagaggtgctgatgtgtggaaataacaactgctgccggtgcttctgcgtggaatgcgtggacctgctggtgggccccggcgccgcccaggccgctattaaggaagatccttggaactgctacatgtgcggccacaagggcacatacggcctgctgagacggagagaggactggcctagcagactgcagatgttcttcgccaataaccacgaccaggagttcgacccccctaaggtgtaccctcccgtccccgccgagaagagaaagcccatccgggtcctgagcctgttcgatggcatcgccaccggtctgctggtgctgaaggacctgggcatccaggtggataggtacattgcctccgaggtgtgcgaggactccatcaccgtgggaatggtgcgtcatcagggcaagatcatgtacgtgggcgacgtgcggagcgtgacacagaagcatatccaggagtggggccctttcgacctggtgatcggcggcagcccttgcaatgacctgagcatcgtgaacccagcccggaagggcctgtacgagggaaccggcagactgttcttcgagttttacagactgctgcacgacgcccggcctaaggaaggcgacgaccggcccttcttttggctgttcgagaatgtggtggccatgggagtcagcgacaagcgggatattagccggttcctggagagcaaccccgtgatgatcgatgccaaggaagtgagcgccgcccaccgggccagatacttctggggcaatctgcctggcatgaacagacccctggccagcaccgtgaacgacaagctggagctgcaggagtgcctggagcacggccggatcgccaagttcagcaaggtgagaaccatcaccacccgaagcaacagcatcaaacaaggcaaggaccagcactttcctgtgttcatgaacgagaaggaggacatcctgtggtgtaccgagatggagagagtgttcgggttcccagtccactacacagatgtcagcaacatgtctagactggccagacagagactgctgggaagaagctggtccgtccctgtgatcagacacctgttcgcccctctgaaggagtacttcgcctgcgtgagcagcggcaacagcaacgccaacagccggggccccagcttctctagcggcctggtgccactgtccctgagagggagccacatgggccccatggagatctacaaaaccgtgagcgcctggaagcggcagcctgtgcgcgtgctgagcctgtttcggaatatcgataaagtcctgaaaagcctgggattcctggagagcggctctggctccggcggtggcaccctgaagtacgtggaggatgtgacaaacgtggtcagacgggatgtggagaagtggggccccttcgatctggtgtacggcagcacccaacccctgggcagctcttgtgaccggtgccctggctggtacatgtttcagttccaccggatcctgcagtacgccctgccgagacaggagtcccagcggccattcttttggattttcatggacaacttgctgctgaccgaggatgaccaggaaactaccactcggttcctgcagaccgaagccgtgaccctgcaggacgtgagaggccgggactaccagaacgccatgcgggtgtggtccaacatccctggactgaaaagcaagcacgcacctctgacccctaaagaagaggagtacctgcaggcccaggtgcggagcagaagcaagctggacgcccctaaggtggatctgctggtgaagaattgcctcctgcccctgagagagtacttcaagtatttcagccagaatagtctgcccctgggaggcagcggcggcggcgccctggtgacatttgaggacgtcgccgtgcggttcacccaggaggaatgggctctgctggatccttctcagaaaatcctgtaccgggacgtgatgagagagacataccggaatctgacctccgtgggcatcaactgggaatgttgggaccttgaagcctgcttcagaagcctgggaagaaacctgagagtgcaggtggtgaagagaaagtgcgagctgaccaacagcggcccctgcgccgagggcggcccaagcagcggcgcccctcctcccagcggcggcagcccagccggctccccaacctctaccgaggagggcacctctgagtccgccacccccgagagcggccctggcacctccaccgagcccagcgagggcagcgcacccggcagccctgccggcagccccacctccacagaggagggaaccagcaccgagcccagcgaaggcagcgccccaggcaccagcaccgagcctagtgagcaggagattaaacggatcaacaagatcagaagaagacttgtgaaagacagcaacaccaagaaggccggcaagacaggccccatgaaaaccctgctggttagagtgatgacacccgatctgagagagcggctggaaaacctgagaaagaagcctgaaaatatcccccagcccatcagcaatacatctagagccaacctgaataagctgctgaccgattacaccgaaatgaagaaggcgatcctgcatgtgtactgggaagagttccagaaggaccctgtgggcctgatgagccgggtggcccagcctgccagcaagaagatcgatcagaacaagctgaaacctgagatggacgagaagggcaacctgaccaccgccggctttgcctgctctcagtgtggccagcccctgttcgtgtacaagctggagcaggtgtctgagaagggcaaggcttacaccaactacttcggacggtgcaatgtggccgagcacgaaaagctgatcctgctggcccagctgaagcccgagaaggatagcgacgaagccgtgacatatagcctgggaaagtttgggcagagggccctggatttctacagcattcatgtgaccaaggagtccacccaccccgtgaagcccctggcccagatcgccggaaacagatacgcctccggacctgtgggaaaggccctgagcgacgcatgtatgggcacaatcgcctccttcctgtctaagtaccaggacatcatcatcgaacaccagaaggtggtgaagggcaaccagaagagactggagagcctgcgggagctggccggcaaggaaaacctggaataccctagcgtgaccctgccacctcagcctcacaccaaggagggcgttgatgcctacaacgaagtgatcgcccgggtgcgaatgtgggtgaacctgaacctgtggcagaagctgaagctaagcagagatgatgccaagcctctgctgagactgaagggattcccttcctttcctctggtcgagagacaggccaacgaagtggactggtgggacatggtgtgtaacgtgaagaagctgatcaacgagaaaaaggaggatggcaaggtgttttggcagaatctggctggctacaagagacaggaagccctgagaccatacctgagcagcgaggaagatcggaagaagggaaagaaattcgctcggtaccagctgggcgacctgctgctgcacctggaaaagaagcacggcgaggactggggaaaggtgtacgacgaggcctgggagcggattgacaagaaagtggaaggcctgagcaagcacatcaagctggaagaggaacggagaagcgaggacgcccagagcaaggccgccctgaccgactggctgcgggctaaggccagcttcgtgatcgagggcctgaaggaggccgacaaggacgagttctgcagatgcgagctgaagctgcagaagtggtacggggacctgcggggaaagcccttcgccatcgaagccgagaacagcatcctggacatcagcggcttcagcaagcagtacaactgtgccttcatctggcagaaggacggcgtgaagaagctgaacctgtacctgatcatcaactacttcaagggcggcaagctgcggttcaagaagatcaaacctgaagccttcgaagccaacagattctacaccgtgatcaacaaaaagagcggcgagatcgtgcccatggaggtgaacttcaacttcgacgaccccaacctgatcatcctgcctctggcctttggcaagagacagggcagagaattcatctggaacgacctgctgtccctggaaaccggcagcctgaagctggccaacggaagagtgatcgagaagacactgtacaacagaagaacccggcaggatgagcctgccctgttcgtggccctgaccttcgagcggcgggaggtcctggactcctccaatatcaaaccaatgaacctgatcggcgtggcaagaggcgaaaacatccccgccgtgatcgccctgaccgaccccgagggctgcccactgagccggtttaaggatagcctgggaaacccaacccacatcctgagaatcggcgagagctataaggagaagcagcggaccatccaggccaagaaggaggtggagcagcggagagccggcggctacagccggaagtacgccagcaaagccaagaatctggcagacgatatggtgagaaacaccgctagagatctgctgtactacgccgtgacccaggatgccatgctgatcttcgccaacctgagccggggcttcggccggcagggcaagcggaccttcatggccgagagacagtacacacggatggaggactggctgaccgccaagctggcctacgagggcctgagcaagacctacctgtccaagacactggcccagtacacctccaagacatgcagcaactgtgggtttaccatcaccagcgccgactacgacagggtgctggagaagctgaagaagacagcaacaggctggatgaccacaattaacggcaaggagctgaaggtggagggccagattacctactacaacagatacaagagacagaacgtagtcaaggacctgtccgtcgagctggatagactgagcgaagaatctgtgaacaacgacatctcctcctggacaaagggcagaagcggagaagctctgagcctcctgaagaaaagattctcccatagacccgtgcaggagaagttcgtgtgcctgaactgcggcttcgagacacacgcagccgagcaagccgccctgaacatcgccagatcctggctgttcctgcggagccaggagtacaagaaataccagacaaacaagacaaccggcaacaccgataagagagccttcgtcgagacctggcagtccttttaccggaagaagcttaaggaggtgtggaaacctgccgtgcggtctggcggatctggcggaggctccagccagggcaggctgaccttccaggacgtggccatcgacttcacccaggaggagtgggagtgcctggacctgggccagagggagctgtacagggacgtgatgctggagaactacggcaacctggccagcctgggcctggtgatcagcaagcccgacctggtgaccttcctggagcagatgaaggacccctgggacaccaggaggatggagacccccgccgtgcaccccgccgtgagcagccacggcggcccaagcagcggcgcccctcctcccagcggcggcagcccagccggctccccaacctctaccgaggagggcacctctgagtccgccacccccgagagcggccctggcacctccaccgagcccagcgagggcagcgcacccggcagccctgccggcagccccacctccacagaggagggaaccagcaccgagcccagcgaaggcagcgccccaggcaccagcaccgagcctagtgagcaggagattaaacggatcaacaagatcagaagaagacttgtgaaagacagcaacaccaagaaggccggcaagacaggccccatgaaaaccctgctggttagagtgatgacacccgatctgagagagcggctggaaaacctgagaaagaagcctgaaaatatcccccagcccatcagcaatacatctagagccaacctgaataagctgctgaccgattacaccgaaatgaagaaggcgatcctgcatgtgtactgggaagagttccagaaggaccctgtgggcctgatgagccgggtggcccagcctgccagcaagaagatcgatcagaacaagctgaaacctgagatggacgagaagggcaacctgaccaccgccggctttgcctgctctcagtgtggccagcccctgttcgtgtacaagctggagcaggtgtctgagaagggcaaggcttacaccaactacttcggacggtgcaatgtggccgagcacgaaaagctgatcctgctggcccagctgaagcccgagaaggatagcgacgaagccgtgacatatagcctgggaaagtttgggcagagggccctggatttctacagcattcatgtgaccaaggagtccacccaccccgtgaagcccctggcccagatcgccggaaacagatacgcctccggacctgtgggaaaggccctgagcgacgcatgtatgggcacaatcgcctccttcctgtctaagtaccaggacatcatcatcgaacaccagaaggtggtgaagggcaaccagaagagactggagagcctgcgggagctggccggcaaggaaaacctggaataccctagcgtgaccctgccacctcagcctcacaccaaggagggcgttgatgcctacaacgaagtgatcgcccgggtgcgaatgtgggtgaacctgaacctgtggcagaagctgaagctaagcagagatgatgccaagcctctgctgagactgaagggattcccttcctttcctctggtcgagagacaggccaacgaagtggactggtgggacatggtgtgtaacgtgaagaagctgatcaacgagaaaaaggaggatggcaaggtgttttggcagaatctggctggctacaagagacaggaagccctgagaccatacctgagcagcgaggaagatcggaagaagggaaagaaattcgctcggtaccagctgggcgacctgctgctgcacctggaaaagaagcacggcgaggactggggaaaggtgtacgacgaggcctgggagcggattgacaagaaagtggaaggcctgagcaagcacatcaagctggaagaggaacggagaagcgaggacgcccagagcaaggccgccctgaccgactggctgcgggctaaggccagcttcgtgatcgagggcctgaaggaggccgacaaggacgagttctgcagatgcgagctgaagctgcagaagtggtacggggacctgcggggaaagcccttcgccatcgaagccgagaacagcatcctggacatcagcggcttcagcaagcagtacaactgtgccttcatctggcagaaggacggcgtgaagaagctgaacctgtacctgatcatcaactacttcaagggcggcaagctgcggttcaagaagatcaaacctgaagccttcgaagccaacagattctacaccgtgatcaacaaaaagagcggcgagatcgtgcccatggaggtgaacttcaacttcgacgaccccaacctgatcatcctgcctctggcctttggcaagagacagggcagagaattcatctggaacgacctgctgtccctggaaaccggcagcctgaagctggccaacggaagagtgatcgagaagacactgtacaacagaagaacccggcaggatgagcctgccctgttcgtggccctgaccttcgagcggcgggaggtcctggactcctccaatatcaaaccaatgaacctgatcggcgtggcaagaggcgaaaacatccccgccgtgatcgccctgaccgaccccgagggctgcccactgagccggtttaaggatagcctgggaaacccaacccacatcctgagaatcggcgagagctataaggagaagcagcggaccatccaggccaagaaggaggtggagcagcggagagccggcggctacagccggaagtacgccagcaaagccaagaatctggcagacgatatggtgagaaacaccgctagagatctgctgtactacgccgtgacccaggatgccatgctgatcttcgccaacctgagccggggcttcggccggcagggcaagcggaccttcatggccgagagacagtacacacggatggaggactggctgaccgccaagctggcctacgagggcctgagcaagacctacctgtccaagacactggcccagtacacctccaagacatgcagcaactgtgggtttaccatcaccagcgccgactacgacagggtgctggagaagctgaagaagacagcaacaggctggatgaccacaattaacggcaaggagctgaaggtggagggccagattacctactacaacagatacaagagacagaacgtagtcaaggacctgtccgtcgagctggatagactgagcgaagaatctgtgaacaacgacatctcctcctggacaaagggcagaagcggagaagctctgagcctcctgaagaaaagattctcccatagacccgtgcaggagaagttcgtgtgcctgaactgcggcttcgagacacacgcagccgagcaagccgccctgaacatcgccagatcctggctgttcctgcggagccaggagtacaagaaataccagacaaacaagacaaccggcaacaccgataagagagccttcgtcgagacctggcagtccttttaccggaagaagcttaaggaggtgtggaaacctgccgtgcggtctggcggatctggcggaggctcctagccagggcaggctgaccttccaggacgtggccatcgacttcacccaggaggagtgggagtgcctggacctgggccagagggagctgtacagggacgtgatgctggagaactacggcaacctggccagcctgggcctggtgatcagcaagcccgacctggtgaccttcctggagcagatgaaggacccctgggacaccaggaggatggagacccccgccgtgcaccccgccgtgagcagccacggatctggctccggcagcggccccaagaaaaagagaaaagtctaagctgccttctgcggggcttgccttctggccatgcccttcttctctcccttgcacctgtacctcttggtctttgaataaagcctgagtaggaaggctagcaaaaaaaaaaaaaaaaaaaaaaaaaaaaaaaaaaaaaaaaaaaaaaaaaaaaaaaaaaaaaaaaaaaaaaaaaaaaaaaa

SEQ ID NO: 15967 - RNA, 9485 nt, synthetic construct
  source 1..9485: mol_type = other RNA
aggaaataagagagaaaagaagagtaagaagaaatataagagccaccatggcccctaagaagaagcgtaaagtgagccggatggaacgcctcgtctacgaggtgcggcagaagtgcagaaacatcgaggacatctgcatctcctgcggatctctgaacgtgaccctggagcacccactgttcatcggcggcatgtgccagaactgtaaaaactgttttctggagtgtgcctatcaatacgacgatgacggctaccagagctactgcaccatctgttgcggcggaagagaggtgctgatgtgtggaaataacaactgctgccggtgcttctgcgtggaatgcgtggacctgctggtgggccccggcgccgcccaggccgctattaaggaagatccttggaactgctacatgtgcggccacaagggcacatacggcctgctgagacggagagaggactggcctagcagactgcagatgttcttcgccaataaccacgaccaggagttcgacccccctaaggtgtaccctcccgtccccgccgagaagagaaagcccatccgggtcctgagcctgttcgatggcatcgccaccggtctgctggtgctgaaggacctgggcatccaggtggataggtacattgcctccgaggtgtgcgaggactccatcaccgtgggaatggtgcgtcatcagggcaagatcatgtacgtgggcgacgtgcggagcgtgacacagaagcatatccaggagtggggccctttcgacctggtgatcggcggcagcccttgcaatgacctgagcatcgtgaacccagcccggaagggcctgtacgagggaaccggcagactgttcttcgagttttacagactgctgcacgacgcccggcctaaggaaggcgacgaccggcccttcttttggctgttcgagaatgtggtggccatgggagtcagcgacaagcgggatattagccggttcctggagagcaaccccgtgatgatcgatgccaaggaagtgagcgccgcccaccgggccagatacttctggggcaatctgcctggcatgaacagacccctggccagcaccgtgaacgacaagctggagctgcaggagtgcctggagcacggccggatcgccaagttcagcaaggtgagaaccatcaccacccgaagcaacagcatcaaacaaggcaaggaccagcactttcctgtgttcatgaacgagaaggaggacatcctgtggtgtaccgagatggagagagtgttcgggttcccagtccactacacagatgtcagcaacatgtctagactggccagacagagactgctgggaagaagctggtccgtccctgtgatcagacacctgttcgcccctctgaaggagtacttcgcctgcgtgagcagcggcaacagcaacgccaacagccggggccccagcttctctagcggcctggtgccactgtccctgagagggagccacatgggccccatggagatctacaaaaccgtgagcgcctggaagcggcagcctgtgcgcgtgctgagcctgtttcggaatatcgataaagtcctgaaaagcctgggattcctggagagcggctctggctccggcggtggcaccctgaagtacgtggaggatgtgacaaacgtggtcagacgggatgtggagaagtggggccccttcgatctggtgtacggcagcacccaacccctgggcagctcttgtgaccggtgccctggctggtacatgtttcagttccaccggatcctgcagtacgccctgccgagacaggagtcccagcggccattcttttggattttcatggacaacttgctgctgaccgaggatgaccaggaaactaccactcggttcctgcagaccgaagccgtgaccctgcaggacgtgagaggccgggactaccagaacgccatgcgggtgtggtccaacatccctggactgaaaagcaagcacgcacctctgacccctaaagaagaggagtacctgcaggcccaggtgcggagcagaagcaagctggacgcccctaaggtggatctgctggtgaagaattgcctcctgcccctgagagagtacttcaagtatttcagccagaatagtctgcccctgggaggcagcggcggcggcgccctggtgacatttgaggacgtcgccgtgcggttcacccaggaggaatgggctctgctggatccttctcagaaaatcctgtaccgggacgtgatgagagagacataccggaatctgacctccgtgggcatcaactgggaatgttgggaccttgaagcctgcttcagaagcctgggaagaaacctgagagtgcaggtggtgaagagaaagtgcgagctgaccaacagcggcccctgcgccgagggcggcccaagcagcggcgcccctcctcccagcggcggcagcccagccggctccccaacctctaccgaggagggcacctctgagtccgccacccccgagagcggccctggcacctccaccgagcccagcgagggcagcgcacccggcagccctgccggcagccccacctccacagaggagggaaccagcaccgagcccagcgaaggcagcgccccaggcaccagcaccgagcctagtgagcaggagattaaacggatcaacaagatcagaagaagacttgtgaaagacagcaacaccaagaaggccggcaagacaggccccatgaaaaccctgctggttagagtgatgacacccgatctgagagagcggctggaaaacctgagaaagaagcctgaaaatatcccccagcccatcagcaatacatctagagccaacctgaataagctgctgaccgattacaccgaaatgaagaaggcgatcctgcatgtgtactgggaagagttccagaaggaccctgtgggcctgatgagccgggtggcccagcctgccagcaagaagatcgatcagaacaagctgaaacctgagatggacgagaagggcaacctgaccaccgccggctttgcctgctctcagtgtggccagcccctgttcgtgtacaagctggagcaggtgtctgagaagggcaaggcttacaccaactacttcggacggtgcaatgtggccgagcacgaaaagctgatcctgctggcccagctgaagcccgagaaggatagcgacgaagccgtgacatatagcctgggaaagtttgggcagagggccctggatttctacagcattcatgtgaccaaggagtccacccaccccgtgaagcccctggcccagatcgccggaaacagatacgcctccggacctgtgggaaaggccctgagcgacgcatgtatgggcacaatcgcctccttcctgtctaagtaccaggacatcatcatcgaacaccagaaggtggtgaagggcaaccagaagagactggagagcctgcgggagctggccggcaaggaaaacctggaataccctagcgtgaccctgccacctcagcctcacaccaaggagggcgttgatgcctacaacgaagtgatcgcccgggtgcgaatgtgggtgaacctgaacctgtggcagaagctgaagctaagcagagatgatgccaagcctctgctgagactgaagggattcccttcctttcctctggtcgagagacaggccaacgaagtggactggtgggacatggtgtgtaacgtgaagaagctgatcaacgagaaaaaggaggatggcaaggtgttttggcagaatctggctggctacaagagacaggaagccctgagaccatacctgagcagcgaggaagatcggaagaagggaaagaaattcgctcggtaccagctgggcgacctgctgctgcacctggaaaagaagcacggcgaggactggggaaaggtgtacgacgaggcctgggagcggattgacaagaaagtggaaggcctgagcaagcacatcaagctggaagaggaacggagaagcgaggacgcccagagcaaggccgccctgaccgactggctgcgggctaaggccagcttcgtgatcgagggcctgaaggaggccgacaaggacgagttctgcagatgcgagctgaagctgcagaagtggtacggggacctgcggggaaagcccttcgccatcgaagccgagaacagcatcctggacatcagcggcttcagcaagcagtacaactgtgccttcatctggcagaaggacggcgtgaagaagctgaacctgtacctgatcatcaactacttcaagggcggcaagctgcggttcaagaagatcaaacctgaagccttcgaagccaacagattctacaccgtgatcaacaaaaagagcggcgagatcgtgcccatggaggtgaacttcaacttcgacgaccccaacctgatcatcctgcctctggcctttggcaagagacagggcagagaattcatctggaacgacctgctgtccctggaaaccggcagcctgaagctggccaacggaagagtgatcgagaagacactgtacaacagaagaacccggcaggatgagcctgccctgttcgtggccctgaccttcgagcggcgggaggtcctggactcctccaatatcaaaccaatgaacctgatcggcgtggcaagaggcgaaaacatccccgccgtgatcgccctgaccgaccccgagggctgcccactgagccggtttaaggatagcctgggaaacccaacccacatcctgagaatcggcgagagctataaggagaagcagcggaccatccaggccaagaaggaggtggagcagcggagagccggcggctacagccggaagtacgccagcaaagccaagaatctggcagacgatatggtgagaaacaccgctagagatctgctgtactacgccgtgacccaggatgccatgctgatcttcgccaacctgagccggggcttcggccggcagggcaagcggaccttcatggccgagagacagtacacacggatggaggactggctgaccgccaagctggcctacgagggcctgagcaagacctacctgtccaagacactggcccagtacacctccaagacatgcagcaactgtgggtttaccatcaccagcgccgactacgacagggtgctggagaagctgaagaagacagcaacaggctggatgaccacaattaacggcaaggagctgaaggtggagggccagattacctactacaacagatacaagagacagaacgtagtcaaggacctgtccgtcgagctggatagactgagcgaagaatctgtgaacaacgacatctcctcctggacaaagggcagaagcggagaagctctgagcctcctgaagaaaagattctcccatagacccgtgcaggagaagttcgtgtgcctgaactgcggcttcgagacacacgcagccgagcaagccgccctgaacatcgccagatcctggctgttcctgcggagccaggagtacaagaaataccagacaaacaagacaaccggcaacaccgataagagagccttcgtcgagacctggcagtccttttaccggaagaagcttaaggaggtgtggaaacctgccgtgcggtctggcggatctggcggaggctccatgcaggtgaagttcgaggacgtggccgtgagcttcagccaggaggagtgggagtacctggacgagggccagaaggagctgtacagggaggtgatgaaggagaactacgagaccctgctgagcctgggcctgaagtgcctgcagaagatccacgagagcgacaggcccttcacctaccccgcctgcggcaagagcttcaaccaccagagcaacctgaggaagcacaagaggaaccacaccggcggcggcccaagcagcggcgcccctcctcccagcggcggcagcccagccggctccccaacctctaccgaggagggcacctctgagtccgccacccccgagagcggccctggcacctccaccgagcccagcgagggcagcgcacccggcagccctgccggcagccccacctccacagaggagggaaccagcaccgagcccagcgaaggcagcgccccaggcaccagcaccgagcctagtgagcaggagattaaacggatcaacaagatcagaagaagacttgtgaaagacagcaacaccaagaaggccggcaagacaggccccatgaaaaccctgctggttagagtgatgacacccgatctgagagagcggctggaaaacctgagaaagaagcctgaaaatatcccccagcccatcagcaatacatctagagccaacctgaataagctgctgaccgattacaccgaaatgaagaaggcgatcctgcatgtgtactgggaagagttccagaaggaccctgtgggcctgatgagccgggtggcccagcctgccagcaagaagatcgatcagaacaagctgaaacctgagatggacgagaagggcaacctgaccaccgccggctttgcctgctctcagtgtggccagcccctgttcgtgtacaagctggagcaggtgtctgagaagggcaaggcttacaccaactacttcggacggtgcaatgtggccgagcacgaaaagctgatcctgctggcccagctgaagcccgagaaggatagcgacgaagccgtgacatatagcctgggaaagtttgggcagagggccctggatttctacagcattcatgtgaccaaggagtccacccaccccgtgaagcccctggcccagatcgccggaaacagatacgcctccggacctgtgggaaaggccctgagcgacgcatgtatgggcacaatcgcctccttcctgtctaagtaccaggacatcatcatcgaacaccagaaggtggtgaagggcaaccagaagagactggagagcctgcgggagctggccggcaaggaaaacctggaataccctagcgtgaccctgccacctcagcctcacaccaaggagggcgttgatgcctacaacgaagtgatcgcccgggtgcgaatgtgggtgaacctgaacctgtggcagaagctgaagctaagcagagatgatgccaagcctctgctgagactgaagggattcccttcctttcctctggtcgagagacaggccaacgaagtggactggtgggacatggtgtgtaacgtgaagaagctgatcaacgagaaaaaggaggatggcaaggtgttttggcagaatctggctggctacaagagacaggaagccctgagaccatacctgagcagcgaggaagatcggaagaagggaaagaaattcgctcggtaccagctgggcgacctgctgctgcacctggaaaagaagcacggcgaggactggggaaaggtgtacgacgaggcctgggagcggattgacaagaaagtggaaggcctgagcaagcacatcaagctggaagaggaacggagaagcgaggacgcccagagcaaggccgccctgaccgactggctgcgggctaaggccagcttcgtgatcgagggcctgaaggaggccgacaaggacgagttctgcagatgcgagctgaagctgcagaagtggtacggggacctgcggggaaagcccttcgccatcgaagccgagaacagcatcctggacatcagcggcttcagcaagcagtacaactgtgccttcatctggcagaaggacggcgtgaagaagctgaacctgtacctgatcatcaactacttcaagggcggcaagctgcggttcaagaagatcaaacctgaagccttcgaagccaacagattctacaccgtgatcaacaaaaagagcggcgagatcgtgcccatggaggtgaacttcaacttcgacgaccccaacctgatcatcctgcctctggcctttggcaagagacagggcagagaattcatctggaacgacctgctgtccctggaaaccggcagcctgaagctggccaacggaagagtgatcgagaagacactgtacaacagaagaacccggcaggatgagcctgccctgttcgtggccctgaccttcgagcggcgggaggtcctggactcctccaatatcaaaccaatgaacctgatcggcgtggcaagaggcgaaaacatccccgccgtgatcgccctgaccgaccccgagggctgcccactgagccggtttaaggatagcctgggaaacccaacccacatcctgagaatcggcgagagctataaggagaagcagcggaccatccaggccaagaaggaggtggagcagcggagagccggcggctacagccggaagtacgccagcaaagccaagaatctggcagacgatatggtgagaaacaccgctagagatctgctgtactacgccgtgacccaggatgccatgctgatcttcgccaacctgagccggggcttcggccggcagggcaagcggaccttcatggccgagagacagtacacacggatggaggactggctgaccgccaagctggcctacgagggcctgagcaagacctacctgtccaagacactggcccagtacacctccaagacatgcagcaactgtgggtttaccatcaccagcgccgactacgacagggtgctggagaagctgaagaagacagcaacaggctggatgaccacaattaacggcaaggagctgaaggtggagggccagattacctactacaacagatacaagagacagaacgtagtcaaggacctgtccgtcgagctggatagactgagcgaagaatctgtgaacaacgacatctcctcctggacaaagggcagaagcggagaagctctgagcctcctgaagaaaagattctcccatagacccgtgcaggagaagttcgtgtgcctgaactgcggcttcgagacacacgcagccgagcaagccgccctgaacatcgccagatcctggctgttcctgcggagccaggagtacaagaaataccagacaaacaagacaaccggcaacaccgataagagagccttcgtcgagacctggcagtccttttaccggaagaagcttaaggaggtgtggaaacctgccgtgcggtctggcggatctggcggaggctcctatgcaggtgaagttcgaggacgtggccgtgagcttcagccaggaggagtgggagtacctggacgagggccagaaggagctgtacagggaggtgatgaaggagaactacgagaccctgctgagcctgggcctgaagtgcctgcagaagatccacgagagcgacaggcccttcacctaccccgcctgcggcaagagcttcaaccaccagagcaacctgaggaagcacaagaggaaccacaccggcggatctggctccggcagcggccccaagaaaaagagaaaagtctaagctgccttctgcggggcttgccttctggccatgcccttcttctctcccttgcacctgtacctcttggtctttgaataaagcctgagtaggaaggctagcaaaaaaaaaaaaaaaaaaaaaaaaaaaaaaaaaaaaaaaaaaaaaaaaaaaaaaaaaaaaaaaaaaaaaaaaaaaaaaaa

SEQ ID NO: 15968 - RNA, 9485 nt, synthetic construct
  source 1..9485: mol_type = other RNA
aggaaataagagagaaaagaagagtaagaagaaatataagagccaccatggcccctaagaagaagcgtaaagtgagccggatggaacgcctcgtctacgaggtgcggcagaagtgcagaaacatcgaggacatctgcatctcctgcggatctctgaacgtgaccctggagcacccactgttcatcggcggcatgtgccagaactgtaaaaactgttttctggagtgtgcctatcaatacgacgatgacggctaccagagctactgcaccatctgttgcggcggaagagaggtgctgatgtgtggaaataacaactgctgccggtgcttctgcgtggaatgcgtggacctgctggtgggccccggcgccgcccaggccgctattaaggaagatccttggaactgctacatgtgcggccacaagggcacatacggcctgctgagacggagagaggactggcctagcagactgcagatgttcttcgccaataaccacgaccaggagttcgacccccctaaggtgtaccctcccgtccccgccgagaagagaaagcccatccgggtcctgagcctgttcgatggcatcgccaccggtctgctggtgctgaaggacctgggcatccaggtggataggtacattgcctccgaggtgtgcgaggactccatcaccgtgggaatggtgcgtcatcagggcaagatcatgtacgtgggcgacgtgcggagcgtgacacagaagcatatccaggagtggggccctttcgacctggtgatcggcggcagcccttgcaatgacctgagcatcgtgaacccagcccggaagggcctgtacgagggaaccggcagactgttcttcgagttttacagactgctgcacgacgcccggcctaaggaaggcgacgaccggcccttcttttggctgttcgagaatgtggtggccatgggagtcagcgacaagcgggatattagccggttcctggagagcaaccccgtgatgatcgatgccaaggaagtgagcgccgcccaccgggccagatacttctggggcaatctgcctggcatgaacagacccctggccagcaccgtgaacgacaagctggagctgcaggagtgcctggagcacggccggatcgccaagttcagcaaggtgagaaccatcaccacccgaagcaacagcatcaaacaaggcaaggaccagcactttcctgtgttcatgaacgagaaggaggacatcctgtggtgtaccgagatggagagagtgttcgggttcccagtccactacacagatgtcagcaacatgtctagactggccagacagagactgctgggaagaagctggtccgtccctgtgatcagacacctgttcgcccctctgaaggagtacttcgcctgcgtgagcagcggcaacagcaacgccaacagccggggccccagcttctctagcggcctggtgccactgtccctgagagggagccacatgggccccatggagatctacaaaaccgtgagcgcctggaagcggcagcctgtgcgcgtgctgagcctgtttcggaatatcgataaagtcctgaaaagcctgggattcctggagagcggctctggctccggcggtggcaccctgaagtacgtggaggatgtgacaaacgtggtcagacgggatgtggagaagtggggccccttcgatctggtgtacggcagcacccaacccctgggcagctcttgtgaccggtgccctggctggtacatgtttcagttccaccggatcctgcagtacgccctgccgagacaggagtcccagcggccattcttttggattttcatggacaacttgctgctgaccgaggatgaccaggaaactaccactcggttcctgcagaccgaagccgtgaccctgcaggacgtgagaggccgggactaccagaacgccatgcgggtgtggtccaacatccctggactgaaaagcaagcacgcacctctgacccctaaagaagaggagtacctgcaggcccaggtgcggagcagaagcaagctggacgcccctaaggtggatctgctggtgaagaattgcctcctgcccctgagagagtacttcaagtatttcagccagaatagtctgcccctgggaggcagcggcggcggcgccctggtgacatttgaggacgtcgccgtgcggttcacccaggaggaatgggctctgctggatccttctcagaaaatcctgtaccgggacgtgatgagagagacataccggaatctgacctccgtgggcatcaactgggaatgttgggaccttgaagcctgcttcagaagcctgggaagaaacctgagagtgcaggtggtgaagagaaagtgcgagctgaccaacagcggcccctgcgccgagggcggcccaagcagcggcgcccctcctcccagcggcggcagcccagccggctccccaacctctaccgaggagggcacctctgagtccgccacccccgagagcggccctggcacctccaccgagcccagcgagggcagcgcacccggcagccctgccggcagccccacctccacagaggagggaaccagcaccgagcccagcgaaggcagcgccccaggcaccagcaccgagcctagtgagcaggagattaaacggatcaacaagatcagaagaagacttgtgaaagacagcaacaccaagaaggccggcaagacaggccccatgaaaaccctgctggttagagtgatgacacccgatctgagagagcggctggaaaacctgagaaagaagcctgaaaatatcccccagcccatcagcaatacatctagagccaacctgaataagctgctgaccgattacaccgaaatgaagaaggcgatcctgcatgtgtactgggaagagttccagaaggaccctgtgggcctgatgagccgggtggcccagcctgccagcaagaagatcgatcagaacaagctgaaacctgagatggacgagaagggcaacctgaccaccgccggctttgcctgctctcagtgtggccagcccctgttcgtgtacaagctggagcaggtgtctgagaagggcaaggcttacaccaactacttcggacggtgcaatgtggccgagcacgaaaagctgatcctgctggcccagctgaagcccgagaaggatagcgacgaagccgtgacatatagcctgggaaagtttgggcagagggccctggatttctacagcattcatgtgaccaaggagtccacccaccccgtgaagcccctggcccagatcgccggaaacagatacgcctccggacctgtgggaaaggccctgagcgacgcatgtatgggcacaatcgcctccttcctgtctaagtaccaggacatcatcatcgaacaccagaaggtggtgaagggcaaccagaagagactggagagcctgcgggagctggccggcaaggaaaacctggaataccctagcgtgaccctgccacctcagcctcacaccaaggagggcgttgatgcctacaacgaagtgatcgcccgggtgcgaatgtgggtgaacctgaacctgtggcagaagctgaagctaagcagagatgatgccaagcctctgctgagactgaagggattcccttcctttcctctggtcgagagacaggccaacgaagtggactggtgggacatggtgtgtaacgtgaagaagctgatcaacgagaaaaaggaggatggcaaggtgttttggcagaatctggctggctacaagagacaggaagccctgagaccatacctgagcagcgaggaagatcggaagaagggaaagaaattcgctcggtaccagctgggcgacctgctgctgcacctggaaaagaagcacggcgaggactggggaaaggtgtacgacgaggcctgggagcggattgacaagaaagtggaaggcctgagcaagcacatcaagctggaagaggaacggagaagcgaggacgcccagagcaaggccgccctgaccgactggctgcgggctaaggccagcttcgtgatcgagggcctgaaggaggccgacaaggacgagttctgcagatgcgagctgaagctgcagaagtggtacggggacctgcggggaaagcccttcgccatcgaagccgagaacagcatcctggacatcagcggcttcagcaagcagtacaactgtgccttcatctggcagaaggacggcgtgaagaagctgaacctgtacctgatcatcaactacttcaagggcggcaagctgcggttcaagaagatcaaacctgaagccttcgaagccaacagattctacaccgtgatcaacaaaaagagcggcgagatcgtgcccatggaggtgaacttcaacttcgacgaccccaacctgatcatcctgcctctggcctttggcaagagacagggcagagaattcatctggaacgacctgctgtccctggaaaccggcagcctgaagctggccaacggaagagtgatcgagaagacactgtacaacagaagaacccggcaggatgagcctgccctgttcgtggccctgaccttcgagcggcgggaggtcctggactcctccaatatcaaaccaatgaacctgatcggcgtggcaagaggcgaaaacatccccgccgtgatcgccctgaccgaccccgagggctgcccactgagccggtttaaggatagcctgggaaacccaacccacatcctgagaatcggcgagagctataaggagaagcagcggaccatccaggccaagaaggaggtggagcagcggagagccggcggctacagccggaagtacgccagcaaagccaagaatctggcagacgatatggtgagaaacaccgctagagatctgctgtactacgccgtgacccaggatgccatgctgatcttcgccaacctgagccggggcttcggccggcagggcaagcggaccttcatggccgagagacagtacacacggatggaggactggctgaccgccaagctggcctacgagggcctgagcaagacctacctgtccaagacactggcccagtacacctccaagacatgcagcaactgtgggtttaccatcaccagcgccgactacgacagggtgctggagaagctgaagaagacagcaacaggctggatgaccacaattaacggcaaggagctgaaggtggagggccagattacctactacaacagatacaagagacagaacgtagtcaaggacctgtccgtcgagctggatagactgagcgaagaatctgtgaacaacgacatctcctcctggacaaagggcagaagcggagaagctctgagcctcctgaagaaaagattctcccatagacccgtgcaggagaagttcgtgtgcctgaactgcggcttcgagacacacgcagccgagcaagccgccctgaacatcgccagatcctggctgttcctgcggagccaggagtacaagaaataccagacaaacaagacaaccggcaacaccgataagagagccttcgtcgagacctggcagtccttttaccggaagaagcttaaggaggtgtggaaacctgccgtgcggtctggcggatctggcggaggctccaggaagaggggcagcctgaccctggaggacgtggccgtggacttcacctgggaggagtggcagctgctggcccccgcccagaaggccctgtacagggacgtgatgctggagaactacggcaacctggtgttcgtgggctaccaggccagcaagcccgccgccctgagcaggctggagaggggcgagccctggcccgtggaggacgaggtgcacagccagctgtgccccgagatgaggaaggacggcggcccaagcagcggcgcccctcctcccagcggcggcagcccagccggctccccaacctctaccgaggagggcacctctgagtccgccacccccgagagcggccctggcacctccaccgagcccagcgagggcagcgcacccggcagccctgccggcagccccacctccacagaggagggaaccagcaccgagcccagcgaaggcagcgccccaggcaccagcaccgagcctagtgagcaggagattaaacggatcaacaagatcagaagaagacttgtgaaagacagcaacaccaagaaggccggcaagacaggccccatgaaaaccctgctggttagagtgatgacacccgatctgagagagcggctggaaaacctgagaaagaagcctgaaaatatcccccagcccatcagcaatacatctagagccaacctgaataagctgctgaccgattacaccgaaatgaagaaggcgatcctgcatgtgtactgggaagagttccagaaggaccctgtgggcctgatgagccgggtggcccagcctgccagcaagaagatcgatcagaacaagctgaaacctgagatggacgagaagggcaacctgaccaccgccggctttgcctgctctcagtgtggccagcccctgttcgtgtacaagctggagcaggtgtctgagaagggcaaggcttacaccaactacttcggacggtgcaatgtggccgagcacgaaaagctgatcctgctggcccagctgaagcccgagaaggatagcgacgaagccgtgacatatagcctgggaaagtttgggcagagggccctggatttctacagcattcatgtgaccaaggagtccacccaccccgtgaagcccctggcccagatcgccggaaacagatacgcctccggacctgtgggaaaggccctgagcgacgcatgtatgggcacaatcgcctccttcctgtctaagtaccaggacatcatcatcgaacaccagaaggtggtgaagggcaaccagaagagactggagagcctgcgggagctggccggcaaggaaaacctggaataccctagcgtgaccctgccacctcagcctcacaccaaggagggcgttgatgcctacaacgaagtgatcgcccgggtgcgaatgtgggtgaacctgaacctgtggcagaagctgaagctaagcagagatgatgccaagcctctgctgagactgaagggattcccttcctttcctctggtcgagagacaggccaacgaagtggactggtgggacatggtgtgtaacgtgaagaagctgatcaacgagaaaaaggaggatggcaaggtgttttggcagaatctggctggctacaagagacaggaagccctgagaccatacctgagcagcgaggaagatcggaagaagggaaagaaattcgctcggtaccagctgggcgacctgctgctgcacctggaaaagaagcacggcgaggactggggaaaggtgtacgacgaggcctgggagcggattgacaagaaagtggaaggcctgagcaagcacatcaagctggaagaggaacggagaagcgaggacgcccagagcaaggccgccctgaccgactggctgcgggctaaggccagcttcgtgatcgagggcctgaaggaggccgacaaggacgagttctgcagatgcgagctgaagctgcagaagtggtacggggacctgcggggaaagcccttcgccatcgaagccgagaacagcatcctggacatcagcggcttcagcaagcagtacaactgtgccttcatctggcagaaggacggcgtgaagaagctgaacctgtacctgatcatcaactacttcaagggcggcaagctgcggttcaagaagatcaaacctgaagccttcgaagccaacagattctacaccgtgatcaacaaaaagagcggcgagatcgtgcccatggaggtgaacttcaacttcgacgaccccaacctgatcatcctgcctctggcctttggcaagagacagggcagagaattcatctggaacgacctgctgtccctggaaaccggcagcctgaagctggccaacggaagagtgatcgagaagacactgtacaacagaagaacccggcaggatgagcctgccctgttcgtggccctgaccttcgagcggcgggaggtcctggactcctccaatatcaaaccaatgaacctgatcggcgtggcaagaggcgaaaacatccccgccgtgatcgccctgaccgaccccgagggctgcccactgagccggtttaaggatagcctgggaaacccaacccacatcctgagaatcggcgagagctataaggagaagcagcggaccatccaggccaagaaggaggtggagcagcggagagccggcggctacagccggaagtacgccagcaaagccaagaatctggcagacgatatggtgagaaacaccgctagagatctgctgtactacgccgtgacccaggatgccatgctgatcttcgccaacctgagccggggcttcggccggcagggcaagcggaccttcatggccgagagacagtacacacggatggaggactggctgaccgccaagctggcctacgagggcctgagcaagacctacctgtccaagacactggcccagtacacctccaagacatgcagcaactgtgggtttaccatcaccagcgccgactacgacagggtgctggagaagctgaagaagacagcaacaggctggatgaccacaattaacggcaaggagctgaaggtggagggccagattacctactacaacagatacaagagacagaacgtagtcaaggacctgtccgtcgagctggatagactgagcgaagaatctgtgaacaacgacatctcctcctggacaaagggcagaagcggagaagctctgagcctcctgaagaaaagattctcccatagacccgtgcaggagaagttcgtgtgcctgaactgcggcttcgagacacacgcagccgagcaagccgccctgaacatcgccagatcctggctgttcctgcggagccaggagtacaagaaataccagacaaacaagacaaccggcaacaccgataagagagccttcgtcgagacctggcagtccttttaccggaagaagcttaaggaggtgtggaaacctgccgtgcggtctggcggatctggcggaggctcctaggaagaggggcagcctgaccctggaggacgtggccgtggacttcacctgggaggagtggcagctgctggcccccgcccagaaggccctgtacagggacgtgatgctggagaactacggcaacctggtgttcgtgggctaccaggccagcaagcccgccgccctgagcaggctggagaggggcgagccctggcccgtggaggacgaggtgcacagccagctgtgccccgagatgaggaaggacggatctggctccggcagcggccccaagaaaaagagaaaagtctaagctgccttctgcggggcttgccttctggccatgcccttcttctctcccttgcacctgtacctcttggtctttgaataaagcctgagtaggaaggctagcaaaaaaaaaaaaaaaaaaaaaaaaaaaaaaaaaaaaaaaaaaaaaaaaaaaaaaaaaaaaaaaaaaaaaaaaaaaaaaaa

SEQ ID NO: 15969 - RNA, 9485 nt, synthetic construct
  source 1..9485: mol_type = other RNA
aggaaataagagagaaaagaagagtaagaagaaatataagagccaccatggcccctaagaagaagcgtaaagtgagccggatggaacgcctcgtctacgaggtgcggcagaagtgcagaaacatcgaggacatctgcatctcctgcggatctctgaacgtgaccctggagcacccactgttcatcggcggcatgtgccagaactgtaaaaactgttttctggagtgtgcctatcaatacgacgatgacggctaccagagctactgcaccatctgttgcggcggaagagaggtgctgatgtgtggaaataacaactgctgccggtgcttctgcgtggaatgcgtggacctgctggtgggccccggcgccgcccaggccgctattaaggaagatccttggaactgctacatgtgcggccacaagggcacatacggcctgctgagacggagagaggactggcctagcagactgcagatgttcttcgccaataaccacgaccaggagttcgacccccctaaggtgtaccctcccgtccccgccgagaagagaaagcccatccgggtcctgagcctgttcgatggcatcgccaccggtctgctggtgctgaaggacctgggcatccaggtggataggtacattgcctccgaggtgtgcgaggactccatcaccgtgggaatggtgcgtcatcagggcaagatcatgtacgtgggcgacgtgcggagcgtgacacagaagcatatccaggagtggggccctttcgacctggtgatcggcggcagcccttgcaatgacctgagcatcgtgaacccagcccggaagggcctgtacgagggaaccggcagactgttcttcgagttttacagactgctgcacgacgcccggcctaaggaaggcgacgaccggcccttcttttggctgttcgagaatgtggtggccatgggagtcagcgacaagcgggatattagccggttcctggagagcaaccccgtgatgatcgatgccaaggaagtgagcgccgcccaccgggccagatacttctggggcaatctgcctggcatgaacagacccctggccagcaccgtgaacgacaagctggagctgcaggagtgcctggagcacggccggatcgccaagttcagcaaggtgagaaccatcaccacccgaagcaacagcatcaaacaaggcaaggaccagcactttcctgtgttcatgaacgagaaggaggacatcctgtggtgtaccgagatggagagagtgttcgggttcccagtccactacacagatgtcagcaacatgtctagactggccagacagagactgctgggaagaagctggtccgtccctgtgatcagacacctgttcgcccctctgaaggagtacttcgcctgcgtgagcagcggcaacagcaacgccaacagccggggccccagcttctctagcggcctggtgccactgtccctgagagggagccacatgggccccatggagatctacaaaaccgtgagcgcctggaagcggcagcctgtgcgcgtgctgagcctgtttcggaatatcgataaagtcctgaaaagcctgggattcctggagagcggctctggctccggcggtggcaccctgaagtacgtggaggatgtgacaaacgtggtcagacgggatgtggagaagtggggccccttcgatctggtgtacggcagcacccaacccctgggcagctcttgtgaccggtgccctggctggtacatgtttcagttccaccggatcctgcagtacgccctgccgagacaggagtcccagcggccattcttttggattttcatggacaacttgctgctgaccgaggatgaccaggaaactaccactcggttcctgcagaccgaagccgtgaccctgcaggacgtgagaggccgggactaccagaacgccatgcgggtgtggtccaacatccctggactgaaaagcaagcacgcacctctgacccctaaagaagaggagtacctgcaggcccaggtgcggagcagaagcaagctggacgcccctaaggtggatctgctggtgaagaattgcctcctgcccctgagagagtacttcaagtatttcagccagaatagtctgcccctgggaggcagcggcggcggcgccctggtgacatttgaggacgtcgccgtgcggttcacccaggaggaatgggctctgctggatccttctcagaaaatcctgtaccgggacgtgatgagagagacataccggaatctgacctccgtgggcatcaactgggaatgttgggaccttgaagcctgcttcagaagcctgggaagaaacctgagagtgcaggtggtgaagagaaagtgcgagctgaccaacagcggcccctgcgccgagggcggcccaagcagcggcgcccctcctcccagcggcggcagcccagccggctccccaacctctaccgaggagggcacctctgagtccgccacccccgagagcggccctggcacctccaccgagcccagcgagggcagcgcacccggcagccctgccggcagccccacctccacagaggagggaaccagcaccgagcccagcgaaggcagcgccccaggcaccagcaccgagcctagtgagcaggagattaaacggatcaacaagatcagaagaagacttgtgaaagacagcaacaccaagaaggccggcaagacaggccccatgaaaaccctgctggttagagtgatgacacccgatctgagagagcggctggaaaacctgagaaagaagcctgaaaatatcccccagcccatcagcaatacatctagagccaacctgaataagctgctgaccgattacaccgaaatgaagaaggcgatcctgcatgtgtactgggaagagttccagaaggaccctgtgggcctgatgagccgggtggcccagcctgccagcaagaagatcgatcagaacaagctgaaacctgagatggacgagaagggcaacctgaccaccgccggctttgcctgctctcagtgtggccagcccctgttcgtgtacaagctggagcaggtgtctgagaagggcaaggcttacaccaactacttcggacggtgcaatgtggccgagcacgaaaagctgatcctgctggcccagctgaagcccgagaaggatagcgacgaagccgtgacatatagcctgggaaagtttgggcagagggccctggatttctacagcattcatgtgaccaaggagtccacccaccccgtgaagcccctggcccagatcgccggaaacagatacgcctccggacctgtgggaaaggccctgagcgacgcatgtatgggcacaatcgcctccttcctgtctaagtaccaggacatcatcatcgaacaccagaaggtggtgaagggcaaccagaagagactggagagcctgcgggagctggccggcaaggaaaacctggaataccctagcgtgaccctgccacctcagcctcacaccaaggagggcgttgatgcctacaacgaagtgatcgcccgggtgcgaatgtgggtgaacctgaacctgtggcagaagctgaagctaagcagagatgatgccaagcctctgctgagactgaagggattcccttcctttcctctggtcgagagacaggccaacgaagtggactggtgggacatggtgtgtaacgtgaagaagctgatcaacgagaaaaaggaggatggcaaggtgttttggcagaatctggctggctacaagagacaggaagccctgagaccatacctgagcagcgaggaagatcggaagaagggaaagaaattcgctcggtaccagctgggcgacctgctgctgcacctggaaaagaagcacggcgaggactggggaaaggtgtacgacgaggcctgggagcggattgacaagaaagtggaaggcctgagcaagcacatcaagctggaagaggaacggagaagcgaggacgcccagagcaaggccgccctgaccgactggctgcgggctaaggccagcttcgtgatcgagggcctgaaggaggccgacaaggacgagttctgcagatgcgagctgaagctgcagaagtggtacggggacctgcggggaaagcccttcgccatcgaagccgagaacagcatcctggacatcagcggcttcagcaagcagtacaactgtgccttcatctggcagaaggacggcgtgaagaagctgaacctgtacctgatcatcaactacttcaagggcggcaagctgcggttcaagaagatcaaacctgaagccttcgaagccaacagattctacaccgtgatcaacaaaaagagcggcgagatcgtgcccatggaggtgaacttcaacttcgacgaccccaacctgatcatcctgcctctggcctttggcaagagacagggcagagaattcatctggaacgacctgctgtccctggaaaccggcagcctgaagctggccaacggaagagtgatcgagaagacactgtacaacagaagaacccggcaggatgagcctgccctgttcgtggccctgaccttcgagcggcgggaggtcctggactcctccaatatcaaaccaatgaacctgatcggcgtggcaagaggcgaaaacatccccgccgtgatcgccctgaccgaccccgagggctgcccactgagccggtttaaggatagcctgggaaacccaacccacatcctgagaatcggcgagagctataaggagaagcagcggaccatccaggccaagaaggaggtggagcagcggagagccggcggctacagccggaagtacgccagcaaagccaagaatctggcagacgatatggtgagaaacaccgctagagatctgctgtactacgccgtgacccaggatgccatgctgatcttcgccaacctgagccggggcttcggccggcagggcaagcggaccttcatggccgagagacagtacacacggatggaggactggctgaccgccaagctggcctacgagggcctgagcaagacctacctgtccaagacactggcccagtacacctccaagacatgcagcaactgtgggtttaccatcaccagcgccgactacgacagggtgctggagaagctgaagaagacagcaacaggctggatgaccacaattaacggcaaggagctgaaggtggagggccagattacctactacaacagatacaagagacagaacgtagtcaaggacctgtccgtcgagctggatagactgagcgaagaatctgtgaacaacgacatctcctcctggacaaagggcagaagcggagaagctctgagcctcctgaagaaaagattctcccatagacccgtgcaggagaagttcgtgtgcctgaactgcggcttcgagacacacgcagccgagcaagccgccctgaacatcgccagatcctggctgttcctgcggagccaggagtacaagaaataccagacaaacaagacaaccggcaacaccgataagagagccttcgtcgagacctggcagtccttttaccggaagaagcttaaggaggtgtggaaacctgccgtgcggtctggcggatctggcggaggctccagcatgggcagcgacctgttcagggacgtggccgtggtgttcagcagggaggagtgggagaggctggcccccgcccagagggacctgtacagggacgtgatgctggagacctacagccacctgaggagcctggacctggccatcagcaagcccgacgtgatcgccttcctggagcagggcgaggagccctggagggccgaggaggccgccagggacggcctgtgccccgtggactgggagtgcggcggcccaagcagcggcgcccctcctcccagcggcggcagcccagccggctccccaacctctaccgaggagggcacctctgagtccgccacccccgagagcggccctggcacctccaccgagcccagcgagggcagcgcacccggcagccctgccggcagccccacctccacagaggagggaaccagcaccgagcccagcgaaggcagcgccccaggcaccagcaccgagcctagtgagcaggagattaaacggatcaacaagatcagaagaagacttgtgaaagacagcaacaccaagaaggccggcaagacaggccccatgaaaaccctgctggttagagtgatgacacccgatctgagagagcggctggaaaacctgagaaagaagcctgaaaatatcccccagcccatcagcaatacatctagagccaacctgaataagctgctgaccgattacaccgaaatgaagaaggcgatcctgcatgtgtactgggaagagttccagaaggaccctgtgggcctgatgagccgggtggcccagcctgccagcaagaagatcgatcagaacaagctgaaacctgagatggacgagaagggcaacctgaccaccgccggctttgcctgctctcagtgtggccagcccctgttcgtgtacaagctggagcaggtgtctgagaagggcaaggcttacaccaactacttcggacggtgcaatgtggccgagcacgaaaagctgatcctgctggcccagctgaagcccgagaaggatagcgacgaagccgtgacatatagcctgggaaagtttgggcagagggccctggatttctacagcattcatgtgaccaaggagtccacccaccccgtgaagcccctggcccagatcgccggaaacagatacgcctccggacctgtgggaaaggccctgagcgacgcatgtatgggcacaatcgcctccttcctgtctaagtaccaggacatcatcatcgaacaccagaaggtggtgaagggcaaccagaagagactggagagcctgcgggagctggccggcaaggaaaacctggaataccctagcgtgaccctgccacctcagcctcacaccaaggagggcgttgatgcctacaacgaagtgatcgcccgggtgcgaatgtgggtgaacctgaacctgtggcagaagctgaagctaagcagagatgatgccaagcctctgctgagactgaagggattcccttcctttcctctggtcgagagacaggccaacgaagtggactggtgggacatggtgtgtaacgtgaagaagctgatcaacgagaaaaaggaggatggcaaggtgttttggcagaatctggctggctacaagagacaggaagccctgagaccatacctgagcagcgaggaagatcggaagaagggaaagaaattcgctcggtaccagctgggcgacctgctgctgcacctggaaaagaagcacggcgaggactggggaaaggtgtacgacgaggcctgggagcggattgacaagaaagtggaaggcctgagcaagcacatcaagctggaagaggaacggagaagcgaggacgcccagagcaaggccgccctgaccgactggctgcgggctaaggccagcttcgtgatcgagggcctgaaggaggccgacaaggacgagttctgcagatgcgagctgaagctgcagaagtggtacggggacctgcggggaaagcccttcgccatcgaagccgagaacagcatcctggacatcagcggcttcagcaagcagtacaactgtgccttcatctggcagaaggacggcgtgaagaagctgaacctgtacctgatcatcaactacttcaagggcggcaagctgcggttcaagaagatcaaacctgaagccttcgaagccaacagattctacaccgtgatcaacaaaaagagcggcgagatcgtgcccatggaggtgaacttcaacttcgacgaccccaacctgatcatcctgcctctggcctttggcaagagacagggcagagaattcatctggaacgacctgctgtccctggaaaccggcagcctgaagctggccaacggaagagtgatcgagaagacactgtacaacagaagaacccggcaggatgagcctgccctgttcgtggccctgaccttcgagcggcgggaggtcctggactcctccaatatcaaaccaatgaacctgatcggcgtggcaagaggcgaaaacatccccgccgtgatcgccctgaccgaccccgagggctgcccactgagccggtttaaggatagcctgggaaacccaacccacatcctgagaatcggcgagagctataaggagaagcagcggaccatccaggccaagaaggaggtggagcagcggagagccggcggctacagccggaagtacgccagcaaagccaagaatctggcagacgatatggtgagaaacaccgctagagatctgctgtactacgccgtgacccaggatgccatgctgatcttcgccaacctgagccggggcttcggccggcagggcaagcggaccttcatggccgagagacagtacacacggatggaggactggctgaccgccaagctggcctacgagggcctgagcaagacctacctgtccaagacactggcccagtacacctccaagacatgcagcaactgtgggtttaccatcaccagcgccgactacgacagggtgctggagaagctgaagaagacagcaacaggctggatgaccacaattaacggcaaggagctgaaggtggagggccagattacctactacaacagatacaagagacagaacgtagtcaaggacctgtccgtcgagctggatagactgagcgaagaatctgtgaacaacgacatctcctcctggacaaagggcagaagcggagaagctctgagcctcctgaagaaaagattctcccatagacccgtgcaggagaagttcgtgtgcctgaactgcggcttcgagacacacgcagccgagcaagccgccctgaacatcgccagatcctggctgttcctgcggagccaggagtacaagaaataccagacaaacaagacaaccggcaacaccgataagagagccttcgtcgagacctggcagtccttttaccggaagaagcttaaggaggtgtggaaacctgccgtgcggtctggcggatctggcggaggctcctagcatgggcagcgacctgttcagggacgtggccgtggtgttcagcagggaggagtgggagaggctggcccccgcccagagggacctgtacagggacgtgatgctggagacctacagccacctgaggagcctggacctggccatcagcaagcccgacgtgatcgccttcctggagcagggcgaggagccctggagggccgaggaggccgccagggacggcctgtgccccgtggactgggagtgcggatctggctccggcagcggccccaagaaaaagagaaaagtctaagctgccttctgcggggcttgccttctggccatgcccttcttctctcccttgcacctgtacctcttggtctttgaataaagcctgagtaggaaggctagcaaaaaaaaaaaaaaaaaaaaaaaaaaaaaaaaaaaaaaaaaaaaaaaaaaaaaaaaaaaaaaaaaaaaaaaaaaaaaaaa

SEQ ID NO: 15970 - RNA, 9485 nt, synthetic construct
  source 1..9485: mol_type = other RNA
aggaaataagagagaaaagaagagtaagaagaaatataagagccaccatggcccctaagaagaagcgtaaagtgagccggatggaacgcctcgtctacgaggtgcggcagaagtgcagaaacatcgaggacatctgcatctcctgcggatctctgaacgtgaccctggagcacccactgttcatcggcggcatgtgccagaactgtaaaaactgttttctggagtgtgcctatcaatacgacgatgacggctaccagagctactgcaccatctgttgcggcggaagagaggtgctgatgtgtggaaataacaactgctgccggtgcttctgcgtggaatgcgtggacctgctggtgggccccggcgccgcccaggccgctattaaggaagatccttggaactgctacatgtgcggccacaagggcacatacggcctgctgagacggagagaggactggcctagcagactgcagatgttcttcgccaataaccacgaccaggagttcgacccccctaaggtgtaccctcccgtccccgccgagaagagaaagcccatccgggtcctgagcctgttcgatggcatcgccaccggtctgctggtgctgaaggacctgggcatccaggtggataggtacattgcctccgaggtgtgcgaggactccatcaccgtgggaatggtgcgtcatcagggcaagatcatgtacgtgggcgacgtgcggagcgtgacacagaagcatatccaggagtggggccctttcgacctggtgatcggcggcagcccttgcaatgacctgagcatcgtgaacccagcccggaagggcctgtacgagggaaccggcagactgttcttcgagttttacagactgctgcacgacgcccggcctaaggaaggcgacgaccggcccttcttttggctgttcgagaatgtggtggccatgggagtcagcgacaagcgggatattagccggttcctggagagcaaccccgtgatgatcgatgccaaggaagtgagcgccgcccaccgggccagatacttctggggcaatctgcctggcatgaacagacccctggccagcaccgtgaacgacaagctggagctgcaggagtgcctggagcacggccggatcgccaagttcagcaaggtgagaaccatcaccacccgaagcaacagcatcaaacaaggcaaggaccagcactttcctgtgttcatgaacgagaaggaggacatcctgtggtgtaccgagatggagagagtgttcgggttcccagtccactacacagatgtcagcaacatgtctagactggccagacagagactgctgggaagaagctggtccgtccctgtgatcagacacctgttcgcccctctgaaggagtacttcgcctgcgtgagcagcggcaacagcaacgccaacagccggggccccagcttctctagcggcctggtgccactgtccctgagagggagccacatgggccccatggagatctacaaaaccgtgagcgcctggaagcggcagcctgtgcgcgtgctgagcctgtttcggaatatcgataaagtcctgaaaagcctgggattcctggagagcggctctggctccggcggtggcaccctgaagtacgtggaggatgtgacaaacgtggtcagacgggatgtggagaagtggggccccttcgatctggtgtacggcagcacccaacccctgggcagctcttgtgaccggtgccctggctggtacatgtttcagttccaccggatcctgcagtacgccctgccgagacaggagtcccagcggccattcttttggattttcatggacaacttgctgctgaccgaggatgaccaggaaactaccactcggttcctgcagaccgaagccgtgaccctgcaggacgtgagaggccgggactaccagaacgccatgcgggtgtggtccaacatccctggactgaaaagcaagcacgcacctctgacccctaaagaagaggagtacctgcaggcccaggtgcggagcagaagcaagctggacgcccctaaggtggatctgctggtgaagaattgcctcctgcccctgagagagtacttcaagtatttcagccagaatagtctgcccctgggaggcagcggcggcggcgccctggtgacatttgaggacgtcgccgtgcggttcacccaggaggaatgggctctgctggatccttctcagaaaatcctgtaccgggacgtgatgagagagacataccggaatctgacctccgtgggcatcaactgggaatgttgggaccttgaagcctgcttcagaagcctgggaagaaacctgagagtgcaggtggtgaagagaaagtgcgagctgaccaacagcggcccctgcgccgagggcggcccaagcagcggcgcccctcctcccagcggcggcagcccagccggctccccaacctctaccgaggagggcacctctgagtccgccacccccgagagcggccctggcacctccaccgagcccagcgagggcagcgcacccggcagccctgccggcagccccacctccacagaggagggaaccagcaccgagcccagcgaaggcagcgccccaggcaccagcaccgagcctagtgagcaggagattaaacggatcaacaagatcagaagaagacttgtgaaagacagcaacaccaagaaggccggcaagacaggccccatgaaaaccctgctggttagagtgatgacacccgatctgagagagcggctggaaaacctgagaaagaagcctgaaaatatcccccagcccatcagcaatacatctagagccaacctgaataagctgctgaccgattacaccgaaatgaagaaggcgatcctgcatgtgtactgggaagagttccagaaggaccctgtgggcctgatgagccgggtggcccagcctgccagcaagaagatcgatcagaacaagctgaaacctgagatggacgagaagggcaacctgaccaccgccggctttgcctgctctcagtgtggccagcccctgttcgtgtacaagctggagcaggtgtctgagaagggcaaggcttacaccaactacttcggacggtgcaatgtggccgagcacgaaaagctgatcctgctggcccagctgaagcccgagaaggatagcgacgaagccgtgacatatagcctgggaaagtttgggcagagggccctggatttctacagcattcatgtgaccaaggagtccacccaccccgtgaagcccctggcccagatcgccggaaacagatacgcctccggacctgtgggaaaggccctgagcgacgcatgtatgggcacaatcgcctccttcctgtctaagtaccaggacatcatcatcgaacaccagaaggtggtgaagggcaaccagaagagactggagagcctgcgggagctggccggcaaggaaaacctggaataccctagcgtgaccctgccacctcagcctcacaccaaggagggcgttgatgcctacaacgaagtgatcgcccgggtgcgaatgtgggtgaacctgaacctgtggcagaagctgaagctaagcagagatgatgccaagcctctgctgagactgaagggattcccttcctttcctctggtcgagagacaggccaacgaagtggactggtgggacatggtgtgtaacgtgaagaagctgatcaacgagaaaaaggaggatggcaaggtgttttggcagaatctggctggctacaagagacaggaagccctgagaccatacctgagcagcgaggaagatcggaagaagggaaagaaattcgctcggtaccagctgggcgacctgctgctgcacctggaaaagaagcacggcgaggactggggaaaggtgtacgacgaggcctgggagcggattgacaagaaagtggaaggcctgagcaagcacatcaagctggaagaggaacggagaagcgaggacgcccagagcaaggccgccctgaccgactggctgcgggctaaggccagcttcgtgatcgagggcctgaaggaggccgacaaggacgagttctgcagatgcgagctgaagctgcagaagtggtacggggacctgcggggaaagcccttcgccatcgaagccgagaacagcatcctggacatcagcggcttcagcaagcagtacaactgtgccttcatctggcagaaggacggcgtgaagaagctgaacctgtacctgatcatcaactacttcaagggcggcaagctgcggttcaagaagatcaaacctgaagccttcgaagccaacagattctacaccgtgatcaacaaaaagagcggcgagatcgtgcccatggaggtgaacttcaacttcgacgaccccaacctgatcatcctgcctctggcctttggcaagagacagggcagagaattcatctggaacgacctgctgtccctggaaaccggcagcctgaagctggccaacggaagagtgatcgagaagacactgtacaacagaagaacccggcaggatgagcctgccctgttcgtggccctgaccttcgagcggcgggaggtcctggactcctccaatatcaaaccaatgaacctgatcggcgtggcaagaggcgaaaacatccccgccgtgatcgccctgaccgaccccgagggctgcccactgagccggtttaaggatagcctgggaaacccaacccacatcctgagaatcggcgagagctataaggagaagcagcggaccatccaggccaagaaggaggtggagcagcggagagccggcggctacagccggaagtacgccagcaaagccaagaatctggcagacgatatggtgagaaacaccgctagagatctgctgtactacgccgtgacccaggatgccatgctgatcttcgccaacctgagccggggcttcggccggcagggcaagcggaccttcatggccgagagacagtacacacggatggaggactggctgaccgccaagctggcctacgagggcctgagcaagacctacctgtccaagacactggcccagtacacctccaagacatgcagcaactgtgggtttaccatcaccagcgccgactacgacagggtgctggagaagctgaagaagacagcaacaggctggatgaccacaattaacggcaaggagctgaaggtggagggccagattacctactacaacagatacaagagacagaacgtagtcaaggacctgtccgtcgagctggatagactgagcgaagaatctgtgaacaacgacatctcctcctggacaaagggcagaagcggagaagctctgagcctcctgaagaaaagattctcccatagacccgtgcaggagaagttcgtgtgcctgaactgcggcttcgagacacacgcagccgagcaagccgccctgaacatcgccagatcctggctgttcctgcggagccaggagtacaagaaataccagacaaacaagacaaccggcaacaccgataagagagccttcgtcgagacctggcagtccttttaccggaagaagcttaaggaggtgtggaaacctgccgtgcggtctggcggatctggcggaggctccggcagcgtgagcttcgacgaggtgagcgtgaggttcagcaacgaggagtgggccctgctggaccccggccagagggccctgtacgaggaggtgatggaggagatcagggagatgatgaccagcgtgggcgacgtgagcgagttcctgaccgagggcgagcagagcgagcccagcagggagggcgccgaggagcagaaggagcagaggaagcagagggtgcaggtgggcacctacaggaaggagggcggcccaagcagcggcgcccctcctcccagcggcggcagcccagccggctccccaacctctaccgaggagggcacctctgagtccgccacccccgagagcggccctggcacctccaccgagcccagcgagggcagcgcacccggcagccctgccggcagccccacctccacagaggagggaaccagcaccgagcccagcgaaggcagcgccccaggcaccagcaccgagcctagtgagcaggagattaaacggatcaacaagatcagaagaagacttgtgaaagacagcaacaccaagaaggccggcaagacaggccccatgaaaaccctgctggttagagtgatgacacccgatctgagagagcggctggaaaacctgagaaagaagcctgaaaatatcccccagcccatcagcaatacatctagagccaacctgaataagctgctgaccgattacaccgaaatgaagaaggcgatcctgcatgtgtactgggaagagttccagaaggaccctgtgggcctgatgagccgggtggcccagcctgccagcaagaagatcgatcagaacaagctgaaacctgagatggacgagaagggcaacctgaccaccgccggctttgcctgctctcagtgtggccagcccctgttcgtgtacaagctggagcaggtgtctgagaagggcaaggcttacaccaactacttcggacggtgcaatgtggccgagcacgaaaagctgatcctgctggcccagctgaagcccgagaaggatagcgacgaagccgtgacatatagcctgggaaagtttgggcagagggccctggatttctacagcattcatgtgaccaaggagtccacccaccccgtgaagcccctggcccagatcgccggaaacagatacgcctccggacctgtgggaaaggccctgagcgacgcatgtatgggcacaatcgcctccttcctgtctaagtaccaggacatcatcatcgaacaccagaaggtggtgaagggcaaccagaagagactggagagcctgcgggagctggccggcaaggaaaacctggaataccctagcgtgaccctgccacctcagcctcacaccaaggagggcgttgatgcctacaacgaagtgatcgcccgggtgcgaatgtgggtgaacctgaacctgtggcagaagctgaagctaagcagagatgatgccaagcctctgctgagactgaagggattcccttcctttcctctggtcgagagacaggccaacgaagtggactggtgggacatggtgtgtaacgtgaagaagctgatcaacgagaaaaaggaggatggcaaggtgttttggcagaatctggctggctacaagagacaggaagccctgagaccatacctgagcagcgaggaagatcggaagaagggaaagaaattcgctcggtaccagctgggcgacctgctgctgcacctggaaaagaagcacggcgaggactggggaaaggtgtacgacgaggcctgggagcggattgacaagaaagtggaaggcctgagcaagcacatcaagctggaagaggaacggagaagcgaggacgcccagagcaaggccgccctgaccgactggctgcgggctaaggccagcttcgtgatcgagggcctgaaggaggccgacaaggacgagttctgcagatgcgagctgaagctgcagaagtggtacggggacctgcggggaaagcccttcgccatcgaagccgagaacagcatcctggacatcagcggcttcagcaagcagtacaactgtgccttcatctggcagaaggacggcgtgaagaagctgaacctgtacctgatcatcaactacttcaagggcggcaagctgcggttcaagaagatcaaacctgaagccttcgaagccaacagattctacaccgtgatcaacaaaaagagcggcgagatcgtgcccatggaggtgaacttcaacttcgacgaccccaacctgatcatcctgcctctggcctttggcaagagacagggcagagaattcatctggaacgacctgctgtccctggaaaccggcagcctgaagctggccaacggaagagtgatcgagaagacactgtacaacagaagaacccggcaggatgagcctgccctgttcgtggccctgaccttcgagcggcgggaggtcctggactcctccaatatcaaaccaatgaacctgatcggcgtggcaagaggcgaaaacatccccgccgtgatcgccctgaccgaccccgagggctgcccactgagccggtttaaggatagcctgggaaacccaacccacatcctgagaatcggcgagagctataaggagaagcagcggaccatccaggccaagaaggaggtggagcagcggagagccggcggctacagccggaagtacgccagcaaagccaagaatctggcagacgatatggtgagaaacaccgctagagatctgctgtactacgccgtgacccaggatgccatgctgatcttcgccaacctgagccggggcttcggccggcagggcaagcggaccttcatggccgagagacagtacacacggatggaggactggctgaccgccaagctggcctacgagggcctgagcaagacctacctgtccaagacactggcccagtacacctccaagacatgcagcaactgtgggtttaccatcaccagcgccgactacgacagggtgctggagaagctgaagaagacagcaacaggctggatgaccacaattaacggcaaggagctgaaggtggagggccagattacctactacaacagatacaagagacagaacgtagtcaaggacctgtccgtcgagctggatagactgagcgaagaatctgtgaacaacgacatctcctcctggacaaagggcagaagcggagaagctctgagcctcctgaagaaaagattctcccatagacccgtgcaggagaagttcgtgtgcctgaactgcggcttcgagacacacgcagccgagcaagccgccctgaacatcgccagatcctggctgttcctgcggagccaggagtacaagaaataccagacaaacaagacaaccggcaacaccgataagagagccttcgtcgagacctggcagtccttttaccggaagaagcttaaggaggtgtggaaacctgccgtgcggtctggcggatctggcggaggctcctggcagcgtgagcttcgacgaggtgagcgtgaggttcagcaacgaggagtgggccctgctggaccccggccagagggccctgtacgaggaggtgatggaggagatcagggagatgatgaccagcgtgggcgacgtgagcgagttcctgaccgagggcgagcagagcgagcccagcagggagggcgccgaggagcagaaggagcagaggaagcagagggtgcaggtgggcacctacaggaaggagggatctggctccggcagcggccccaagaaaaagagaaaagtctaagctgccttctgcggggcttgccttctggccatgcccttcttctctcccttgcacctgtacctcttggtctttgaataaagcctgagtaggaaggctagcaaaaaaaaaaaaaaaaaaaaaaaaaaaaaaaaaaaaaaaaaaaaaaaaaaaaaaaaaaaaaaaaaaaaaaaaaaaaaaaa

SEQ ID NO: 15971 - RNA, 9485 nt, synthetic construct
  source 1..9485: mol_type = other RNA
aggaaataagagagaaaagaagagtaagaagaaatataagagccaccatggcccctaagaagaagcgtaaagtgagccggatggaacgcctcgtctacgaggtgcggcagaagtgcagaaacatcgaggacatctgcatctcctgcggatctctgaacgtgaccctggagcacccactgttcatcggcggcatgtgccagaactgtaaaaactgttttctggagtgtgcctatcaatacgacgatgacggctaccagagctactgcaccatctgttgcggcggaagagaggtgctgatgtgtggaaataacaactgctgccggtgcttctgcgtggaatgcgtggacctgctggtgggccccggcgccgcccaggccgctattaaggaagatccttggaactgctacatgtgcggccacaagggcacatacggcctgctgagacggagagaggactggcctagcagactgcagatgttcttcgccaataaccacgaccaggagttcgacccccctaaggtgtaccctcccgtccccgccgagaagagaaagcccatccgggtcctgagcctgttcgatggcatcgccaccggtctgctggtgctgaaggacctgggcatccaggtggataggtacattgcctccgaggtgtgcgaggactccatcaccgtgggaatggtgcgtcatcagggcaagatcatgtacgtgggcgacgtgcggagcgtgacacagaagcatatccaggagtggggccctttcgacctggtgatcggcggcagcccttgcaatgacctgagcatcgtgaacccagcccggaagggcctgtacgagggaaccggcagactgttcttcgagttttacagactgctgcacgacgcccggcctaaggaaggcgacgaccggcccttcttttggctgttcgagaatgtggtggccatgggagtcagcgacaagcgggatattagccggttcctggagagcaaccccgtgatgatcgatgccaaggaagtgagcgccgcccaccgggccagatacttctggggcaatctgcctggcatgaacagacccctggccagcaccgtgaacgacaagctggagctgcaggagtgcctggagcacggccggatcgccaagttcagcaaggtgagaaccatcaccacccgaagcaacagcatcaaacaaggcaaggaccagcactttcctgtgttcatgaacgagaaggaggacatcctgtggtgtaccgagatggagagagtgttcgggttcccagtccactacacagatgtcagcaacatgtctagactggccagacagagactgctgggaagaagctggtccgtccctgtgatcagacacctgttcgcccctctgaaggagtacttcgcctgcgtgagcagcggcaacagcaacgccaacagccggggccccagcttctctagcggcctggtgccactgtccctgagagggagccacatgggccccatggagatctacaaaaccgtgagcgcctggaagcggcagcctgtgcgcgtgctgagcctgtttcggaatatcgataaagtcctgaaaagcctgggattcctggagagcggctctggctccggcggtggcaccctgaagtacgtggaggatgtgacaaacgtggtcagacgggatgtggagaagtggggccccttcgatctggtgtacggcagcacccaacccctgggcagctcttgtgaccggtgccctggctggtacatgtttcagttccaccggatcctgcagtacgccctgccgagacaggagtcccagcggccattcttttggattttcatggacaacttgctgctgaccgaggatgaccaggaaactaccactcggttcctgcagaccgaagccgtgaccctgcaggacgtgagaggccgggactaccagaacgccatgcgggtgtggtccaacatccctggactgaaaagcaagcacgcacctctgacccctaaagaagaggagtacctgcaggcccaggtgcggagcagaagcaagctggacgcccctaaggtggatctgctggtgaagaattgcctcctgcccctgagagagtacttcaagtatttcagccagaatagtctgcccctgggaggcagcggcggcggcgccctggtgacatttgaggacgtcgccgtgcggttcacccaggaggaatgggctctgctggatccttctcagaaaatcctgtaccgggacgtgatgagagagacataccggaatctgacctccgtgggcatcaactgggaatgttgggaccttgaagcctgcttcagaagcctgggaagaaacctgagagtgcaggtggtgaagagaaagtgcgagctgaccaacagcggcccctgcgccgagggcggcccaagcagcggcgcccctcctcccagcggcggcagcccagccggctccccaacctctaccgaggagggcacctctgagtccgccacccccgagagcggccctggcacctccaccgagcccagcgagggcagcgcacccggcagccctgccggcagccccacctccacagaggagggaaccagcaccgagcccagcgaaggcagcgccccaggcaccagcaccgagcctagtgagcaggagattaaacggatcaacaagatcagaagaagacttgtgaaagacagcaacaccaagaaggccggcaagacaggccccatgaaaaccctgctggttagagtgatgacacccgatctgagagagcggctggaaaacctgagaaagaagcctgaaaatatcccccagcccatcagcaatacatctagagccaacctgaataagctgctgaccgattacaccgaaatgaagaaggcgatcctgcatgtgtactgggaagagttccagaaggaccctgtgggcctgatgagccgggtggcccagcctgccagcaagaagatcgatcagaacaagctgaaacctgagatggacgagaagggcaacctgaccaccgccggctttgcctgctctcagtgtggccagcccctgttcgtgtacaagctggagcaggtgtctgagaagggcaaggcttacaccaactacttcggacggtgcaatgtggccgagcacgaaaagctgatcctgctggcccagctgaagcccgagaaggatagcgacgaagccgtgacatatagcctgggaaagtttgggcagagggccctggatttctacagcattcatgtgaccaaggagtccacccaccccgtgaagcccctggcccagatcgccggaaacagatacgcctccggacctgtgggaaaggccctgagcgacgcatgtatgggcacaatcgcctccttcctgtctaagtaccaggacatcatcatcgaacaccagaaggtggtgaagggcaaccagaagagactggagagcctgcgggagctggccggcaaggaaaacctggaataccctagcgtgaccctgccacctcagcctcacaccaaggagggcgttgatgcctacaacgaagtgatcgcccgggtgcgaatgtgggtgaacctgaacctgtggcagaagctgaagctaagcagagatgatgccaagcctctgctgagactgaagggattcccttcctttcctctggtcgagagacaggccaacgaagtggactggtgggacatggtgtgtaacgtgaagaagctgatcaacgagaaaaaggaggatggcaaggtgttttggcagaatctggctggctacaagagacaggaagccctgagaccatacctgagcagcgaggaagatcggaagaagggaaagaaattcgctcggtaccagctgggcgacctgctgctgcacctggaaaagaagcacggcgaggactggggaaaggtgtacgacgaggcctgggagcggattgacaagaaagtggaaggcctgagcaagcacatcaagctggaagaggaacggagaagcgaggacgcccagagcaaggccgccctgaccgactggctgcgggctaaggccagcttcgtgatcgagggcctgaaggaggccgacaaggacgagttctgcagatgcgagctgaagctgcagaagtggtacggggacctgcggggaaagcccttcgccatcgaagccgagaacagcatcctggacatcagcggcttcagcaagcagtacaactgtgccttcatctggcagaaggacggcgtgaagaagctgaacctgtacctgatcatcaactacttcaagggcggcaagctgcggttcaagaagatcaaacctgaagccttcgaagccaacagattctacaccgtgatcaacaaaaagagcggcgagatcgtgcccatggaggtgaacttcaacttcgacgaccccaacctgatcatcctgcctctggcctttggcaagagacagggcagagaattcatctggaacgacctgctgtccctggaaaccggcagcctgaagctggccaacggaagagtgatcgagaagacactgtacaacagaagaacccggcaggatgagcctgccctgttcgtggccctgaccttcgagcggcgggaggtcctggactcctccaatatcaaaccaatgaacctgatcggcgtggcaagaggcgaaaacatccccgccgtgatcgccctgaccgaccccgagggctgcccactgagccggtttaaggatagcctgggaaacccaacccacatcctgagaatcggcgagagctataaggagaagcagcggaccatccaggccaagaaggaggtggagcagcggagagccggcggctacagccggaagtacgccagcaaagccaagaatctggcagacgatatggtgagaaacaccgctagagatctgctgtactacgccgtgacccaggatgccatgctgatcttcgccaacctgagccggggcttcggccggcagggcaagcggaccttcatggccgagagacagtacacacggatggaggactggctgaccgccaagctggcctacgagggcctgagcaagacctacctgtccaagacactggcccagtacacctccaagacatgcagcaactgtgggtttaccatcaccagcgccgactacgacagggtgctggagaagctgaagaagacagcaacaggctggatgaccacaattaacggcaaggagctgaaggtggagggccagattacctactacaacagatacaagagacagaacgtagtcaaggacctgtccgtcgagctggatagactgagcgaagaatctgtgaacaacgacatctcctcctggacaaagggcagaagcggagaagctctgagcctcctgaagaaaagattctcccatagacccgtgcaggagaagttcgtgtgcctgaactgcggcttcgagacacacgcagccgagcaagccgccctgaacatcgccagatcctggctgttcctgcggagccaggagtacaagaaataccagacaaacaagacaaccggcaacaccgataagagagccttcgtcgagacctggcagtccttttaccggaagaagcttaaggaggtgtggaaacctgccgtgcggtctggcggatctggcggaggctccttccaggaggccgtgaccttcaaggacgtggccgtggtgttcagcgaggaggagctgggcctgctggaccccgcccagaggaagctgtacagggacgtgatgctggagaacttcaggaacctggtgagcgtgggccacagcagcagcaagcccgacatgatcagccagctggagagggaggagaagctgtgcgtgaaggagatccacaccgagaggggcggcaggaaccccaacgaggccgagggcggcccaagcagcggcgcccctcctcccagcggcggcagcccagccggctccccaacctctaccgaggagggcacctctgagtccgccacccccgagagcggccctggcacctccaccgagcccagcgagggcagcgcacccggcagccctgccggcagccccacctccacagaggagggaaccagcaccgagcccagcgaaggcagcgccccaggcaccagcaccgagcctagtgagcaggagattaaacggatcaacaagatcagaagaagacttgtgaaagacagcaacaccaagaaggccggcaagacaggccccatgaaaaccctgctggttagagtgatgacacccgatctgagagagcggctggaaaacctgagaaagaagcctgaaaatatcccccagcccatcagcaatacatctagagccaacctgaataagctgctgaccgattacaccgaaatgaagaaggcgatcctgcatgtgtactgggaagagttccagaaggaccctgtgggcctgatgagccgggtggcccagcctgccagcaagaagatcgatcagaacaagctgaaacctgagatggacgagaagggcaacctgaccaccgccggctttgcctgctctcagtgtggccagcccctgttcgtgtacaagctggagcaggtgtctgagaagggcaaggcttacaccaactacttcggacggtgcaatgtggccgagcacgaaaagctgatcctgctggcccagctgaagcccgagaaggatagcgacgaagccgtgacatatagcctgggaaagtttgggcagagggccctggatttctacagcattcatgtgaccaaggagtccacccaccccgtgaagcccctggcccagatcgccggaaacagatacgcctccggacctgtgggaaaggccctgagcgacgcatgtatgggcacaatcgcctccttcctgtctaagtaccaggacatcatcatcgaacaccagaaggtggtgaagggcaaccagaagagactggagagcctgcgggagctggccggcaaggaaaacctggaataccctagcgtgaccctgccacctcagcctcacaccaaggagggcgttgatgcctacaacgaagtgatcgcccgggtgcgaatgtgggtgaacctgaacctgtggcagaagctgaagctaagcagagatgatgccaagcctctgctgagactgaagggattcccttcctttcctctggtcgagagacaggccaacgaagtggactggtgggacatggtgtgtaacgtgaagaagctgatcaacgagaaaaaggaggatggcaaggtgttttggcagaatctggctggctacaagagacaggaagccctgagaccatacctgagcagcgaggaagatcggaagaagggaaagaaattcgctcggtaccagctgggcgacctgctgctgcacctggaaaagaagcacggcgaggactggggaaaggtgtacgacgaggcctgggagcggattgacaagaaagtggaaggcctgagcaagcacatcaagctggaagaggaacggagaagcgaggacgcccagagcaaggccgccctgaccgactggctgcgggctaaggccagcttcgtgatcgagggcctgaaggaggccgacaaggacgagttctgcagatgcgagctgaagctgcagaagtggtacggggacctgcggggaaagcccttcgccatcgaagccgagaacagcatcctggacatcagcggcttcagcaagcagtacaactgtgccttcatctggcagaaggacggcgtgaagaagctgaacctgtacctgatcatcaactacttcaagggcggcaagctgcggttcaagaagatcaaacctgaagccttcgaagccaacagattctacaccgtgatcaacaaaaagagcggcgagatcgtgcccatggaggtgaacttcaacttcgacgaccccaacctgatcatcctgcctctggcctttggcaagagacagggcagagaattcatctggaacgacctgctgtccctggaaaccggcagcctgaagctggccaacggaagagtgatcgagaagacactgtacaacagaagaacccggcaggatgagcctgccctgttcgtggccctgaccttcgagcggcgggaggtcctggactcctccaatatcaaaccaatgaacctgatcggcgtggcaagaggcgaaaacatccccgccgtgatcgccctgaccgaccccgagggctgcccactgagccggtttaaggatagcctgggaaacccaacccacatcctgagaatcggcgagagctataaggagaagcagcggaccatccaggccaagaaggaggtggagcagcggagagccggcggctacagccggaagtacgccagcaaagccaagaatctggcagacgatatggtgagaaacaccgctagagatctgctgtactacgccgtgacccaggatgccatgctgatcttcgccaacctgagccggggcttcggccggcagggcaagcggaccttcatggccgagagacagtacacacggatggaggactggctgaccgccaagctggcctacgagggcctgagcaagacctacctgtccaagacactggcccagtacacctccaagacatgcagcaactgtgggtttaccatcaccagcgccgactacgacagggtgctggagaagctgaagaagacagcaacaggctggatgaccacaattaacggcaaggagctgaaggtggagggccagattacctactacaacagatacaagagacagaacgtagtcaaggacctgtccgtcgagctggatagactgagcgaagaatctgtgaacaacgacatctcctcctggacaaagggcagaagcggagaagctctgagcctcctgaagaaaagattctcccatagacccgtgcaggagaagttcgtgtgcctgaactgcggcttcgagacacacgcagccgagcaagccgccctgaacatcgccagatcctggctgttcctgcggagccaggagtacaagaaataccagacaaacaagacaaccggcaacaccgataagagagccttcgtcgagacctggcagtccttttaccggaagaagcttaaggaggtgtggaaacctgccgtgcggtctggcggatctggcggaggctcctttccaggaggccgtgaccttcaaggacgtggccgtggtgttcagcgaggaggagctgggcctgctggaccccgcccagaggaagctgtacagggacgtgatgctggagaacttcaggaacctggtgagcgtgggccacagcagcagcaagcccgacatgatcagccagctggagagggaggagaagctgtgcgtgaaggagatccacaccgagaggggcggcaggaaccccaacgaggccgagggatctggctccggcagcggccccaagaaaaagagaaaagtctaagctgccttctgcggggcttgccttctggccatgcccttcttctctcccttgcacctgtacctcttggtctttgaataaagcctgagtaggaaggctagcaaaaaaaaaaaaaaaaaaaaaaaaaaaaaaaaaaaaaaaaaaaaaaaaaaaaaaaaaaaaaaaaaaaaaaaaaaaaaaaa

SEQ ID NO: 15972 - RNA, 9485 nt, synthetic construct
  source 1..9485: mol_type = other RNA
aggaaataagagagaaaagaagagtaagaagaaatataagagccaccatggcccctaagaagaagcgtaaagtgagccggatggaacgcctcgtctacgaggtgcggcagaagtgcagaaacatcgaggacatctgcatctcctgcggatctctgaacgtgaccctggagcacccactgttcatcggcggcatgtgccagaactgtaaaaactgttttctggagtgtgcctatcaatacgacgatgacggctaccagagctactgcaccatctgttgcggcggaagagaggtgctgatgtgtggaaataacaactgctgccggtgcttctgcgtggaatgcgtggacctgctggtgggccccggcgccgcccaggccgctattaaggaagatccttggaactgctacatgtgcggccacaagggcacatacggcctgctgagacggagagaggactggcctagcagactgcagatgttcttcgccaataaccacgaccaggagttcgacccccctaaggtgtaccctcccgtccccgccgagaagagaaagcccatccgggtcctgagcctgttcgatggcatcgccaccggtctgctggtgctgaaggacctgggcatccaggtggataggtacattgcctccgaggtgtgcgaggactccatcaccgtgggaatggtgcgtcatcagggcaagatcatgtacgtgggcgacgtgcggagcgtgacacagaagcatatccaggagtggggccctttcgacctggtgatcggcggcagcccttgcaatgacctgagcatcgtgaacccagcccggaagggcctgtacgagggaaccggcagactgttcttcgagttttacagactgctgcacgacgcccggcctaaggaaggcgacgaccggcccttcttttggctgttcgagaatgtggtggccatgggagtcagcgacaagcgggatattagccggttcctggagagcaaccccgtgatgatcgatgccaaggaagtgagcgccgcccaccgggccagatacttctggggcaatctgcctggcatgaacagacccctggccagcaccgtgaacgacaagctggagctgcaggagtgcctggagcacggccggatcgccaagttcagcaaggtgagaaccatcaccacccgaagcaacagcatcaaacaaggcaaggaccagcactttcctgtgttcatgaacgagaaggaggacatcctgtggtgtaccgagatggagagagtgttcgggttcccagtccactacacagatgtcagcaacatgtctagactggccagacagagactgctgggaagaagctggtccgtccctgtgatcagacacctgttcgcccctctgaaggagtacttcgcctgcgtgagcagcggcaacagcaacgccaacagccggggccccagcttctctagcggcctggtgccactgtccctgagagggagccacatgggccccatggagatctacaaaaccgtgagcgcctggaagcggcagcctgtgcgcgtgctgagcctgtttcggaatatcgataaagtcctgaaaagcctgggattcctggagagcggctctggctccggcggtggcaccctgaagtacgtggaggatgtgacaaacgtggtcagacgggatgtggagaagtggggccccttcgatctggtgtacggcagcacccaacccctgggcagctcttgtgaccggtgccctggctggtacatgtttcagttccaccggatcctgcagtacgccctgccgagacaggagtcccagcggccattcttttggattttcatggacaacttgctgctgaccgaggatgaccaggaaactaccactcggttcctgcagaccgaagccgtgaccctgcaggacgtgagaggccgggactaccagaacgccatgcgggtgtggtccaacatccctggactgaaaagcaagcacgcacctctgacccctaaagaagaggagtacctgcaggcccaggtgcggagcagaagcaagctggacgcccctaaggtggatctgctggtgaagaattgcctcctgcccctgagagagtacttcaagtatttcagccagaatagtctgcccctgggaggcagcggcggcggcgccctggtgacatttgaggacgtcgccgtgcggttcacccaggaggaatgggctctgctggatccttctcagaaaatcctgtaccgggacgtgatgagagagacataccggaatctgacctccgtgggcatcaactgggaatgttgggaccttgaagcctgcttcagaagcctgggaagaaacctgagagtgcaggtggtgaagagaaagtgcgagctgaccaacagcggcccctgcgccgagggcggcccaagcagcggcgcccctcctcccagcggcggcagcccagccggctccccaacctctaccgaggagggcacctctgagtccgccacccccgagagcggccctggcacctccaccgagcccagcgagggcagcgcacccggcagccctgccggcagccccacctccacagaggagggaaccagcaccgagcccagcgaaggcagcgccccaggcaccagcaccgagcctagtgagcaggagattaaacggatcaacaagatcagaagaagacttgtgaaagacagcaacaccaagaaggccggcaagacaggccccatgaaaaccctgctggttagagtgatgacacccgatctgagagagcggctggaaaacctgagaaagaagcctgaaaatatcccccagcccatcagcaatacatctagagccaacctgaataagctgctgaccgattacaccgaaatgaagaaggcgatcctgcatgtgtactgggaagagttccagaaggaccctgtgggcctgatgagccgggtggcccagcctgccagcaagaagatcgatcagaacaagctgaaacctgagatggacgagaagggcaacctgaccaccgccggctttgcctgctctcagtgtggccagcccctgttcgtgtacaagctggagcaggtgtctgagaagggcaaggcttacaccaactacttcggacggtgcaatgtggccgagcacgaaaagctgatcctgctggcccagctgaagcccgagaaggatagcgacgaagccgtgacatatagcctgggaaagtttgggcagagggccctggatttctacagcattcatgtgaccaaggagtccacccaccccgtgaagcccctggcccagatcgccggaaacagatacgcctccggacctgtgggaaaggccctgagcgacgcatgtatgggcacaatcgcctccttcctgtctaagtaccaggacatcatcatcgaacaccagaaggtggtgaagggcaaccagaagagactggagagcctgcgggagctggccggcaaggaaaacctggaataccctagcgtgaccctgccacctcagcctcacaccaaggagggcgttgatgcctacaacgaagtgatcgcccgggtgcgaatgtgggtgaacctgaacctgtggcagaagctgaagctaagcagagatgatgccaagcctctgctgagactgaagggattcccttcctttcctctggtcgagagacaggccaacgaagtggactggtgggacatggtgtgtaacgtgaagaagctgatcaacgagaaaaaggaggatggcaaggtgttttggcagaatctggctggctacaagagacaggaagccctgagaccatacctgagcagcgaggaagatcggaagaagggaaagaaattcgctcggtaccagctgggcgacctgctgctgcacctggaaaagaagcacggcgaggactggggaaaggtgtacgacgaggcctgggagcggattgacaagaaagtggaaggcctgagcaagcacatcaagctggaagaggaacggagaagcgaggacgcccagagcaaggccgccctgaccgactggctgcgggctaaggccagcttcgtgatcgagggcctgaaggaggccgacaaggacgagttctgcagatgcgagctgaagctgcagaagtggtacggggacctgcggggaaagcccttcgccatcgaagccgagaacagcatcctggacatcagcggcttcagcaagcagtacaactgtgccttcatctggcagaaggacggcgtgaagaagctgaacctgtacctgatcatcaactacttcaagggcggcaagctgcggttcaagaagatcaaacctgaagccttcgaagccaacagattctacaccgtgatcaacaaaaagagcggcgagatcgtgcccatggaggtgaacttcaacttcgacgaccccaacctgatcatcctgcctctggcctttggcaagagacagggcagagaattcatctggaacgacctgctgtccctggaaaccggcagcctgaagctggccaacggaagagtgatcgagaagacactgtacaacagaagaacccggcaggatgagcctgccctgttcgtggccctgaccttcgagcggcgggaggtcctggactcctccaatatcaaaccaatgaacctgatcggcgtggcaagaggcgaaaacatccccgccgtgatcgccctgaccgaccccgagggctgcccactgagccggtttaaggatagcctgggaaacccaacccacatcctgagaatcggcgagagctataaggagaagcagcggaccatccaggccaagaaggaggtggagcagcggagagccggcggctacagccggaagtacgccagcaaagccaagaatctggcagacgatatggtgagaaacaccgctagagatctgctgtactacgccgtgacccaggatgccatgctgatcttcgccaacctgagccggggcttcggccggcagggcaagcggaccttcatggccgagagacagtacacacggatggaggactggctgaccgccaagctggcctacgagggcctgagcaagacctacctgtccaagacactggcccagtacacctccaagacatgcagcaactgtgggtttaccatcaccagcgccgactacgacagggtgctggagaagctgaagaagacagcaacaggctggatgaccacaattaacggcaaggagctgaaggtggagggccagattacctactacaacagatacaagagacagaacgtagtcaaggacctgtccgtcgagctggatagactgagcgaagaatctgtgaacaacgacatctcctcctggacaaagggcagaagcggagaagctctgagcctcctgaagaaaagattctcccatagacccgtgcaggagaagttcgtgtgcctgaactgcggcttcgagacacacgcagccgagcaagccgccctgaacatcgccagatcctggctgttcctgcggagccaggagtacaagaaataccagacaaacaagacaaccggcaacaccgataagagagccttcgtcgagacctggcagtccttttaccggaagaagcttaaggaggtgtggaaacctgccgtgcggtctggcggatctggcggaggctccctgcaggtgagcgtgagcttcgaggacgtgaccgtgaacttcagcagggaggagtggcagaggctggaccccgcccagaggaggctgtacagggacgtgaccctggagaactacagccacctgaggagcgtgggctaccaggtgcccaagcccgaggtgatcttcaagctggagcagggcgagggcccctggaccctggagggcgagaccccccaccagagctgcagcggcgaggacatcggcggcggcccaagcagcggcgcccctcctcccagcggcggcagcccagccggctccccaacctctaccgaggagggcacctctgagtccgccacccccgagagcggccctggcacctccaccgagcccagcgagggcagcgcacccggcagccctgccggcagccccacctccacagaggagggaaccagcaccgagcccagcgaaggcagcgccccaggcaccagcaccgagcctagtgagcaggagattaaacggatcaacaagatcagaagaagacttgtgaaagacagcaacaccaagaaggccggcaagacaggccccatgaaaaccctgctggttagagtgatgacacccgatctgagagagcggctggaaaacctgagaaagaagcctgaaaatatcccccagcccatcagcaatacatctagagccaacctgaataagctgctgaccgattacaccgaaatgaagaaggcgatcctgcatgtgtactgggaagagttccagaaggaccctgtgggcctgatgagccgggtggcccagcctgccagcaagaagatcgatcagaacaagctgaaacctgagatggacgagaagggcaacctgaccaccgccggctttgcctgctctcagtgtggccagcccctgttcgtgtacaagctggagcaggtgtctgagaagggcaaggcttacaccaactacttcggacggtgcaatgtggccgagcacgaaaagctgatcctgctggcccagctgaagcccgagaaggatagcgacgaagccgtgacatatagcctgggaaagtttgggcagagggccctggatttctacagcattcatgtgaccaaggagtccacccaccccgtgaagcccctggcccagatcgccggaaacagatacgcctccggacctgtgggaaaggccctgagcgacgcatgtatgggcacaatcgcctccttcctgtctaagtaccaggacatcatcatcgaacaccagaaggtggtgaagggcaaccagaagagactggagagcctgcgggagctggccggcaaggaaaacctggaataccctagcgtgaccctgccacctcagcctcacaccaaggagggcgttgatgcctacaacgaagtgatcgcccgggtgcgaatgtgggtgaacctgaacctgtggcagaagctgaagctaagcagagatgatgccaagcctctgctgagactgaagggattcccttcctttcctctggtcgagagacaggccaacgaagtggactggtgggacatggtgtgtaacgtgaagaagctgatcaacgagaaaaaggaggatggcaaggtgttttggcagaatctggctggctacaagagacaggaagccctgagaccatacctgagcagcgaggaagatcggaagaagggaaagaaattcgctcggtaccagctgggcgacctgctgctgcacctggaaaagaagcacggcgaggactggggaaaggtgtacgacgaggcctgggagcggattgacaagaaagtggaaggcctgagcaagcacatcaagctggaagaggaacggagaagcgaggacgcccagagcaaggccgccctgaccgactggctgcgggctaaggccagcttcgtgatcgagggcctgaaggaggccgacaaggacgagttctgcagatgcgagctgaagctgcagaagtggtacggggacctgcggggaaagcccttcgccatcgaagccgagaacagcatcctggacatcagcggcttcagcaagcagtacaactgtgccttcatctggcagaaggacggcgtgaagaagctgaacctgtacctgatcatcaactacttcaagggcggcaagctgcggttcaagaagatcaaacctgaagccttcgaagccaacagattctacaccgtgatcaacaaaaagagcggcgagatcgtgcccatggaggtgaacttcaacttcgacgaccccaacctgatcatcctgcctctggcctttggcaagagacagggcagagaattcatctggaacgacctgctgtccctggaaaccggcagcctgaagctggccaacggaagagtgatcgagaagacactgtacaacagaagaacccggcaggatgagcctgccctgttcgtggccctgaccttcgagcggcgggaggtcctggactcctccaatatcaaaccaatgaacctgatcggcgtggcaagaggcgaaaacatccccgccgtgatcgccctgaccgaccccgagggctgcccactgagccggtttaaggatagcctgggaaacccaacccacatcctgagaatcggcgagagctataaggagaagcagcggaccatccaggccaagaaggaggtggagcagcggagagccggcggctacagccggaagtacgccagcaaagccaagaatctggcagacgatatggtgagaaacaccgctagagatctgctgtactacgccgtgacccaggatgccatgctgatcttcgccaacctgagccggggcttcggccggcagggcaagcggaccttcatggccgagagacagtacacacggatggaggactggctgaccgccaagctggcctacgagggcctgagcaagacctacctgtccaagacactggcccagtacacctccaagacatgcagcaactgtgggtttaccatcaccagcgccgactacgacagggtgctggagaagctgaagaagacagcaacaggctggatgaccacaattaacggcaaggagctgaaggtggagggccagattacctactacaacagatacaagagacagaacgtagtcaaggacctgtccgtcgagctggatagactgagcgaagaatctgtgaacaacgacatctcctcctggacaaagggcagaagcggagaagctctgagcctcctgaagaaaagattctcccatagacccgtgcaggagaagttcgtgtgcctgaactgcggcttcgagacacacgcagccgagcaagccgccctgaacatcgccagatcctggctgttcctgcggagccaggagtacaagaaataccagacaaacaagacaaccggcaacaccgataagagagccttcgtcgagacctggcagtccttttaccggaagaagcttaaggaggtgtggaaacctgccgtgcggtctggcggatctggcggaggctcctctgcaggtgagcgtgagcttcgaggacgtgaccgtgaacttcagcagggaggagtggcagaggctggaccccgcccagaggaggctgtacagggacgtgaccctggagaactacagccacctgaggagcgtgggctaccaggtgcccaagcccgaggtgatcttcaagctggagcagggcgagggcccctggaccctggagggcgagaccccccaccagagctgcagcggcgaggacatcggcggatctggctccggcagcggccccaagaaaaagagaaaagtctaagctgccttctgcggggcttgccttctggccatgcccttcttctctcccttgcacctgtacctcttggtctttgaataaagcctgagtaggaaggctagcaaaaaaaaaaaaaaaaaaaaaaaaaaaaaaaaaaaaaaaaaaaaaaaaaaaaaaaaaaaaaaaaaaaaaaaaaaaaaaaa

SEQ ID NO: 15973 - RNA, 9485 nt, synthetic construct
  source 1..9485: mol_type = other RNA
aggaaataagagagaaaagaagagtaagaagaaatataagagccaccatggcccctaagaagaagcgtaaagtgagccggatggaacgcctcgtctacgaggtgcggcagaagtgcagaaacatcgaggacatctgcatctcctgcggatctctgaacgtgaccctggagcacccactgttcatcggcggcatgtgccagaactgtaaaaactgttttctggagtgtgcctatcaatacgacgatgacggctaccagagctactgcaccatctgttgcggcggaagagaggtgctgatgtgtggaaataacaactgctgccggtgcttctgcgtggaatgcgtggacctgctggtgggccccggcgccgcccaggccgctattaaggaagatccttggaactgctacatgtgcggccacaagggcacatacggcctgctgagacggagagaggactggcctagcagactgcagatgttcttcgccaataaccacgaccaggagttcgacccccctaaggtgtaccctcccgtccccgccgagaagagaaagcccatccgggtcctgagcctgttcgatggcatcgccaccggtctgctggtgctgaaggacctgggcatccaggtggataggtacattgcctccgaggtgtgcgaggactccatcaccgtgggaatggtgcgtcatcagggcaagatcatgtacgtgggcgacgtgcggagcgtgacacagaagcatatccaggagtggggccctttcgacctggtgatcggcggcagcccttgcaatgacctgagcatcgtgaacccagcccggaagggcctgtacgagggaaccggcagactgttcttcgagttttacagactgctgcacgacgcccggcctaaggaaggcgacgaccggcccttcttttggctgttcgagaatgtggtggccatgggagtcagcgacaagcgggatattagccggttcctggagagcaaccccgtgatgatcgatgccaaggaagtgagcgccgcccaccgggccagatacttctggggcaatctgcctggcatgaacagacccctggccagcaccgtgaacgacaagctggagctgcaggagtgcctggagcacggccggatcgccaagttcagcaaggtgagaaccatcaccacccgaagcaacagcatcaaacaaggcaaggaccagcactttcctgtgttcatgaacgagaaggaggacatcctgtggtgtaccgagatggagagagtgttcgggttcccagtccactacacagatgtcagcaacatgtctagactggccagacagagactgctgggaagaagctggtccgtccctgtgatcagacacctgttcgcccctctgaaggagtacttcgcctgcgtgagcagcggcaacagcaacgccaacagccggggccccagcttctctagcggcctggtgccactgtccctgagagggagccacatgggccccatggagatctacaaaaccgtgagcgcctggaagcggcagcctgtgcgcgtgctgagcctgtttcggaatatcgataaagtcctgaaaagcctgggattcctggagagcggctctggctccggcggtggcaccctgaagtacgtggaggatgtgacaaacgtggtcagacgggatgtggagaagtggggccccttcgatctggtgtacggcagcacccaacccctgggcagctcttgtgaccggtgccctggctggtacatgtttcagttccaccggatcctgcagtacgccctgccgagacaggagtcccagcggccattcttttggattttcatggacaacttgctgctgaccgaggatgaccaggaaactaccactcggttcctgcagaccgaagccgtgaccctgcaggacgtgagaggccgggactaccagaacgccatgcgggtgtggtccaacatccctggactgaaaagcaagcacgcacctctgacccctaaagaagaggagtacctgcaggcccaggtgcggagcagaagcaagctggacgcccctaaggtggatctgctggtgaagaattgcctcctgcccctgagagagtacttcaagtatttcagccagaatagtctgcccctgggaggcagcggcggcggcgccctggtgacatttgaggacgtcgccgtgcggttcacccaggaggaatgggctctgctggatccttctcagaaaatcctgtaccgggacgtgatgagagagacataccggaatctgacctccgtgggcatcaactgggaatgttgggaccttgaagcctgcttcagaagcctgggaagaaacctgagagtgcaggtggtgaagagaaagtgcgagctgaccaacagcggcccctgcgccgagggcggcccaagcagcggcgcccctcctcccagcggcggcagcccagccggctccccaacctctaccgaggagggcacctctgagtccgccacccccgagagcggccctggcacctccaccgagcccagcgagggcagcgcacccggcagccctgccggcagccccacctccacagaggagggaaccagcaccgagcccagcgaaggcagcgccccaggcaccagcaccgagcctagtgagcaggagattaaacggatcaacaagatcagaagaagacttgtgaaagacagcaacaccaagaaggccggcaagacaggccccatgaaaaccctgctggttagagtgatgacacccgatctgagagagcggctggaaaacctgagaaagaagcctgaaaatatcccccagcccatcagcaatacatctagagccaacctgaataagctgctgaccgattacaccgaaatgaagaaggcgatcctgcatgtgtactgggaagagttccagaaggaccctgtgggcctgatgagccgggtggcccagcctgccagcaagaagatcgatcagaacaagctgaaacctgagatggacgagaagggcaacctgaccaccgccggctttgcctgctctcagtgtggccagcccctgttcgtgtacaagctggagcaggtgtctgagaagggcaaggcttacaccaactacttcggacggtgcaatgtggccgagcacgaaaagctgatcctgctggcccagctgaagcccgagaaggatagcgacgaagccgtgacatatagcctgggaaagtttgggcagagggccctggatttctacagcattcatgtgaccaaggagtccacccaccccgtgaagcccctggcccagatcgccggaaacagatacgcctccggacctgtgggaaaggccctgagcgacgcatgtatgggcacaatcgcctccttcctgtctaagtaccaggacatcatcatcgaacaccagaaggtggtgaagggcaaccagaagagactggagagcctgcgggagctggccggcaaggaaaacctggaataccctagcgtgaccctgccacctcagcctcacaccaaggagggcgttgatgcctacaacgaagtgatcgcccgggtgcgaatgtgggtgaacctgaacctgtggcagaagctgaagctaagcagagatgatgccaagcctctgctgagactgaagggattcccttcctttcctctggtcgagagacaggccaacgaagtggactggtgggacatggtgtgtaacgtgaagaagctgatcaacgagaaaaaggaggatggcaaggtgttttggcagaatctggctggctacaagagacaggaagccctgagaccatacctgagcagcgaggaagatcggaagaagggaaagaaattcgctcggtaccagctgggcgacctgctgctgcacctggaaaagaagcacggcgaggactggggaaaggtgtacgacgaggcctgggagcggattgacaagaaagtggaaggcctgagcaagcacatcaagctggaagaggaacggagaagcgaggacgcccagagcaaggccgccctgaccgactggctgcgggctaaggccagcttcgtgatcgagggcctgaaggaggccgacaaggacgagttctgcagatgcgagctgaagctgcagaagtggtacggggacctgcggggaaagcccttcgccatcgaagccgagaacagcatcctggacatcagcggcttcagcaagcagtacaactgtgccttcatctggcagaaggacggcgtgaagaagctgaacctgtacctgatcatcaactacttcaagggcggcaagctgcggttcaagaagatcaaacctgaagccttcgaagccaacagattctacaccgtgatcaacaaaaagagcggcgagatcgtgcccatggaggtgaacttcaacttcgacgaccccaacctgatcatcctgcctctggcctttggcaagagacagggcagagaattcatctggaacgacctgctgtccctggaaaccggcagcctgaagctggccaacggaagagtgatcgagaagacactgtacaacagaagaacccggcaggatgagcctgccctgttcgtggccctgaccttcgagcggcgggaggtcctggactcctccaatatcaaaccaatgaacctgatcggcgtggcaagaggcgaaaacatccccgccgtgatcgccctgaccgaccccgagggctgcccactgagccggtttaaggatagcctgggaaacccaacccacatcctgagaatcggcgagagctataaggagaagcagcggaccatccaggccaagaaggaggtggagcagcggagagccggcggctacagccggaagtacgccagcaaagccaagaatctggcagacgatatggtgagaaacaccgctagagatctgctgtactacgccgtgacccaggatgccatgctgatcttcgccaacctgagccggggcttcggccggcagggcaagcggaccttcatggccgagagacagtacacacggatggaggactggctgaccgccaagctggcctacgagggcctgagcaagacctacctgtccaagacactggcccagtacacctccaagacatgcagcaactgtgggtttaccatcaccagcgccgactacgacagggtgctggagaagctgaagaagacagcaacaggctggatgaccacaattaacggcaaggagctgaaggtggagggccagattacctactacaacagatacaagagacagaacgtagtcaaggacctgtccgtcgagctggatagactgagcgaagaatctgtgaacaacgacatctcctcctggacaaagggcagaagcggagaagctctgagcctcctgaagaaaagattctcccatagacccgtgcaggagaagttcgtgtgcctgaactgcggcttcgagacacacgcagccgagcaagccgccctgaacatcgccagatcctggctgttcctgcggagccaggagtacaagaaataccagacaaacaagacaaccggcaacaccgataagagagccttcgtcgagacctggcagtccttttaccggaagaagcttaaggaggtgtggaaacctgccgtgcggtctggcggatctggcggaggctccgcccagggcctggtgaccttcagggacgtggccatcgagttcagccaggaggagtggaagtgcctggagcccgcccagaggaacctgtacagggacgtgaccctggagaacttcagcaacctggtgagcctgggcctgagcatcagcaagcccgacctgatcagcctgctggagcagggcagggagccctggatgatcgccaacgacatgaccggcccctggtgccccgagctggagagcaggggcggcccaagcagcggcgcccctcctcccagcggcggcagcccagccggctccccaacctctaccgaggagggcacctctgagtccgccacccccgagagcggccctggcacctccaccgagcccagcgagggcagcgcacccggcagccctgccggcagccccacctccacagaggagggaaccagcaccgagcccagcgaaggcagcgccccaggcaccagcaccgagcctagtgagcaggagattaaacggatcaacaagatcagaagaagacttgtgaaagacagcaacaccaagaaggccggcaagacaggccccatgaaaaccctgctggttagagtgatgacacccgatctgagagagcggctggaaaacctgagaaagaagcctgaaaatatcccccagcccatcagcaatacatctagagccaacctgaataagctgctgaccgattacaccgaaatgaagaaggcgatcctgcatgtgtactgggaagagttccagaaggaccctgtgggcctgatgagccgggtggcccagcctgccagcaagaagatcgatcagaacaagctgaaacctgagatggacgagaagggcaacctgaccaccgccggctttgcctgctctcagtgtggccagcccctgttcgtgtacaagctggagcaggtgtctgagaagggcaaggcttacaccaactacttcggacggtgcaatgtggccgagcacgaaaagctgatcctgctggcccagctgaagcccgagaaggatagcgacgaagccgtgacatatagcctgggaaagtttgggcagagggccctggatttctacagcattcatgtgaccaaggagtccacccaccccgtgaagcccctggcccagatcgccggaaacagatacgcctccggacctgtgggaaaggccctgagcgacgcatgtatgggcacaatcgcctccttcctgtctaagtaccaggacatcatcatcgaacaccagaaggtggtgaagggcaaccagaagagactggagagcctgcgggagctggccggcaaggaaaacctggaataccctagcgtgaccctgccacctcagcctcacaccaaggagggcgttgatgcctacaacgaagtgatcgcccgggtgcgaatgtgggtgaacctgaacctgtggcagaagctgaagctaagcagagatgatgccaagcctctgctgagactgaagggattcccttcctttcctctggtcgagagacaggccaacgaagtggactggtgggacatggtgtgtaacgtgaagaagctgatcaacgagaaaaaggaggatggcaaggtgttttggcagaatctggctggctacaagagacaggaagccctgagaccatacctgagcagcgaggaagatcggaagaagggaaagaaattcgctcggtaccagctgggcgacctgctgctgcacctggaaaagaagcacggcgaggactggggaaaggtgtacgacgaggcctgggagcggattgacaagaaagtggaaggcctgagcaagcacatcaagctggaagaggaacggagaagcgaggacgcccagagcaaggccgccctgaccgactggctgcgggctaaggccagcttcgtgatcgagggcctgaaggaggccgacaaggacgagttctgcagatgcgagctgaagctgcagaagtggtacggggacctgcggggaaagcccttcgccatcgaagccgagaacagcatcctggacatcagcggcttcagcaagcagtacaactgtgccttcatctggcagaaggacggcgtgaagaagctgaacctgtacctgatcatcaactacttcaagggcggcaagctgcggttcaagaagatcaaacctgaagccttcgaagccaacagattctacaccgtgatcaacaaaaagagcggcgagatcgtgcccatggaggtgaacttcaacttcgacgaccccaacctgatcatcctgcctctggcctttggcaagagacagggcagagaattcatctggaacgacctgctgtccctggaaaccggcagcctgaagctggccaacggaagagtgatcgagaagacactgtacaacagaagaacccggcaggatgagcctgccctgttcgtggccctgaccttcgagcggcgggaggtcctggactcctccaatatcaaaccaatgaacctgatcggcgtggcaagaggcgaaaacatccccgccgtgatcgccctgaccgaccccgagggctgcccactgagccggtttaaggatagcctgggaaacccaacccacatcctgagaatcggcgagagctataaggagaagcagcggaccatccaggccaagaaggaggtggagcagcggagagccggcggctacagccggaagtacgccagcaaagccaagaatctggcagacgatatggtgagaaacaccgctagagatctgctgtactacgccgtgacccaggatgccatgctgatcttcgccaacctgagccggggcttcggccggcagggcaagcggaccttcatggccgagagacagtacacacggatggaggactggctgaccgccaagctggcctacgagggcctgagcaagacctacctgtccaagacactggcccagtacacctccaagacatgcagcaactgtgggtttaccatcaccagcgccgactacgacagggtgctggagaagctgaagaagacagcaacaggctggatgaccacaattaacggcaaggagctgaaggtggagggccagattacctactacaacagatacaagagacagaacgtagtcaaggacctgtccgtcgagctggatagactgagcgaagaatctgtgaacaacgacatctcctcctggacaaagggcagaagcggagaagctctgagcctcctgaagaaaagattctcccatagacccgtgcaggagaagttcgtgtgcctgaactgcggcttcgagacacacgcagccgagcaagccgccctgaacatcgccagatcctggctgttcctgcggagccaggagtacaagaaataccagacaaacaagacaaccggcaacaccgataagagagccttcgtcgagacctggcagtccttttaccggaagaagcttaaggaggtgtggaaacctgccgtgcggtctggcggatctggcggaggctcctgcccagggcctggtgaccttcagggacgtggccatcgagttcagccaggaggagtggaagtgcctggagcccgcccagaggaacctgtacagggacgtgaccctggagaacttcagcaacctggtgagcctgggcctgagcatcagcaagcccgacctgatcagcctgctggagcagggcagggagccctggatgatcgccaacgacatgaccggcccctggtgccccgagctggagagcaggggatctggctccggcagcggccccaagaaaaagagaaaagtctaagctgccttctgcggggcttgccttctggccatgcccttcttctctcccttgcacctgtacctcttggtctttgaataaagcctgagtaggaaggctagcaaaaaaaaaaaaaaaaaaaaaaaaaaaaaaaaaaaaaaaaaaaaaaaaaaaaaaaaaaaaaaaaaaaaaaaaaaaaaaaa

SEQ ID NO: 15974 - RNA, 9485 nt, synthetic construct
  source 1..9485: mol_type = other RNA
aggaaataagagagaaaagaagagtaagaagaaatataagagccaccatggcccctaagaagaagcgtaaagtgagccggatggaacgcctcgtctacgaggtgcggcagaagtgcagaaacatcgaggacatctgcatctcctgcggatctctgaacgtgaccctggagcacccactgttcatcggcggcatgtgccagaactgtaaaaactgttttctggagtgtgcctatcaatacgacgatgacggctaccagagctactgcaccatctgttgcggcggaagagaggtgctgatgtgtggaaataacaactgctgccggtgcttctgcgtggaatgcgtggacctgctggtgggccccggcgccgcccaggccgctattaaggaagatccttggaactgctacatgtgcggccacaagggcacatacggcctgctgagacggagagaggactggcctagcagactgcagatgttcttcgccaataaccacgaccaggagttcgacccccctaaggtgtaccctcccgtccccgccgagaagagaaagcccatccgggtcctgagcctgttcgatggcatcgccaccggtctgctggtgctgaaggacctgggcatccaggtggataggtacattgcctccgaggtgtgcgaggactccatcaccgtgggaatggtgcgtcatcagggcaagatcatgtacgtgggcgacgtgcggagcgtgacacagaagcatatccaggagtggggccctttcgacctggtgatcggcggcagcccttgcaatgacctgagcatcgtgaacccagcccggaagggcctgtacgagggaaccggcagactgttcttcgagttttacagactgctgcacgacgcccggcctaaggaaggcgacgaccggcccttcttttggctgttcgagaatgtggtggccatgggagtcagcgacaagcgggatattagccggttcctggagagcaaccccgtgatgatcgatgccaaggaagtgagcgccgcccaccgggccagatacttctggggcaatctgcctggcatgaacagacccctggccagcaccgtgaacgacaagctggagctgcaggagtgcctggagcacggccggatcgccaagttcagcaaggtgagaaccatcaccacccgaagcaacagcatcaaacaaggcaaggaccagcactttcctgtgttcatgaacgagaaggaggacatcctgtggtgtaccgagatggagagagtgttcgggttcccagtccactacacagatgtcagcaacatgtctagactggccagacagagactgctgggaagaagctggtccgtccctgtgatcagacacctgttcgcccctctgaaggagtacttcgcctgcgtgagcagcggcaacagcaacgccaacagccggggccccagcttctctagcggcctggtgccactgtccctgagagggagccacatgggccccatggagatctacaaaaccgtgagcgcctggaagcggcagcctgtgcgcgtgctgagcctgtttcggaatatcgataaagtcctgaaaagcctgggattcctggagagcggctctggctccggcggtggcaccctgaagtacgtggaggatgtgacaaacgtggtcagacgggatgtggagaagtggggccccttcgatctggtgtacggcagcacccaacccctgggcagctcttgtgaccggtgccctggctggtacatgtttcagttccaccggatcctgcagtacgccctgccgagacaggagtcccagcggccattcttttggattttcatggacaacttgctgctgaccgaggatgaccaggaaactaccactcggttcctgcagaccgaagccgtgaccctgcaggacgtgagaggccgggactaccagaacgccatgcgggtgtggtccaacatccctggactgaaaagcaagcacgcacctctgacccctaaagaagaggagtacctgcaggcccaggtgcggagcagaagcaagctggacgcccctaaggtggatctgctggtgaagaattgcctcctgcccctgagagagtacttcaagtatttcagccagaatagtctgcccctgggaggcagcggcggcggcgccctggtgacatttgaggacgtcgccgtgcggttcacccaggaggaatgggctctgctggatccttctcagaaaatcctgtaccgggacgtgatgagagagacataccggaatctgacctccgtgggcatcaactgggaatgttgggaccttgaagcctgcttcagaagcctgggaagaaacctgagagtgcaggtggtgaagagaaagtgcgagctgaccaacagcggcccctgcgccgagggcggcccaagcagcggcgcccctcctcccagcggcggcagcccagccggctccccaacctctaccgaggagggcacctctgagtccgccacccccgagagcggccctggcacctccaccgagcccagcgagggcagcgcacccggcagccctgccggcagccccacctccacagaggagggaaccagcaccgagcccagcgaaggcagcgccccaggcaccagcaccgagcctagtgagcaggagattaaacggatcaacaagatcagaagaagacttgtgaaagacagcaacaccaagaaggccggcaagacaggccccatgaaaaccctgctggttagagtgatgacacccgatctgagagagcggctggaaaacctgagaaagaagcctgaaaatatcccccagcccatcagcaatacatctagagccaacctgaataagctgctgaccgattacaccgaaatgaagaaggcgatcctgcatgtgtactgggaagagttccagaaggaccctgtgggcctgatgagccgggtggcccagcctgccagcaagaagatcgatcagaacaagctgaaacctgagatggacgagaagggcaacctgaccaccgccggctttgcctgctctcagtgtggccagcccctgttcgtgtacaagctggagcaggtgtctgagaagggcaaggcttacaccaactacttcggacggtgcaatgtggccgagcacgaaaagctgatcctgctggcccagctgaagcccgagaaggatagcgacgaagccgtgacatatagcctgggaaagtttgggcagagggccctggatttctacagcattcatgtgaccaaggagtccacccaccccgtgaagcccctggcccagatcgccggaaacagatacgcctccggacctgtgggaaaggccctgagcgacgcatgtatgggcacaatcgcctccttcctgtctaagtaccaggacatcatcatcgaacaccagaaggtggtgaagggcaaccagaagagactggagagcctgcgggagctggccggcaaggaaaacctggaataccctagcgtgaccctgccacctcagcctcacaccaaggagggcgttgatgcctacaacgaagtgatcgcccgggtgcgaatgtgggtgaacctgaacctgtggcagaagctgaagctaagcagagatgatgccaagcctctgctgagactgaagggattcccttcctttcctctggtcgagagacaggccaacgaagtggactggtgggacatggtgtgtaacgtgaagaagctgatcaacgagaaaaaggaggatggcaaggtgttttggcagaatctggctggctacaagagacaggaagccctgagaccatacctgagcagcgaggaagatcggaagaagggaaagaaattcgctcggtaccagctgggcgacctgctgctgcacctggaaaagaagcacggcgaggactggggaaaggtgtacgacgaggcctgggagcggattgacaagaaagtggaaggcctgagcaagcacatcaagctggaagaggaacggagaagcgaggacgcccagagcaaggccgccctgaccgactggctgcgggctaaggccagcttcgtgatcgagggcctgaaggaggccgacaaggacgagttctgcagatgcgagctgaagctgcagaagtggtacggggacctgcggggaaagcccttcgccatcgaagccgagaacagcatcctggacatcagcggcttcagcaagcagtacaactgtgccttcatctggcagaaggacggcgtgaagaagctgaacctgtacctgatcatcaactacttcaagggcggcaagctgcggttcaagaagatcaaacctgaagccttcgaagccaacagattctacaccgtgatcaacaaaaagagcggcgagatcgtgcccatggaggtgaacttcaacttcgacgaccccaacctgatcatcctgcctctggcctttggcaagagacagggcagagaattcatctggaacgacctgctgtccctggaaaccggcagcctgaagctggccaacggaagagtgatcgagaagacactgtacaacagaagaacccggcaggatgagcctgccctgttcgtggccctgaccttcgagcggcgggaggtcctggactcctccaatatcaaaccaatgaacctgatcggcgtggcaagaggcgaaaacatccccgccgtgatcgccctgaccgaccccgagggctgcccactgagccggtttaaggatagcctgggaaacccaacccacatcctgagaatcggcgagagctataaggagaagcagcggaccatccaggccaagaaggaggtggagcagcggagagccggcggctacagccggaagtacgccagcaaagccaagaatctggcagacgatatggtgagaaacaccgctagagatctgctgtactacgccgtgacccaggatgccatgctgatcttcgccaacctgagccggggcttcggccggcagggcaagcggaccttcatggccgagagacagtacacacggatggaggactggctgaccgccaagctggcctacgagggcctgagcaagacctacctgtccaagacactggcccagtacacctccaagacatgcagcaactgtgggtttaccatcaccagcgccgactacgacagggtgctggagaagctgaagaagacagcaacaggctggatgaccacaattaacggcaaggagctgaaggtggagggccagattacctactacaacagatacaagagacagaacgtagtcaaggacctgtccgtcgagctggatagactgagcgaagaatctgtgaacaacgacatctcctcctggacaaagggcagaagcggagaagctctgagcctcctgaagaaaagattctcccatagacccgtgcaggagaagttcgtgtgcctgaactgcggcttcgagacacacgcagccgagcaagccgccctgaacatcgccagatcctggctgttcctgcggagccaggagtacaagaaataccagacaaacaagacaaccggcaacaccgataagagagccttcgtcgagacctggcagtccttttaccggaagaagcttaaggaggtgtggaaacctgccgtgcggtctggcggatctggcggaggctccgcccacgtgagcctgagcttcagggacgtggccatcgacctgagccaggaggagtgggagtgcctggaccccgtgcagagggccctgtacagggacgtgatgctggagaactacagcaacctggtgagcctgggctgcagcagccccaagcccgacgtgatcaccctgctggagcaggagaaggagccctggaccgtgatgagggagggcaccaggagctggtacaccgacctggagagcaagggcggcccaagcagcggcgcccctcctcccagcggcggcagcccagccggctccccaacctctaccgaggagggcacctctgagtccgccacccccgagagcggccctggcacctccaccgagcccagcgagggcagcgcacccggcagccctgccggcagccccacctccacagaggagggaaccagcaccgagcccagcgaaggcagcgccccaggcaccagcaccgagcctagtgagcaggagattaaacggatcaacaagatcagaagaagacttgtgaaagacagcaacaccaagaaggccggcaagacaggccccatgaaaaccctgctggttagagtgatgacacccgatctgagagagcggctggaaaacctgagaaagaagcctgaaaatatcccccagcccatcagcaatacatctagagccaacctgaataagctgctgaccgattacaccgaaatgaagaaggcgatcctgcatgtgtactgggaagagttccagaaggaccctgtgggcctgatgagccgggtggcccagcctgccagcaagaagatcgatcagaacaagctgaaacctgagatggacgagaagggcaacctgaccaccgccggctttgcctgctctcagtgtggccagcccctgttcgtgtacaagctggagcaggtgtctgagaagggcaaggcttacaccaactacttcggacggtgcaatgtggccgagcacgaaaagctgatcctgctggcccagctgaagcccgagaaggatagcgacgaagccgtgacatatagcctgggaaagtttgggcagagggccctggatttctacagcattcatgtgaccaaggagtccacccaccccgtgaagcccctggcccagatcgccggaaacagatacgcctccggacctgtgggaaaggccctgagcgacgcatgtatgggcacaatcgcctccttcctgtctaagtaccaggacatcatcatcgaacaccagaaggtggtgaagggcaaccagaagagactggagagcctgcgggagctggccggcaaggaaaacctggaataccctagcgtgaccctgccacctcagcctcacaccaaggagggcgttgatgcctacaacgaagtgatcgcccgggtgcgaatgtgggtgaacctgaacctgtggcagaagctgaagctaagcagagatgatgccaagcctctgctgagactgaagggattcccttcctttcctctggtcgagagacaggccaacgaagtggactggtgggacatggtgtgtaacgtgaagaagctgatcaacgagaaaaaggaggatggcaaggtgttttggcagaatctggctggctacaagagacaggaagccctgagaccatacctgagcagcgaggaagatcggaagaagggaaagaaattcgctcggtaccagctgggcgacctgctgctgcacctggaaaagaagcacggcgaggactggggaaaggtgtacgacgaggcctgggagcggattgacaagaaagtggaaggcctgagcaagcacatcaagctggaagaggaacggagaagcgaggacgcccagagcaaggccgccctgaccgactggctgcgggctaaggccagcttcgtgatcgagggcctgaaggaggccgacaaggacgagttctgcagatgcgagctgaagctgcagaagtggtacggggacctgcggggaaagcccttcgccatcgaagccgagaacagcatcctggacatcagcggcttcagcaagcagtacaactgtgccttcatctggcagaaggacggcgtgaagaagctgaacctgtacctgatcatcaactacttcaagggcggcaagctgcggttcaagaagatcaaacctgaagccttcgaagccaacagattctacaccgtgatcaacaaaaagagcggcgagatcgtgcccatggaggtgaacttcaacttcgacgaccccaacctgatcatcctgcctctggcctttggcaagagacagggcagagaattcatctggaacgacctgctgtccctggaaaccggcagcctgaagctggccaacggaagagtgatcgagaagacactgtacaacagaagaacccggcaggatgagcctgccctgttcgtggccctgaccttcgagcggcgggaggtcctggactcctccaatatcaaaccaatgaacctgatcggcgtggcaagaggcgaaaacatccccgccgtgatcgccctgaccgaccccgagggctgcccactgagccggtttaaggatagcctgggaaacccaacccacatcctgagaatcggcgagagctataaggagaagcagcggaccatccaggccaagaaggaggtggagcagcggagagccggcggctacagccggaagtacgccagcaaagccaagaatctggcagacgatatggtgagaaacaccgctagagatctgctgtactacgccgtgacccaggatgccatgctgatcttcgccaacctgagccggggcttcggccggcagggcaagcggaccttcatggccgagagacagtacacacggatggaggactggctgaccgccaagctggcctacgagggcctgagcaagacctacctgtccaagacactggcccagtacacctccaagacatgcagcaactgtgggtttaccatcaccagcgccgactacgacagggtgctggagaagctgaagaagacagcaacaggctggatgaccacaattaacggcaaggagctgaaggtggagggccagattacctactacaacagatacaagagacagaacgtagtcaaggacctgtccgtcgagctggatagactgagcgaagaatctgtgaacaacgacatctcctcctggacaaagggcagaagcggagaagctctgagcctcctgaagaaaagattctcccatagacccgtgcaggagaagttcgtgtgcctgaactgcggcttcgagacacacgcagccgagcaagccgccctgaacatcgccagatcctggctgttcctgcggagccaggagtacaagaaataccagacaaacaagacaaccggcaacaccgataagagagccttcgtcgagacctggcagtccttttaccggaagaagcttaaggaggtgtggaaacctgccgtgcggtctggcggatctggcggaggctcctgcccacgtgagcctgagcttcagggacgtggccatcgacctgagccaggaggagtgggagtgcctggaccccgtgcagagggccctgtacagggacgtgatgctggagaactacagcaacctggtgagcctgggctgcagcagccccaagcccgacgtgatcaccctgctggagcaggagaaggagccctggaccgtgatgagggagggcaccaggagctggtacaccgacctggagagcaagggatctggctccggcagcggccccaagaaaaagagaaaagtctaagctgccttctgcggggcttgccttctggccatgcccttcttctctcccttgcacctgtacctcttggtctttgaataaagcctgagtaggaaggctagcaaaaaaaaaaaaaaaaaaaaaaaaaaaaaaaaaaaaaaaaaaaaaaaaaaaaaaaaaaaaaaaaaaaaaaaaaaaaaaaa

SEQ ID NO: 15975 - RNA, 9485 nt, synthetic construct
  source 1..9485: mol_type = other RNA
aggaaataagagagaaaagaagagtaagaagaaatataagagccaccatggcccctaagaagaagcgtaaagtgagccggatggaacgcctcgtctacgaggtgcggcagaagtgcagaaacatcgaggacatctgcatctcctgcggatctctgaacgtgaccctggagcacccactgttcatcggcggcatgtgccagaactgtaaaaactgttttctggagtgtgcctatcaatacgacgatgacggctaccagagctactgcaccatctgttgcggcggaagagaggtgctgatgtgtggaaataacaactgctgccggtgcttctgcgtggaatgcgtggacctgctggtgggccccggcgccgcccaggccgctattaaggaagatccttggaactgctacatgtgcggccacaagggcacatacggcctgctgagacggagagaggactggcctagcagactgcagatgttcttcgccaataaccacgaccaggagttcgacccccctaaggtgtaccctcccgtccccgccgagaagagaaagcccatccgggtcctgagcctgttcgatggcatcgccaccggtctgctggtgctgaaggacctgggcatccaggtggataggtacattgcctccgaggtgtgcgaggactccatcaccgtgggaatggtgcgtcatcagggcaagatcatgtacgtgggcgacgtgcggagcgtgacacagaagcatatccaggagtggggccctttcgacctggtgatcggcggcagcccttgcaatgacctgagcatcgtgaacccagcccggaagggcctgtacgagggaaccggcagactgttcttcgagttttacagactgctgcacgacgcccggcctaaggaaggcgacgaccggcccttcttttggctgttcgagaatgtggtggccatgggagtcagcgacaagcgggatattagccggttcctggagagcaaccccgtgatgatcgatgccaaggaagtgagcgccgcccaccgggccagatacttctggggcaatctgcctggcatgaacagacccctggccagcaccgtgaacgacaagctggagctgcaggagtgcctggagcacggccggatcgccaagttcagcaaggtgagaaccatcaccacccgaagcaacagcatcaaacaaggcaaggaccagcactttcctgtgttcatgaacgagaaggaggacatcctgtggtgtaccgagatggagagagtgttcgggttcccagtccactacacagatgtcagcaacatgtctagactggccagacagagactgctgggaagaagctggtccgtccctgtgatcagacacctgttcgcccctctgaaggagtacttcgcctgcgtgagcagcggcaacagcaacgccaacagccggggccccagcttctctagcggcctggtgccactgtccctgagagggagccacatgggccccatggagatctacaaaaccgtgagcgcctggaagcggcagcctgtgcgcgtgctgagcctgtttcggaatatcgataaagtcctgaaaagcctgggattcctggagagcggctctggctccggcggtggcaccctgaagtacgtggaggatgtgacaaacgtggtcagacgggatgtggagaagtggggccccttcgatctggtgtacggcagcacccaacccctgggcagctcttgtgaccggtgccctggctggtacatgtttcagttccaccggatcctgcagtacgccctgccgagacaggagtcccagcggccattcttttggattttcatggacaacttgctgctgaccgaggatgaccaggaaactaccactcggttcctgcagaccgaagccgtgaccctgcaggacgtgagaggccgggactaccagaacgccatgcgggtgtggtccaacatccctggactgaaaagcaagcacgcacctctgacccctaaagaagaggagtacctgcaggcccaggtgcggagcagaagcaagctggacgcccctaaggtggatctgctggtgaagaattgcctcctgcccctgagagagtacttcaagtatttcagccagaatagtctgcccctgggaggcagcggcggcggcgccctggtgacatttgaggacgtcgccgtgcggttcacccaggaggaatgggctctgctggatccttctcagaaaatcctgtaccgggacgtgatgagagagacataccggaatctgacctccgtgggcatcaactgggaatgttgggaccttgaagcctgcttcagaagcctgggaagaaacctgagagtgcaggtggtgaagagaaagtgcgagctgaccaacagcggcccctgcgccgagggcggcccaagcagcggcgcccctcctcccagcggcggcagcccagccggctccccaacctctaccgaggagggcacctctgagtccgccacccccgagagcggccctggcacctccaccgagcccagcgagggcagcgcacccggcagccctgccggcagccccacctccacagaggagggaaccagcaccgagcccagcgaaggcagcgccccaggcaccagcaccgagcctagtgagcaggagattaaacggatcaacaagatcagaagaagacttgtgaaagacagcaacaccaagaaggccggcaagacaggccccatgaaaaccctgctggttagagtgatgacacccgatctgagagagcggctggaaaacctgagaaagaagcctgaaaatatcccccagcccatcagcaatacatctagagccaacctgaataagctgctgaccgattacaccgaaatgaagaaggcgatcctgcatgtgtactgggaagagttccagaaggaccctgtgggcctgatgagccgggtggcccagcctgccagcaagaagatcgatcagaacaagctgaaacctgagatggacgagaagggcaacctgaccaccgccggctttgcctgctctcagtgtggccagcccctgttcgtgtacaagctggagcaggtgtctgagaagggcaaggcttacaccaactacttcggacggtgcaatgtggccgagcacgaaaagctgatcctgctggcccagctgaagcccgagaaggatagcgacgaagccgtgacatatagcctgggaaagtttgggcagagggccctggatttctacagcattcatgtgaccaaggagtccacccaccccgtgaagcccctggcccagatcgccggaaacagatacgcctccggacctgtgggaaaggccctgagcgacgcatgtatgggcacaatcgcctccttcctgtctaagtaccaggacatcatcatcgaacaccagaaggtggtgaagggcaaccagaagagactggagagcctgcgggagctggccggcaaggaaaacctggaataccctagcgtgaccctgccacctcagcctcacaccaaggagggcgttgatgcctacaacgaagtgatcgcccgggtgcgaatgtgggtgaacctgaacctgtggcagaagctgaagctaagcagagatgatgccaagcctctgctgagactgaagggattcccttcctttcctctggtcgagagacaggccaacgaagtggactggtgggacatggtgtgtaacgtgaagaagctgatcaacgagaaaaaggaggatggcaaggtgttttggcagaatctggctggctacaagagacaggaagccctgagaccatacctgagcagcgaggaagatcggaagaagggaaagaaattcgctcggtaccagctgggcgacctgctgctgcacctggaaaagaagcacggcgaggactggggaaaggtgtacgacgaggcctgggagcggattgacaagaaagtggaaggcctgagcaagcacatcaagctggaagaggaacggagaagcgaggacgcccagagcaaggccgccctgaccgactggctgcgggctaaggccagcttcgtgatcgagggcctgaaggaggccgacaaggacgagttctgcagatgcgagctgaagctgcagaagtggtacggggacctgcggggaaagcccttcgccatcgaagccgagaacagcatcctggacatcagcggcttcagcaagcagtacaactgtgccttcatctggcagaaggacggcgtgaagaagctgaacctgtacctgatcatcaactacttcaagggcggcaagctgcggttcaagaagatcaaacctgaagccttcgaagccaacagattctacaccgtgatcaacaaaaagagcggcgagatcgtgcccatggaggtgaacttcaacttcgacgaccccaacctgatcatcctgcctctggcctttggcaagagacagggcagagaattcatctggaacgacctgctgtccctggaaaccggcagcctgaagctggccaacggaagagtgatcgagaagacactgtacaacagaagaacccggcaggatgagcctgccctgttcgtggccctgaccttcgagcggcgggaggtcctggactcctccaatatcaaaccaatgaacctgatcggcgtggcaagaggcgaaaacatccccgccgtgatcgccctgaccgaccccgagggctgcccactgagccggtttaaggatagcctgggaaacccaacccacatcctgagaatcggcgagagctataaggagaagcagcggaccatccaggccaagaaggaggtggagcagcggagagccggcggctacagccggaagtacgccagcaaagccaagaatctggcagacgatatggtgagaaacaccgctagagatctgctgtactacgccgtgacccaggatgccatgctgatcttcgccaacctgagccggggcttcggccggcagggcaagcggaccttcatggccgagagacagtacacacggatggaggactggctgaccgccaagctggcctacgagggcctgagcaagacctacctgtccaagacactggcccagtacacctccaagacatgcagcaactgtgggtttaccatcaccagcgccgactacgacagggtgctggagaagctgaagaagacagcaacaggctggatgaccacaattaacggcaaggagctgaaggtggagggccagattacctactacaacagatacaagagacagaacgtagtcaaggacctgtccgtcgagctggatagactgagcgaagaatctgtgaacaacgacatctcctcctggacaaagggcagaagcggagaagctctgagcctcctgaagaaaagattctcccatagacccgtgcaggagaagttcgtgtgcctgaactgcggcttcgagacacacgcagccgagcaagccgccctgaacatcgccagatcctggctgttcctgcggagccaggagtacaagaaataccagacaaacaagacaaccggcaacaccgataagagagccttcgtcgagacctggcagtccttttaccggaagaagcttaaggaggtgtggaaacctgccgtgcggtctggcggatctggcggaggctcccaccagggcctgctgaccttcagggacgtggccgtggagttcagcctggaggagtggggcaggctgacccacacccagaggcagctgtacagggacgtgatgctggagaactacggccacctgctgttcctgggcctgatcgtgagcaagcccgacctggtgagcttcctggagcagaagaaggagccctggaacctgaagaggaagaagaccgtggccttccaccccgccatcagcagccacggcggcccaagcagcggcgcccctcctcccagcggcggcagcccagccggctccccaacctctaccgaggagggcacctctgagtccgccacccccgagagcggccctggcacctccaccgagcccagcgagggcagcgcacccggcagccctgccggcagccccacctccacagaggagggaaccagcaccgagcccagcgaaggcagcgccccaggcaccagcaccgagcctagtgagcaggagattaaacggatcaacaagatcagaagaagacttgtgaaagacagcaacaccaagaaggccggcaagacaggccccatgaaaaccctgctggttagagtgatgacacccgatctgagagagcggctggaaaacctgagaaagaagcctgaaaatatcccccagcccatcagcaatacatctagagccaacctgaataagctgctgaccgattacaccgaaatgaagaaggcgatcctgcatgtgtactgggaagagttccagaaggaccctgtgggcctgatgagccgggtggcccagcctgccagcaagaagatcgatcagaacaagctgaaacctgagatggacgagaagggcaacctgaccaccgccggctttgcctgctctcagtgtggccagcccctgttcgtgtacaagctggagcaggtgtctgagaagggcaaggcttacaccaactacttcggacggtgcaatgtggccgagcacgaaaagctgatcctgctggcccagctgaagcccgagaaggatagcgacgaagccgtgacatatagcctgggaaagtttgggcagagggccctggatttctacagcattcatgtgaccaaggagtccacccaccccgtgaagcccctggcccagatcgccggaaacagatacgcctccggacctgtgggaaaggccctgagcgacgcatgtatgggcacaatcgcctccttcctgtctaagtaccaggacatcatcatcgaacaccagaaggtggtgaagggcaaccagaagagactggagagcctgcgggagctggccggcaaggaaaacctggaataccctagcgtgaccctgccacctcagcctcacaccaaggagggcgttgatgcctacaacgaagtgatcgcccgggtgcgaatgtgggtgaacctgaacctgtggcagaagctgaagctaagcagagatgatgccaagcctctgctgagactgaagggattcccttcctttcctctggtcgagagacaggccaacgaagtggactggtgggacatggtgtgtaacgtgaagaagctgatcaacgagaaaaaggaggatggcaaggtgttttggcagaatctggctggctacaagagacaggaagccctgagaccatacctgagcagcgaggaagatcggaagaagggaaagaaattcgctcggtaccagctgggcgacctgctgctgcacctggaaaagaagcacggcgaggactggggaaaggtgtacgacgaggcctgggagcggattgacaagaaagtggaaggcctgagcaagcacatcaagctggaagaggaacggagaagcgaggacgcccagagcaaggccgccctgaccgactggctgcgggctaaggccagcttcgtgatcgagggcctgaaggaggccgacaaggacgagttctgcagatgcgagctgaagctgcagaagtggtacggggacctgcggggaaagcccttcgccatcgaagccgagaacagcatcctggacatcagcggcttcagcaagcagtacaactgtgccttcatctggcagaaggacggcgtgaagaagctgaacctgtacctgatcatcaactacttcaagggcggcaagctgcggttcaagaagatcaaacctgaagccttcgaagccaacagattctacaccgtgatcaacaaaaagagcggcgagatcgtgcccatggaggtgaacttcaacttcgacgaccccaacctgatcatcctgcctctggcctttggcaagagacagggcagagaattcatctggaacgacctgctgtccctggaaaccggcagcctgaagctggccaacggaagagtgatcgagaagacactgtacaacagaagaacccggcaggatgagcctgccctgttcgtggccctgaccttcgagcggcgggaggtcctggactcctccaatatcaaaccaatgaacctgatcggcgtggcaagaggcgaaaacatccccgccgtgatcgccctgaccgaccccgagggctgcccactgagccggtttaaggatagcctgggaaacccaacccacatcctgagaatcggcgagagctataaggagaagcagcggaccatccaggccaagaaggaggtggagcagcggagagccggcggctacagccggaagtacgccagcaaagccaagaatctggcagacgatatggtgagaaacaccgctagagatctgctgtactacgccgtgacccaggatgccatgctgatcttcgccaacctgagccggggcttcggccggcagggcaagcggaccttcatggccgagagacagtacacacggatggaggactggctgaccgccaagctggcctacgagggcctgagcaagacctacctgtccaagacactggcccagtacacctccaagacatgcagcaactgtgggtttaccatcaccagcgccgactacgacagggtgctggagaagctgaagaagacagcaacaggctggatgaccacaattaacggcaaggagctgaaggtggagggccagattacctactacaacagatacaagagacagaacgtagtcaaggacctgtccgtcgagctggatagactgagcgaagaatctgtgaacaacgacatctcctcctggacaaagggcagaagcggagaagctctgagcctcctgaagaaaagattctcccatagacccgtgcaggagaagttcgtgtgcctgaactgcggcttcgagacacacgcagccgagcaagccgccctgaacatcgccagatcctggctgttcctgcggagccaggagtacaagaaataccagacaaacaagacaaccggcaacaccgataagagagccttcgtcgagacctggcagtccttttaccggaagaagcttaaggaggtgtggaaacctgccgtgcggtctggcggatctggcggaggctcctcaccagggcctgctgaccttcagggacgtggccgtggagttcagcctggaggagtggggcaggctgacccacacccagaggcagctgtacagggacgtgatgctggagaactacggccacctgctgttcctgggcctgatcgtgagcaagcccgacctggtgagcttcctggagcagaagaaggagccctggaacctgaagaggaagaagaccgtggccttccaccccgccatcagcagccacggatctggctccggcagcggccccaagaaaaagagaaaagtctaagctgccttctgcggggcttgccttctggccatgcccttcttctctcccttgcacctgtacctcttggtctttgaataaagcctgagtaggaaggctagcaaaaaaaaaaaaaaaaaaaaaaaaaaaaaaaaaaaaaaaaaaaaaaaaaaaaaaaaaaaaaaaaaaaaaaaaaaaaaaaa

SEQ ID NO: 15976 - RNA, 9485 nt, synthetic construct
  source 1..9485: mol_type = other RNA
aggaaataagagagaaaagaagagtaagaagaaatataagagccaccatggcccctaagaagaagcgtaaagtgagccggatggaacgcctcgtctacgaggtgcggcagaagtgcagaaacatcgaggacatctgcatctcctgcggatctctgaacgtgaccctggagcacccactgttcatcggcggcatgtgccagaactgtaaaaactgttttctggagtgtgcctatcaatacgacgatgacggctaccagagctactgcaccatctgttgcggcggaagagaggtgctgatgtgtggaaataacaactgctgccggtgcttctgcgtggaatgcgtggacctgctggtgggccccggcgccgcccaggccgctattaaggaagatccttggaactgctacatgtgcggccacaagggcacatacggcctgctgagacggagagaggactggcctagcagactgcagatgttcttcgccaataaccacgaccaggagttcgacccccctaaggtgtaccctcccgtccccgccgagaagagaaagcccatccgggtcctgagcctgttcgatggcatcgccaccggtctgctggtgctgaaggacctgggcatccaggtggataggtacattgcctccgaggtgtgcgaggactccatcaccgtgggaatggtgcgtcatcagggcaagatcatgtacgtgggcgacgtgcggagcgtgacacagaagcatatccaggagtggggccctttcgacctggtgatcggcggcagcccttgcaatgacctgagcatcgtgaacccagcccggaagggcctgtacgagggaaccggcagactgttcttcgagttttacagactgctgcacgacgcccggcctaaggaaggcgacgaccggcccttcttttggctgttcgagaatgtggtggccatgggagtcagcgacaagcgggatattagccggttcctggagagcaaccccgtgatgatcgatgccaaggaagtgagcgccgcccaccgggccagatacttctggggcaatctgcctggcatgaacagacccctggccagcaccgtgaacgacaagctggagctgcaggagtgcctggagcacggccggatcgccaagttcagcaaggtgagaaccatcaccacccgaagcaacagcatcaaacaaggcaaggaccagcactttcctgtgttcatgaacgagaaggaggacatcctgtggtgtaccgagatggagagagtgttcgggttcccagtccactacacagatgtcagcaacatgtctagactggccagacagagactgctgggaagaagctggtccgtccctgtgatcagacacctgttcgcccctctgaaggagtacttcgcctgcgtgagcagcggcaacagcaacgccaacagccggggccccagcttctctagcggcctggtgccactgtccctgagagggagccacatgggccccatggagatctacaaaaccgtgagcgcctggaagcggcagcctgtgcgcgtgctgagcctgtttcggaatatcgataaagtcctgaaaagcctgggattcctggagagcggctctggctccggcggtggcaccctgaagtacgtggaggatgtgacaaacgtggtcagacgggatgtggagaagtggggccccttcgatctggtgtacggcagcacccaacccctgggcagctcttgtgaccggtgccctggctggtacatgtttcagttccaccggatcctgcagtacgccctgccgagacaggagtcccagcggccattcttttggattttcatggacaacttgctgctgaccgaggatgaccaggaaactaccactcggttcctgcagaccgaagccgtgaccctgcaggacgtgagaggccgggactaccagaacgccatgcgggtgtggtccaacatccctggactgaaaagcaagcacgcacctctgacccctaaagaagaggagtacctgcaggcccaggtgcggagcagaagcaagctggacgcccctaaggtggatctgctggtgaagaattgcctcctgcccctgagagagtacttcaagtatttcagccagaatagtctgcccctgggaggcagcggcggcggcgccctggtgacatttgaggacgtcgccgtgcggttcacccaggaggaatgggctctgctggatccttctcagaaaatcctgtaccgggacgtgatgagagagacataccggaatctgacctccgtgggcatcaactgggaatgttgggaccttgaagcctgcttcagaagcctgggaagaaacctgagagtgcaggtggtgaagagaaagtgcgagctgaccaacagcggcccctgcgccgagggcggcccaagcagcggcgcccctcctcccagcggcggcagcccagccggctccccaacctctaccgaggagggcacctctgagtccgccacccccgagagcggccctggcacctccaccgagcccagcgagggcagcgcacccggcagccctgccggcagccccacctccacagaggagggaaccagcaccgagcccagcgaaggcagcgccccaggcaccagcaccgagcctagtgagcaggagattaaacggatcaacaagatcagaagaagacttgtgaaagacagcaacaccaagaaggccggcaagacaggccccatgaaaaccctgctggttagagtgatgacacccgatctgagagagcggctggaaaacctgagaaagaagcctgaaaatatcccccagcccatcagcaatacatctagagccaacctgaataagctgctgaccgattacaccgaaatgaagaaggcgatcctgcatgtgtactgggaagagttccagaaggaccctgtgggcctgatgagccgggtggcccagcctgccagcaagaagatcgatcagaacaagctgaaacctgagatggacgagaagggcaacctgaccaccgccggctttgcctgctctcagtgtggccagcccctgttcgtgtacaagctggagcaggtgtctgagaagggcaaggcttacaccaactacttcggacggtgcaatgtggccgagcacgaaaagctgatcctgctggcccagctgaagcccgagaaggatagcgacgaagccgtgacatatagcctgggaaagtttgggcagagggccctggatttctacagcattcatgtgaccaaggagtccacccaccccgtgaagcccctggcccagatcgccggaaacagatacgcctccggacctgtgggaaaggccctgagcgacgcatgtatgggcacaatcgcctccttcctgtctaagtaccaggacatcatcatcgaacaccagaaggtggtgaagggcaaccagaagagactggagagcctgcgggagctggccggcaaggaaaacctggaataccctagcgtgaccctgccacctcagcctcacaccaaggagggcgttgatgcctacaacgaagtgatcgcccgggtgcgaatgtgggtgaacctgaacctgtggcagaagctgaagctaagcagagatgatgccaagcctctgctgagactgaagggattcccttcctttcctctggtcgagagacaggccaacgaagtggactggtgggacatggtgtgtaacgtgaagaagctgatcaacgagaaaaaggaggatggcaaggtgttttggcagaatctggctggctacaagagacaggaagccctgagaccatacctgagcagcgaggaagatcggaagaagggaaagaaattcgctcggtaccagctgggcgacctgctgctgcacctggaaaagaagcacggcgaggactggggaaaggtgtacgacgaggcctgggagcggattgacaagaaagtggaaggcctgagcaagcacatcaagctggaagaggaacggagaagcgaggacgcccagagcaaggccgccctgaccgactggctgcgggctaaggccagcttcgtgatcgagggcctgaaggaggccgacaaggacgagttctgcagatgcgagctgaagctgcagaagtggtacggggacctgcggggaaagcccttcgccatcgaagccgagaacagcatcctggacatcagcggcttcagcaagcagtacaactgtgccttcatctggcagaaggacggcgtgaagaagctgaacctgtacctgatcatcaactacttcaagggcggcaagctgcggttcaagaagatcaaacctgaagccttcgaagccaacagattctacaccgtgatcaacaaaaagagcggcgagatcgtgcccatggaggtgaacttcaacttcgacgaccccaacctgatcatcctgcctctggcctttggcaagagacagggcagagaattcatctggaacgacctgctgtccctggaaaccggcagcctgaagctggccaacggaagagtgatcgagaagacactgtacaacagaagaacccggcaggatgagcctgccctgttcgtggccctgaccttcgagcggcgggaggtcctggactcctccaatatcaaaccaatgaacctgatcggcgtggcaagaggcgaaaacatccccgccgtgatcgccctgaccgaccccgagggctgcccactgagccggtttaaggatagcctgggaaacccaacccacatcctgagaatcggcgagagctataaggagaagcagcggaccatccaggccaagaaggaggtggagcagcggagagccggcggctacagccggaagtacgccagcaaagccaagaatctggcagacgatatggtgagaaacaccgctagagatctgctgtactacgccgtgacccaggatgccatgctgatcttcgccaacctgagccggggcttcggccggcagggcaagcggaccttcatggccgagagacagtacacacggatggaggactggctgaccgccaagctggcctacgagggcctgagcaagacctacctgtccaagacactggcccagtacacctccaagacatgcagcaactgtgggtttaccatcaccagcgccgactacgacagggtgctggagaagctgaagaagacagcaacaggctggatgaccacaattaacggcaaggagctgaaggtggagggccagattacctactacaacagatacaagagacagaacgtagtcaaggacctgtccgtcgagctggatagactgagcgaagaatctgtgaacaacgacatctcctcctggacaaagggcagaagcggagaagctctgagcctcctgaagaaaagattctcccatagacccgtgcaggagaagttcgtgtgcctgaactgcggcttcgagacacacgcagccgagcaagccgccctgaacatcgccagatcctggctgttcctgcggagccaggagtacaagaaataccagacaaacaagacaaccggcaacaccgataagagagccttcgtcgagacctggcagtccttttaccggaagaagcttaaggaggtgtggaaacctgccgtgcggtctggcggatctggcggaggctccagcgtggagatgctgagcttcagggacgtggccatcgacttcagcgccggcgagctggagtgcctggagcccgcccagtgggacctgtacagggacgtgatgctggagaacttcagccacctggtgttcctgggcttcagcttcagcaagcccctgctggtgaggttcctggagaagaaccaggagctgaggaacgtgaagaggaaggccgccaccgtgcccaggggcaagaagccctacaagggcggcccaagcagcggcgcccctcctcccagcggcggcagcccagccggctccccaacctctaccgaggagggcacctctgagtccgccacccccgagagcggccctggcacctccaccgagcccagcgagggcagcgcacccggcagccctgccggcagccccacctccacagaggagggaaccagcaccgagcccagcgaaggcagcgccccaggcaccagcaccgagcctagtgagcaggagattaaacggatcaacaagatcagaagaagacttgtgaaagacagcaacaccaagaaggccggcaagacaggccccatgaaaaccctgctggttagagtgatgacacccgatctgagagagcggctggaaaacctgagaaagaagcctgaaaatatcccccagcccatcagcaatacatctagagccaacctgaataagctgctgaccgattacaccgaaatgaagaaggcgatcctgcatgtgtactgggaagagttccagaaggaccctgtgggcctgatgagccgggtggcccagcctgccagcaagaagatcgatcagaacaagctgaaacctgagatggacgagaagggcaacctgaccaccgccggctttgcctgctctcagtgtggccagcccctgttcgtgtacaagctggagcaggtgtctgagaagggcaaggcttacaccaactacttcggacggtgcaatgtggccgagcacgaaaagctgatcctgctggcccagctgaagcccgagaaggatagcgacgaagccgtgacatatagcctgggaaagtttgggcagagggccctggatttctacagcattcatgtgaccaaggagtccacccaccccgtgaagcccctggcccagatcgccggaaacagatacgcctccggacctgtgggaaaggccctgagcgacgcatgtatgggcacaatcgcctccttcctgtctaagtaccaggacatcatcatcgaacaccagaaggtggtgaagggcaaccagaagagactggagagcctgcgggagctggccggcaaggaaaacctggaataccctagcgtgaccctgccacctcagcctcacaccaaggagggcgttgatgcctacaacgaagtgatcgcccgggtgcgaatgtgggtgaacctgaacctgtggcagaagctgaagctaagcagagatgatgccaagcctctgctgagactgaagggattcccttcctttcctctggtcgagagacaggccaacgaagtggactggtgggacatggtgtgtaacgtgaagaagctgatcaacgagaaaaaggaggatggcaaggtgttttggcagaatctggctggctacaagagacaggaagccctgagaccatacctgagcagcgaggaagatcggaagaagggaaagaaattcgctcggtaccagctgggcgacctgctgctgcacctggaaaagaagcacggcgaggactggggaaaggtgtacgacgaggcctgggagcggattgacaagaaagtggaaggcctgagcaagcacatcaagctggaagaggaacggagaagcgaggacgcccagagcaaggccgccctgaccgactggctgcgggctaaggccagcttcgtgatcgagggcctgaaggaggccgacaaggacgagttctgcagatgcgagctgaagctgcagaagtggtacggggacctgcggggaaagcccttcgccatcgaagccgagaacagcatcctggacatcagcggcttcagcaagcagtacaactgtgccttcatctggcagaaggacggcgtgaagaagctgaacctgtacctgatcatcaactacttcaagggcggcaagctgcggttcaagaagatcaaacctgaagccttcgaagccaacagattctacaccgtgatcaacaaaaagagcggcgagatcgtgcccatggaggtgaacttcaacttcgacgaccccaacctgatcatcctgcctctggcctttggcaagagacagggcagagaattcatctggaacgacctgctgtccctggaaaccggcagcctgaagctggccaacggaagagtgatcgagaagacactgtacaacagaagaacccggcaggatgagcctgccctgttcgtggccctgaccttcgagcggcgggaggtcctggactcctccaatatcaaaccaatgaacctgatcggcgtggcaagaggcgaaaacatccccgccgtgatcgccctgaccgaccccgagggctgcccactgagccggtttaaggatagcctgggaaacccaacccacatcctgagaatcggcgagagctataaggagaagcagcggaccatccaggccaagaaggaggtggagcagcggagagccggcggctacagccggaagtacgccagcaaagccaagaatctggcagacgatatggtgagaaacaccgctagagatctgctgtactacgccgtgacccaggatgccatgctgatcttcgccaacctgagccggggcttcggccggcagggcaagcggaccttcatggccgagagacagtacacacggatggaggactggctgaccgccaagctggcctacgagggcctgagcaagacctacctgtccaagacactggcccagtacacctccaagacatgcagcaactgtgggtttaccatcaccagcgccgactacgacagggtgctggagaagctgaagaagacagcaacaggctggatgaccacaattaacggcaaggagctgaaggtggagggccagattacctactacaacagatacaagagacagaacgtagtcaaggacctgtccgtcgagctggatagactgagcgaagaatctgtgaacaacgacatctcctcctggacaaagggcagaagcggagaagctctgagcctcctgaagaaaagattctcccatagacccgtgcaggagaagttcgtgtgcctgaactgcggcttcgagacacacgcagccgagcaagccgccctgaacatcgccagatcctggctgttcctgcggagccaggagtacaagaaataccagacaaacaagacaaccggcaacaccgataagagagccttcgtcgagacctggcagtccttttaccggaagaagcttaaggaggtgtggaaacctgccgtgcggtctggcggatctggcggaggctcctagcgtggagatgctgagcttcagggacgtggccatcgacttcagcgccggcgagctggagtgcctggagcccgcccagtgggacctgtacagggacgtgatgctggagaacttcagccacctggtgttcctgggcttcagcttcagcaagcccctgctggtgaggttcctggagaagaaccaggagctgaggaacgtgaagaggaaggccgccaccgtgcccaggggcaagaagccctacaagggatctggctccggcagcggccccaagaaaaagagaaaagtctaagctgccttctgcggggcttgccttctggccatgcccttcttctctcccttgcacctgtacctcttggtctttgaataaagcctgagtaggaaggctagcaaaaaaaaaaaaaaaaaaaaaaaaaaaaaaaaaaaaaaaaaaaaaaaaaaaaaaaaaaaaaaaaaaaaaaaaaaaaaaaa

SEQ ID NO: 15977 - RNA, 9485 nt, synthetic construct
  source 1..9485: mol_type = other RNA
aggaaataagagagaaaagaagagtaagaagaaatataagagccaccatggcccctaagaagaagcgtaaagtgagccggatggaacgcctcgtctacgaggtgcggcagaagtgcagaaacatcgaggacatctgcatctcctgcggatctctgaacgtgaccctggagcacccactgttcatcggcggcatgtgccagaactgtaaaaactgttttctggagtgtgcctatcaatacgacgatgacggctaccagagctactgcaccatctgttgcggcggaagagaggtgctgatgtgtggaaataacaactgctgccggtgcttctgcgtggaatgcgtggacctgctggtgggccccggcgccgcccaggccgctattaaggaagatccttggaactgctacatgtgcggccacaagggcacatacggcctgctgagacggagagaggactggcctagcagactgcagatgttcttcgccaataaccacgaccaggagttcgacccccctaaggtgtaccctcccgtccccgccgagaagagaaagcccatccgggtcctgagcctgttcgatggcatcgccaccggtctgctggtgctgaaggacctgggcatccaggtggataggtacattgcctccgaggtgtgcgaggactccatcaccgtgggaatggtgcgtcatcagggcaagatcatgtacgtgggcgacgtgcggagcgtgacacagaagcatatccaggagtggggccctttcgacctggtgatcggcggcagcccttgcaatgacctgagcatcgtgaacccagcccggaagggcctgtacgagggaaccggcagactgttcttcgagttttacagactgctgcacgacgcccggcctaaggaaggcgacgaccggcccttcttttggctgttcgagaatgtggtggccatgggagtcagcgacaagcgggatattagccggttcctggagagcaaccccgtgatgatcgatgccaaggaagtgagcgccgcccaccgggccagatacttctggggcaatctgcctggcatgaacagacccctggccagcaccgtgaacgacaagctggagctgcaggagtgcctggagcacggccggatcgccaagttcagcaaggtgagaaccatcaccacccgaagcaacagcatcaaacaaggcaaggaccagcactttcctgtgttcatgaacgagaaggaggacatcctgtggtgtaccgagatggagagagtgttcgggttcccagtccactacacagatgtcagcaacatgtctagactggccagacagagactgctgggaagaagctggtccgtccctgtgatcagacacctgttcgcccctctgaaggagtacttcgcctgcgtgagcagcggcaacagcaacgccaacagccggggccccagcttctctagcggcctggtgccactgtccctgagagggagccacatgggccccatggagatctacaaaaccgtgagcgcctggaagcggcagcctgtgcgcgtgctgagcctgtttcggaatatcgataaagtcctgaaaagcctgggattcctggagagcggctctggctccggcggtggcaccctgaagtacgtggaggatgtgacaaacgtggtcagacgggatgtggagaagtggggccccttcgatctggtgtacggcagcacccaacccctgggcagctcttgtgaccggtgccctggctggtacatgtttcagttccaccggatcctgcagtacgccctgccgagacaggagtcccagcggccattcttttggattttcatggacaacttgctgctgaccgaggatgaccaggaaactaccactcggttcctgcagaccgaagccgtgaccctgcaggacgtgagaggccgggactaccagaacgccatgcgggtgtggtccaacatccctggactgaaaagcaagcacgcacctctgacccctaaagaagaggagtacctgcaggcccaggtgcggagcagaagcaagctggacgcccctaaggtggatctgctggtgaagaattgcctcctgcccctgagagagtacttcaagtatttcagccagaatagtctgcccctgggaggcagcggcggcggcgccctggtgacatttgaggacgtcgccgtgcggttcacccaggaggaatgggctctgctggatccttctcagaaaatcctgtaccgggacgtgatgagagagacataccggaatctgacctccgtgggcatcaactgggaatgttgggaccttgaagcctgcttcagaagcctgggaagaaacctgagagtgcaggtggtgaagagaaagtgcgagctgaccaacagcggcccctgcgccgagggcggcccaagcagcggcgcccctcctcccagcggcggcagcccagccggctccccaacctctaccgaggagggcacctctgagtccgccacccccgagagcggccctggcacctccaccgagcccagcgagggcagcgcacccggcagccctgccggcagccccacctccacagaggagggaaccagcaccgagcccagcgaaggcagcgccccaggcaccagcaccgagcctagtgagcaggagattaaacggatcaacaagatcagaagaagacttgtgaaagacagcaacaccaagaaggccggcaagacaggccccatgaaaaccctgctggttagagtgatgacacccgatctgagagagcggctggaaaacctgagaaagaagcctgaaaatatcccccagcccatcagcaatacatctagagccaacctgaataagctgctgaccgattacaccgaaatgaagaaggcgatcctgcatgtgtactgggaagagttccagaaggaccctgtgggcctgatgagccgggtggcccagcctgccagcaagaagatcgatcagaacaagctgaaacctgagatggacgagaagggcaacctgaccaccgccggctttgcctgctctcagtgtggccagcccctgttcgtgtacaagctggagcaggtgtctgagaagggcaaggcttacaccaactacttcggacggtgcaatgtggccgagcacgaaaagctgatcctgctggcccagctgaagcccgagaaggatagcgacgaagccgtgacatatagcctgggaaagtttgggcagagggccctggatttctacagcattcatgtgaccaaggagtccacccaccccgtgaagcccctggcccagatcgccggaaacagatacgcctccggacctgtgggaaaggccctgagcgacgcatgtatgggcacaatcgcctccttcctgtctaagtaccaggacatcatcatcgaacaccagaaggtggtgaagggcaaccagaagagactggagagcctgcgggagctggccggcaaggaaaacctggaataccctagcgtgaccctgccacctcagcctcacaccaaggagggcgttgatgcctacaacgaagtgatcgcccgggtgcgaatgtgggtgaacctgaacctgtggcagaagctgaagctaagcagagatgatgccaagcctctgctgagactgaagggattcccttcctttcctctggtcgagagacaggccaacgaagtggactggtgggacatggtgtgtaacgtgaagaagctgatcaacgagaaaaaggaggatggcaaggtgttttggcagaatctggctggctacaagagacaggaagccctgagaccatacctgagcagcgaggaagatcggaagaagggaaagaaattcgctcggtaccagctgggcgacctgctgctgcacctggaaaagaagcacggcgaggactggggaaaggtgtacgacgaggcctgggagcggattgacaagaaagtggaaggcctgagcaagcacatcaagctggaagaggaacggagaagcgaggacgcccagagcaaggccgccctgaccgactggctgcgggctaaggccagcttcgtgatcgagggcctgaaggaggccgacaaggacgagttctgcagatgcgagctgaagctgcagaagtggtacggggacctgcggggaaagcccttcgccatcgaagccgagaacagcatcctggacatcagcggcttcagcaagcagtacaactgtgccttcatctggcagaaggacggcgtgaagaagctgaacctgtacctgatcatcaactacttcaagggcggcaagctgcggttcaagaagatcaaacctgaagccttcgaagccaacagattctacaccgtgatcaacaaaaagagcggcgagatcgtgcccatggaggtgaacttcaacttcgacgaccccaacctgatcatcctgcctctggcctttggcaagagacagggcagagaattcatctggaacgacctgctgtccctggaaaccggcagcctgaagctggccaacggaagagtgatcgagaagacactgtacaacagaagaacccggcaggatgagcctgccctgttcgtggccctgaccttcgagcggcgggaggtcctggactcctccaatatcaaaccaatgaacctgatcggcgtggcaagaggcgaaaacatccccgccgtgatcgccctgaccgaccccgagggctgcccactgagccggtttaaggatagcctgggaaacccaacccacatcctgagaatcggcgagagctataaggagaagcagcggaccatccaggccaagaaggaggtggagcagcggagagccggcggctacagccggaagtacgccagcaaagccaagaatctggcagacgatatggtgagaaacaccgctagagatctgctgtactacgccgtgacccaggatgccatgctgatcttcgccaacctgagccggggcttcggccggcagggcaagcggaccttcatggccgagagacagtacacacggatggaggactggctgaccgccaagctggcctacgagggcctgagcaagacctacctgtccaagacactggcccagtacacctccaagacatgcagcaactgtgggtttaccatcaccagcgccgactacgacagggtgctggagaagctgaagaagacagcaacaggctggatgaccacaattaacggcaaggagctgaaggtggagggccagattacctactacaacagatacaagagacagaacgtagtcaaggacctgtccgtcgagctggatagactgagcgaagaatctgtgaacaacgacatctcctcctggacaaagggcagaagcggagaagctctgagcctcctgaagaaaagattctcccatagacccgtgcaggagaagttcgtgtgcctgaactgcggcttcgagacacacgcagccgagcaagccgccctgaacatcgccagatcctggctgttcctgcggagccaggagtacaagaaataccagacaaacaagacaaccggcaacaccgataagagagccttcgtcgagacctggcagtccttttaccggaagaagcttaaggaggtgtggaaacctgccgtgcggtctggcggatctggcggaggctccagccaggagagcgtgagcttcgaggacgtggccgtgtacttcacccagaaccagtgggccagcctggacagcgcccagaggaccctgtacagggaggtgatgctggagaactacgccaacgtgaccagcctggccgccttccccttccccaagcccgacctgatcttccagctggagaggggcaaggcccccggcggcctggacccctggacccccatcaggaggaaggtgaggggcgtgtgcggcggcccaagcagcggcgcccctcctcccagcggcggcagcccagccggctccccaacctctaccgaggagggcacctctgagtccgccacccccgagagcggccctggcacctccaccgagcccagcgagggcagcgcacccggcagccctgccggcagccccacctccacagaggagggaaccagcaccgagcccagcgaaggcagcgccccaggcaccagcaccgagcctagtgagcaggagattaaacggatcaacaagatcagaagaagacttgtgaaagacagcaacaccaagaaggccggcaagacaggccccatgaaaaccctgctggttagagtgatgacacccgatctgagagagcggctggaaaacctgagaaagaagcctgaaaatatcccccagcccatcagcaatacatctagagccaacctgaataagctgctgaccgattacaccgaaatgaagaaggcgatcctgcatgtgtactgggaagagttccagaaggaccctgtgggcctgatgagccgggtggcccagcctgccagcaagaagatcgatcagaacaagctgaaacctgagatggacgagaagggcaacctgaccaccgccggctttgcctgctctcagtgtggccagcccctgttcgtgtacaagctggagcaggtgtctgagaagggcaaggcttacaccaactacttcggacggtgcaatgtggccgagcacgaaaagctgatcctgctggcccagctgaagcccgagaaggatagcgacgaagccgtgacatatagcctgggaaagtttgggcagagggccctggatttctacagcattcatgtgaccaaggagtccacccaccccgtgaagcccctggcccagatcgccggaaacagatacgcctccggacctgtgggaaaggccctgagcgacgcatgtatgggcacaatcgcctccttcctgtctaagtaccaggacatcatcatcgaacaccagaaggtggtgaagggcaaccagaagagactggagagcctgcgggagctggccggcaaggaaaacctggaataccctagcgtgaccctgccacctcagcctcacaccaaggagggcgttgatgcctacaacgaagtgatcgcccgggtgcgaatgtgggtgaacctgaacctgtggcagaagctgaagctaagcagagatgatgccaagcctctgctgagactgaagggattcccttcctttcctctggtcgagagacaggccaacgaagtggactggtgggacatggtgtgtaacgtgaagaagctgatcaacgagaaaaaggaggatggcaaggtgttttggcagaatctggctggctacaagagacaggaagccctgagaccatacctgagcagcgaggaagatcggaagaagggaaagaaattcgctcggtaccagctgggcgacctgctgctgcacctggaaaagaagcacggcgaggactggggaaaggtgtacgacgaggcctgggagcggattgacaagaaagtggaaggcctgagcaagcacatcaagctggaagaggaacggagaagcgaggacgcccagagcaaggccgccctgaccgactggctgcgggctaaggccagcttcgtgatcgagggcctgaaggaggccgacaaggacgagttctgcagatgcgagctgaagctgcagaagtggtacggggacctgcggggaaagcccttcgccatcgaagccgagaacagcatcctggacatcagcggcttcagcaagcagtacaactgtgccttcatctggcagaaggacggcgtgaagaagctgaacctgtacctgatcatcaactacttcaagggcggcaagctgcggttcaagaagatcaaacctgaagccttcgaagccaacagattctacaccgtgatcaacaaaaagagcggcgagatcgtgcccatggaggtgaacttcaacttcgacgaccccaacctgatcatcctgcctctggcctttggcaagagacagggcagagaattcatctggaacgacctgctgtccctggaaaccggcagcctgaagctggccaacggaagagtgatcgagaagacactgtacaacagaagaacccggcaggatgagcctgccctgttcgtggccctgaccttcgagcggcgggaggtcctggactcctccaatatcaaaccaatgaacctgatcggcgtggcaagaggcgaaaacatccccgccgtgatcgccctgaccgaccccgagggctgcccactgagccggtttaaggatagcctgggaaacccaacccacatcctgagaatcggcgagagctataaggagaagcagcggaccatccaggccaagaaggaggtggagcagcggagagccggcggctacagccggaagtacgccagcaaagccaagaatctggcagacgatatggtgagaaacaccgctagagatctgctgtactacgccgtgacccaggatgccatgctgatcttcgccaacctgagccggggcttcggccggcagggcaagcggaccttcatggccgagagacagtacacacggatggaggactggctgaccgccaagctggcctacgagggcctgagcaagacctacctgtccaagacactggcccagtacacctccaagacatgcagcaactgtgggtttaccatcaccagcgccgactacgacagggtgctggagaagctgaagaagacagcaacaggctggatgaccacaattaacggcaaggagctgaaggtggagggccagattacctactacaacagatacaagagacagaacgtagtcaaggacctgtccgtcgagctggatagactgagcgaagaatctgtgaacaacgacatctcctcctggacaaagggcagaagcggagaagctctgagcctcctgaagaaaagattctcccatagacccgtgcaggagaagttcgtgtgcctgaactgcggcttcgagacacacgcagccgagcaagccgccctgaacatcgccagatcctggctgttcctgcggagccaggagtacaagaaataccagacaaacaagacaaccggcaacaccgataagagagccttcgtcgagacctggcagtccttttaccggaagaagcttaaggaggtgtggaaacctgccgtgcggtctggcggatctggcggaggctcctagccaggagagcgtgagcttcgaggacgtggccgtgtacttcacccagaaccagtgggccagcctggacagcgcccagaggaccctgtacagggaggtgatgctggagaactacgccaacgtgaccagcctggccgccttccccttccccaagcccgacctgatcttccagctggagaggggcaaggcccccggcggcctggacccctggacccccatcaggaggaaggtgaggggcgtgtgcggatctggctccggcagcggccccaagaaaaagagaaaagtctaagctgccttctgcggggcttgccttctggccatgcccttcttctctcccttgcacctgtacctcttggtctttgaataaagcctgagtaggaaggctagcaaaaaaaaaaaaaaaaaaaaaaaaaaaaaaaaaaaaaaaaaaaaaaaaaaaaaaaaaaaaaaaaaaaaaaaaaaaaaaaa

SEQ ID NO: 15978 - RNA, 9485 nt, synthetic construct
  source 1..9485: mol_type = other RNA
aggaaataagagagaaaagaagagtaagaagaaatataagagccaccatggcccctaagaagaagcgtaaagtgagccggatggaacgcctcgtctacgaggtgcggcagaagtgcagaaacatcgaggacatctgcatctcctgcggatctctgaacgtgaccctggagcacccactgttcatcggcggcatgtgccagaactgtaaaaactgttttctggagtgtgcctatcaatacgacgatgacggctaccagagctactgcaccatctgttgcggcggaagagaggtgctgatgtgtggaaataacaactgctgccggtgcttctgcgtggaatgcgtggacctgctggtgggccccggcgccgcccaggccgctattaaggaagatccttggaactgctacatgtgcggccacaagggcacatacggcctgctgagacggagagaggactggcctagcagactgcagatgttcttcgccaataaccacgaccaggagttcgacccccctaaggtgtaccctcccgtccccgccgagaagagaaagcccatccgggtcctgagcctgttcgatggcatcgccaccggtctgctggtgctgaaggacctgggcatccaggtggataggtacattgcctccgaggtgtgcgaggactccatcaccgtgggaatggtgcgtcatcagggcaagatcatgtacgtgggcgacgtgcggagcgtgacacagaagcatatccaggagtggggccctttcgacctggtgatcggcggcagcccttgcaatgacctgagcatcgtgaacccagcccggaagggcctgtacgagggaaccggcagactgttcttcgagttttacagactgctgcacgacgcccggcctaaggaaggcgacgaccggcccttcttttggctgttcgagaatgtggtggccatgggagtcagcgacaagcgggatattagccggttcctggagagcaaccccgtgatgatcgatgccaaggaagtgagcgccgcccaccgggccagatacttctggggcaatctgcctggcatgaacagacccctggccagcaccgtgaacgacaagctggagctgcaggagtgcctggagcacggccggatcgccaagttcagcaaggtgagaaccatcaccacccgaagcaacagcatcaaacaaggcaaggaccagcactttcctgtgttcatgaacgagaaggaggacatcctgtggtgtaccgagatggagagagtgttcgggttcccagtccactacacagatgtcagcaacatgtctagactggccagacagagactgctgggaagaagctggtccgtccctgtgatcagacacctgttcgcccctctgaaggagtacttcgcctgcgtgagcagcggcaacagcaacgccaacagccggggccccagcttctctagcggcctggtgccactgtccctgagagggagccacatgggccccatggagatctacaaaaccgtgagcgcctggaagcggcagcctgtgcgcgtgctgagcctgtttcggaatatcgataaagtcctgaaaagcctgggattcctggagagcggctctggctccggcggtggcaccctgaagtacgtggaggatgtgacaaacgtggtcagacgggatgtggagaagtggggccccttcgatctggtgtacggcagcacccaacccctgggcagctcttgtgaccggtgccctggctggtacatgtttcagttccaccggatcctgcagtacgccctgccgagacaggagtcccagcggccattcttttggattttcatggacaacttgctgctgaccgaggatgaccaggaaactaccactcggttcctgcagaccgaagccgtgaccctgcaggacgtgagaggccgggactaccagaacgccatgcgggtgtggtccaacatccctggactgaaaagcaagcacgcacctctgacccctaaagaagaggagtacctgcaggcccaggtgcggagcagaagcaagctggacgcccctaaggtggatctgctggtgaagaattgcctcctgcccctgagagagtacttcaagtatttcagccagaatagtctgcccctgggaggcagcggcggcggcgccctggtgacatttgaggacgtcgccgtgcggttcacccaggaggaatgggctctgctggatccttctcagaaaatcctgtaccgggacgtgatgagagagacataccggaatctgacctccgtgggcatcaactgggaatgttgggaccttgaagcctgcttcagaagcctgggaagaaacctgagagtgcaggtggtgaagagaaagtgcgagctgaccaacagcggcccctgcgccgagggcggcccaagcagcggcgcccctcctcccagcggcggcagcccagccggctccccaacctctaccgaggagggcacctctgagtccgccacccccgagagcggccctggcacctccaccgagcccagcgagggcagcgcacccggcagccctgccggcagccccacctccacagaggagggaaccagcaccgagcccagcgaaggcagcgccccaggcaccagcaccgagcctagtgagcaggagattaaacggatcaacaagatcagaagaagacttgtgaaagacagcaacaccaagaaggccggcaagacaggccccatgaaaaccctgctggttagagtgatgacacccgatctgagagagcggctggaaaacctgagaaagaagcctgaaaatatcccccagcccatcagcaatacatctagagccaacctgaataagctgctgaccgattacaccgaaatgaagaaggcgatcctgcatgtgtactgggaagagttccagaaggaccctgtgggcctgatgagccgggtggcccagcctgccagcaagaagatcgatcagaacaagctgaaacctgagatggacgagaagggcaacctgaccaccgccggctttgcctgctctcagtgtggccagcccctgttcgtgtacaagctggagcaggtgtctgagaagggcaaggcttacaccaactacttcggacggtgcaatgtggccgagcacgaaaagctgatcctgctggcccagctgaagcccgagaaggatagcgacgaagccgtgacatatagcctgggaaagtttgggcagagggccctggatttctacagcattcatgtgaccaaggagtccacccaccccgtgaagcccctggcccagatcgccggaaacagatacgcctccggacctgtgggaaaggccctgagcgacgcatgtatgggcacaatcgcctccttcctgtctaagtaccaggacatcatcatcgaacaccagaaggtggtgaagggcaaccagaagagactggagagcctgcgggagctggccggcaaggaaaacctggaataccctagcgtgaccctgccacctcagcctcacaccaaggagggcgttgatgcctacaacgaagtgatcgcccgggtgcgaatgtgggtgaacctgaacctgtggcagaagctgaagctaagcagagatgatgccaagcctctgctgagactgaagggattcccttcctttcctctggtcgagagacaggccaacgaagtggactggtgggacatggtgtgtaacgtgaagaagctgatcaacgagaaaaaggaggatggcaaggtgttttggcagaatctggctggctacaagagacaggaagccctgagaccatacctgagcagcgaggaagatcggaagaagggaaagaaattcgctcggtaccagctgggcgacctgctgctgcacctggaaaagaagcacggcgaggactggggaaaggtgtacgacgaggcctgggagcggattgacaagaaagtggaaggcctgagcaagcacatcaagctggaagaggaacggagaagcgaggacgcccagagcaaggccgccctgaccgactggctgcgggctaaggccagcttcgtgatcgagggcctgaaggaggccgacaaggacgagttctgcagatgcgagctgaagctgcagaagtggtacggggacctgcggggaaagcccttcgccatcgaagccgagaacagcatcctggacatcagcggcttcagcaagcagtacaactgtgccttcatctggcagaaggacggcgtgaagaagctgaacctgtacctgatcatcaactacttcaagggcggcaagctgcggttcaagaagatcaaacctgaagccttcgaagccaacagattctacaccgtgatcaacaaaaagagcggcgagatcgtgcccatggaggtgaacttcaacttcgacgaccccaacctgatcatcctgcctctggcctttggcaagagacagggcagagaattcatctggaacgacctgctgtccctggaaaccggcagcctgaagctggccaacggaagagtgatcgagaagacactgtacaacagaagaacccggcaggatgagcctgccctgttcgtggccctgaccttcgagcggcgggaggtcctggactcctccaatatcaaaccaatgaacctgatcggcgtggcaagaggcgaaaacatccccgccgtgatcgccctgaccgaccccgagggctgcccactgagccggtttaaggatagcctgggaaacccaacccacatcctgagaatcggcgagagctataaggagaagcagcggaccatccaggccaagaaggaggtggagcagcggagagccggcggctacagccggaagtacgccagcaaagccaagaatctggcagacgatatggtgagaaacaccgctagagatctgctgtactacgccgtgacccaggatgccatgctgatcttcgccaacctgagccggggcttcggccggcagggcaagcggaccttcatggccgagagacagtacacacggatggaggactggctgaccgccaagctggcctacgagggcctgagcaagacctacctgtccaagacactggcccagtacacctccaagacatgcagcaactgtgggtttaccatcaccagcgccgactacgacagggtgctggagaagctgaagaagacagcaacaggctggatgaccacaattaacggcaaggagctgaaggtggagggccagattacctactacaacagatacaagagacagaacgtagtcaaggacctgtccgtcgagctggatagactgagcgaagaatctgtgaacaacgacatctcctcctggacaaagggcagaagcggagaagctctgagcctcctgaagaaaagattctcccatagacccgtgcaggagaagttcgtgtgcctgaactgcggcttcgagacacacgcagccgagcaagccgccctgaacatcgccagatcctggctgttcctgcggagccaggagtacaagaaataccagacaaacaagacaaccggcaacaccgataagagagccttcgtcgagacctggcagtccttttaccggaagaagcttaaggaggtgtggaaacctgccgtgcggtctggcggatctggcggaggctccgcccaggagagcgtgatgttcagcgacgtgagcatcgacttcagccaggaggagtgggagtacctgaacgacgaccagagggacctgtacagggaggtgatgctggagaactacagcaacctggtgagcatggccggccacagcatcagcaagcccgacgtgatcagcttcctggagcagggcaaggagccctggctggtggacagggagctgaccagggaccagtggcccgtgctggagagcggcggcccaagcagcggcgcccctcctcccagcggcggcagcccagccggctccccaacctctaccgaggagggcacctctgagtccgccacccccgagagcggccctggcacctccaccgagcccagcgagggcagcgcacccggcagccctgccggcagccccacctccacagaggagggaaccagcaccgagcccagcgaaggcagcgccccaggcaccagcaccgagcctagtgagcaggagattaaacggatcaacaagatcagaagaagacttgtgaaagacagcaacaccaagaaggccggcaagacaggccccatgaaaaccctgctggttagagtgatgacacccgatctgagagagcggctggaaaacctgagaaagaagcctgaaaatatcccccagcccatcagcaatacatctagagccaacctgaataagctgctgaccgattacaccgaaatgaagaaggcgatcctgcatgtgtactgggaagagttccagaaggaccctgtgggcctgatgagccgggtggcccagcctgccagcaagaagatcgatcagaacaagctgaaacctgagatggacgagaagggcaacctgaccaccgccggctttgcctgctctcagtgtggccagcccctgttcgtgtacaagctggagcaggtgtctgagaagggcaaggcttacaccaactacttcggacggtgcaatgtggccgagcacgaaaagctgatcctgctggcccagctgaagcccgagaaggatagcgacgaagccgtgacatatagcctgggaaagtttgggcagagggccctggatttctacagcattcatgtgaccaaggagtccacccaccccgtgaagcccctggcccagatcgccggaaacagatacgcctccggacctgtgggaaaggccctgagcgacgcatgtatgggcacaatcgcctccttcctgtctaagtaccaggacatcatcatcgaacaccagaaggtggtgaagggcaaccagaagagactggagagcctgcgggagctggccggcaaggaaaacctggaataccctagcgtgaccctgccacctcagcctcacaccaaggagggcgttgatgcctacaacgaagtgatcgcccgggtgcgaatgtgggtgaacctgaacctgtggcagaagctgaagctaagcagagatgatgccaagcctctgctgagactgaagggattcccttcctttcctctggtcgagagacaggccaacgaagtggactggtgggacatggtgtgtaacgtgaagaagctgatcaacgagaaaaaggaggatggcaaggtgttttggcagaatctggctggctacaagagacaggaagccctgagaccatacctgagcagcgaggaagatcggaagaagggaaagaaattcgctcggtaccagctgggcgacctgctgctgcacctggaaaagaagcacggcgaggactggggaaaggtgtacgacgaggcctgggagcggattgacaagaaagtggaaggcctgagcaagcacatcaagctggaagaggaacggagaagcgaggacgcccagagcaaggccgccctgaccgactggctgcgggctaaggccagcttcgtgatcgagggcctgaaggaggccgacaaggacgagttctgcagatgcgagctgaagctgcagaagtggtacggggacctgcggggaaagcccttcgccatcgaagccgagaacagcatcctggacatcagcggcttcagcaagcagtacaactgtgccttcatctggcagaaggacggcgtgaagaagctgaacctgtacctgatcatcaactacttcaagggcggcaagctgcggttcaagaagatcaaacctgaagccttcgaagccaacagattctacaccgtgatcaacaaaaagagcggcgagatcgtgcccatggaggtgaacttcaacttcgacgaccccaacctgatcatcctgcctctggcctttggcaagagacagggcagagaattcatctggaacgacctgctgtccctggaaaccggcagcctgaagctggccaacggaagagtgatcgagaagacactgtacaacagaagaacccggcaggatgagcctgccctgttcgtggccctgaccttcgagcggcgggaggtcctggactcctccaatatcaaaccaatgaacctgatcggcgtggcaagaggcgaaaacatccccgccgtgatcgccctgaccgaccccgagggctgcccactgagccggtttaaggatagcctgggaaacccaacccacatcctgagaatcggcgagagctataaggagaagcagcggaccatccaggccaagaaggaggtggagcagcggagagccggcggctacagccggaagtacgccagcaaagccaagaatctggcagacgatatggtgagaaacaccgctagagatctgctgtactacgccgtgacccaggatgccatgctgatcttcgccaacctgagccggggcttcggccggcagggcaagcggaccttcatggccgagagacagtacacacggatggaggactggctgaccgccaagctggcctacgagggcctgagcaagacctacctgtccaagacactggcccagtacacctccaagacatgcagcaactgtgggtttaccatcaccagcgccgactacgacagggtgctggagaagctgaagaagacagcaacaggctggatgaccacaattaacggcaaggagctgaaggtggagggccagattacctactacaacagatacaagagacagaacgtagtcaaggacctgtccgtcgagctggatagactgagcgaagaatctgtgaacaacgacatctcctcctggacaaagggcagaagcggagaagctctgagcctcctgaagaaaagattctcccatagacccgtgcaggagaagttcgtgtgcctgaactgcggcttcgagacacacgcagccgagcaagccgccctgaacatcgccagatcctggctgttcctgcggagccaggagtacaagaaataccagacaaacaagacaaccggcaacaccgataagagagccttcgtcgagacctggcagtccttttaccggaagaagcttaaggaggtgtggaaacctgccgtgcggtctggcggatctggcggaggctcctgcccaggagagcgtgatgttcagcgacgtgagcatcgacttcagccaggaggagtgggagtacctgaacgacgaccagagggacctgtacagggaggtgatgctggagaactacagcaacctggtgagcatggccggccacagcatcagcaagcccgacgtgatcagcttcctggagcagggcaaggagccctggctggtggacagggagctgaccagggaccagtggcccgtgctggagagcggatctggctccggcagcggccccaagaaaaagagaaaagtctaagctgccttctgcggggcttgccttctggccatgcccttcttctctcccttgcacctgtacctcttggtctttgaataaagcctgagtaggaaggctagcaaaaaaaaaaaaaaaaaaaaaaaaaaaaaaaaaaaaaaaaaaaaaaaaaaaaaaaaaaaaaaaaaaaaaaaaaaaaaaaa

SEQ ID NO: 15979 - RNA, 9485 nt, synthetic construct
  source 1..9485: mol_type = other RNA
aggaaataagagagaaaagaagagtaagaagaaatataagagccaccatggcccctaagaagaagcgtaaagtgagccggatggaacgcctcgtctacgaggtgcggcagaagtgcagaaacatcgaggacatctgcatctcctgcggatctctgaacgtgaccctggagcacccactgttcatcggcggcatgtgccagaactgtaaaaactgttttctggagtgtgcctatcaatacgacgatgacggctaccagagctactgcaccatctgttgcggcggaagagaggtgctgatgtgtggaaataacaactgctgccggtgcttctgcgtggaatgcgtggacctgctggtgggccccggcgccgcccaggccgctattaaggaagatccttggaactgctacatgtgcggccacaagggcacatacggcctgctgagacggagagaggactggcctagcagactgcagatgttcttcgccaataaccacgaccaggagttcgacccccctaaggtgtaccctcccgtccccgccgagaagagaaagcccatccgggtcctgagcctgttcgatggcatcgccaccggtctgctggtgctgaaggacctgggcatccaggtggataggtacattgcctccgaggtgtgcgaggactccatcaccgtgggaatggtgcgtcatcagggcaagatcatgtacgtgggcgacgtgcggagcgtgacacagaagcatatccaggagtggggccctttcgacctggtgatcggcggcagcccttgcaatgacctgagcatcgtgaacccagcccggaagggcctgtacgagggaaccggcagactgttcttcgagttttacagactgctgcacgacgcccggcctaaggaaggcgacgaccggcccttcttttggctgttcgagaatgtggtggccatgggagtcagcgacaagcgggatattagccggttcctggagagcaaccccgtgatgatcgatgccaaggaagtgagcgccgcccaccgggccagatacttctggggcaatctgcctggcatgaacagacccctggccagcaccgtgaacgacaagctggagctgcaggagtgcctggagcacggccggatcgccaagttcagcaaggtgagaaccatcaccacccgaagcaacagcatcaaacaaggcaaggaccagcactttcctgtgttcatgaacgagaaggaggacatcctgtggtgtaccgagatggagagagtgttcgggttcccagtccactacacagatgtcagcaacatgtctagactggccagacagagactgctgggaagaagctggtccgtccctgtgatcagacacctgttcgcccctctgaaggagtacttcgcctgcgtgagcagcggcaacagcaacgccaacagccggggccccagcttctctagcggcctggtgccactgtccctgagagggagccacatgggccccatggagatctacaaaaccgtgagcgcctggaagcggcagcctgtgcgcgtgctgagcctgtttcggaatatcgataaagtcctgaaaagcctgggattcctggagagcggctctggctccggcggtggcaccctgaagtacgtggaggatgtgacaaacgtggtcagacgggatgtggagaagtggggccccttcgatctggtgtacggcagcacccaacccctgggcagctcttgtgaccggtgccctggctggtacatgtttcagttccaccggatcctgcagtacgccctgccgagacaggagtcccagcggccattcttttggattttcatggacaacttgctgctgaccgaggatgaccaggaaactaccactcggttcctgcagaccgaagccgtgaccctgcaggacgtgagaggccgggactaccagaacgccatgcgggtgtggtccaacatccctggactgaaaagcaagcacgcacctctgacccctaaagaagaggagtacctgcaggcccaggtgcggagcagaagcaagctggacgcccctaaggtggatctgctggtgaagaattgcctcctgcccctgagagagtacttcaagtatttcagccagaatagtctgcccctgggaggcagcggcggcggcgccctggtgacatttgaggacgtcgccgtgcggttcacccaggaggaatgggctctgctggatccttctcagaaaatcctgtaccgggacgtgatgagagagacataccggaatctgacctccgtgggcatcaactgggaatgttgggaccttgaagcctgcttcagaagcctgggaagaaacctgagagtgcaggtggtgaagagaaagtgcgagctgaccaacagcggcccctgcgccgagggcggcccaagcagcggcgcccctcctcccagcggcggcagcccagccggctccccaacctctaccgaggagggcacctctgagtccgccacccccgagagcggccctggcacctccaccgagcccagcgagggcagcgcacccggcagccctgccggcagccccacctccacagaggagggaaccagcaccgagcccagcgaaggcagcgccccaggcaccagcaccgagcctagtgagcaggagattaaacggatcaacaagatcagaagaagacttgtgaaagacagcaacaccaagaaggccggcaagacaggccccatgaaaaccctgctggttagagtgatgacacccgatctgagagagcggctggaaaacctgagaaagaagcctgaaaatatcccccagcccatcagcaatacatctagagccaacctgaataagctgctgaccgattacaccgaaatgaagaaggcgatcctgcatgtgtactgggaagagttccagaaggaccctgtgggcctgatgagccgggtggcccagcctgccagcaagaagatcgatcagaacaagctgaaacctgagatggacgagaagggcaacctgaccaccgccggctttgcctgctctcagtgtggccagcccctgttcgtgtacaagctggagcaggtgtctgagaagggcaaggcttacaccaactacttcggacggtgcaatgtggccgagcacgaaaagctgatcctgctggcccagctgaagcccgagaaggatagcgacgaagccgtgacatatagcctgggaaagtttgggcagagggccctggatttctacagcattcatgtgaccaaggagtccacccaccccgtgaagcccctggcccagatcgccggaaacagatacgcctccggacctgtgggaaaggccctgagcgacgcatgtatgggcacaatcgcctccttcctgtctaagtaccaggacatcatcatcgaacaccagaaggtggtgaagggcaaccagaagagactggagagcctgcgggagctggccggcaaggaaaacctggaataccctagcgtgaccctgccacctcagcctcacaccaaggagggcgttgatgcctacaacgaagtgatcgcccgggtgcgaatgtgggtgaacctgaacctgtggcagaagctgaagctaagcagagatgatgccaagcctctgctgagactgaagggattcccttcctttcctctggtcgagagacaggccaacgaagtggactggtgggacatggtgtgtaacgtgaagaagctgatcaacgagaaaaaggaggatggcaaggtgttttggcagaatctggctggctacaagagacaggaagccctgagaccatacctgagcagcgaggaagatcggaagaagggaaagaaattcgctcggtaccagctgggcgacctgctgctgcacctggaaaagaagcacggcgaggactggggaaaggtgtacgacgaggcctgggagcggattgacaagaaagtggaaggcctgagcaagcacatcaagctggaagaggaacggagaagcgaggacgcccagagcaaggccgccctgaccgactggctgcgggctaaggccagcttcgtgatcgagggcctgaaggaggccgacaaggacgagttctgcagatgcgagctgaagctgcagaagtggtacggggacctgcggggaaagcccttcgccatcgaagccgagaacagcatcctggacatcagcggcttcagcaagcagtacaactgtgccttcatctggcagaaggacggcgtgaagaagctgaacctgtacctgatcatcaactacttcaagggcggcaagctgcggttcaagaagatcaaacctgaagccttcgaagccaacagattctacaccgtgatcaacaaaaagagcggcgagatcgtgcccatggaggtgaacttcaacttcgacgaccccaacctgatcatcctgcctctggcctttggcaagagacagggcagagaattcatctggaacgacctgctgtccctggaaaccggcagcctgaagctggccaacggaagagtgatcgagaagacactgtacaacagaagaacccggcaggatgagcctgccctgttcgtggccctgaccttcgagcggcgggaggtcctggactcctccaatatcaaaccaatgaacctgatcggcgtggcaagaggcgaaaacatccccgccgtgatcgccctgaccgaccccgagggctgcccactgagccggtttaaggatagcctgggaaacccaacccacatcctgagaatcggcgagagctataaggagaagcagcggaccatccaggccaagaaggaggtggagcagcggagagccggcggctacagccggaagtacgccagcaaagccaagaatctggcagacgatatggtgagaaacaccgctagagatctgctgtactacgccgtgacccaggatgccatgctgatcttcgccaacctgagccggggcttcggccggcagggcaagcggaccttcatggccgagagacagtacacacggatggaggactggctgaccgccaagctggcctacgagggcctgagcaagacctacctgtccaagacactggcccagtacacctccaagacatgcagcaactgtgggtttaccatcaccagcgccgactacgacagggtgctggagaagctgaagaagacagcaacaggctggatgaccacaattaacggcaaggagctgaaggtggagggccagattacctactacaacagatacaagagacagaacgtagtcaaggacctgtccgtcgagctggatagactgagcgaagaatctgtgaacaacgacatctcctcctggacaaagggcagaagcggagaagctctgagcctcctgaagaaaagattctcccatagacccgtgcaggagaagttcgtgtgcctgaactgcggcttcgagacacacgcagccgagcaagccgccctgaacatcgccagatcctggctgttcctgcggagccaggagtacaagaaataccagacaaacaagacaaccggcaacaccgataagagagccttcgtcgagacctggcagtccttttaccggaagaagcttaaggaggtgtggaaacctgccgtgcggtctggcggatctggcggaggctccagcaaggtgcccgtgaccttcggcgacctggccatctacttcagccaggaggagtgggagtggctgagccccatccagaaggacctgtacgaggacgtgatgctggagaactaccagaacctggtgagcctgggcctgagcttcaggaggcccaacgtgatcaccctgctggagaagggcaaggccccctgggtggtggagcccgtgaggaagaggaggggcctggacagcggcttcaagtgcggcggcccaagcagcggcgcccctcctcccagcggcggcagcccagccggctccccaacctctaccgaggagggcacctctgagtccgccacccccgagagcggccctggcacctccaccgagcccagcgagggcagcgcacccggcagccctgccggcagccccacctccacagaggagggaaccagcaccgagcccagcgaaggcagcgccccaggcaccagcaccgagcctagtgagcaggagattaaacggatcaacaagatcagaagaagacttgtgaaagacagcaacaccaagaaggccggcaagacaggccccatgaaaaccctgctggttagagtgatgacacccgatctgagagagcggctggaaaacctgagaaagaagcctgaaaatatcccccagcccatcagcaatacatctagagccaacctgaataagctgctgaccgattacaccgaaatgaagaaggcgatcctgcatgtgtactgggaagagttccagaaggaccctgtgggcctgatgagccgggtggcccagcctgccagcaagaagatcgatcagaacaagctgaaacctgagatggacgagaagggcaacctgaccaccgccggctttgcctgctctcagtgtggccagcccctgttcgtgtacaagctggagcaggtgtctgagaagggcaaggcttacaccaactacttcggacggtgcaatgtggccgagcacgaaaagctgatcctgctggcccagctgaagcccgagaaggatagcgacgaagccgtgacatatagcctgggaaagtttgggcagagggccctggatttctacagcattcatgtgaccaaggagtccacccaccccgtgaagcccctggcccagatcgccggaaacagatacgcctccggacctgtgggaaaggccctgagcgacgcatgtatgggcacaatcgcctccttcctgtctaagtaccaggacatcatcatcgaacaccagaaggtggtgaagggcaaccagaagagactggagagcctgcgggagctggccggcaaggaaaacctggaataccctagcgtgaccctgccacctcagcctcacaccaaggagggcgttgatgcctacaacgaagtgatcgcccgggtgcgaatgtgggtgaacctgaacctgtggcagaagctgaagctaagcagagatgatgccaagcctctgctgagactgaagggattcccttcctttcctctggtcgagagacaggccaacgaagtggactggtgggacatggtgtgtaacgtgaagaagctgatcaacgagaaaaaggaggatggcaaggtgttttggcagaatctggctggctacaagagacaggaagccctgagaccatacctgagcagcgaggaagatcggaagaagggaaagaaattcgctcggtaccagctgggcgacctgctgctgcacctggaaaagaagcacggcgaggactggggaaaggtgtacgacgaggcctgggagcggattgacaagaaagtggaaggcctgagcaagcacatcaagctggaagaggaacggagaagcgaggacgcccagagcaaggccgccctgaccgactggctgcgggctaaggccagcttcgtgatcgagggcctgaaggaggccgacaaggacgagttctgcagatgcgagctgaagctgcagaagtggtacggggacctgcggggaaagcccttcgccatcgaagccgagaacagcatcctggacatcagcggcttcagcaagcagtacaactgtgccttcatctggcagaaggacggcgtgaagaagctgaacctgtacctgatcatcaactacttcaagggcggcaagctgcggttcaagaagatcaaacctgaagccttcgaagccaacagattctacaccgtgatcaacaaaaagagcggcgagatcgtgcccatggaggtgaacttcaacttcgacgaccccaacctgatcatcctgcctctggcctttggcaagagacagggcagagaattcatctggaacgacctgctgtccctggaaaccggcagcctgaagctggccaacggaagagtgatcgagaagacactgtacaacagaagaacccggcaggatgagcctgccctgttcgtggccctgaccttcgagcggcgggaggtcctggactcctccaatatcaaaccaatgaacctgatcggcgtggcaagaggcgaaaacatccccgccgtgatcgccctgaccgaccccgagggctgcccactgagccggtttaaggatagcctgggaaacccaacccacatcctgagaatcggcgagagctataaggagaagcagcggaccatccaggccaagaaggaggtggagcagcggagagccggcggctacagccggaagtacgccagcaaagccaagaatctggcagacgatatggtgagaaacaccgctagagatctgctgtactacgccgtgacccaggatgccatgctgatcttcgccaacctgagccggggcttcggccggcagggcaagcggaccttcatggccgagagacagtacacacggatggaggactggctgaccgccaagctggcctacgagggcctgagcaagacctacctgtccaagacactggcccagtacacctccaagacatgcagcaactgtgggtttaccatcaccagcgccgactacgacagggtgctggagaagctgaagaagacagcaacaggctggatgaccacaattaacggcaaggagctgaaggtggagggccagattacctactacaacagatacaagagacagaacgtagtcaaggacctgtccgtcgagctggatagactgagcgaagaatctgtgaacaacgacatctcctcctggacaaagggcagaagcggagaagctctgagcctcctgaagaaaagattctcccatagacccgtgcaggagaagttcgtgtgcctgaactgcggcttcgagacacacgcagccgagcaagccgccctgaacatcgccagatcctggctgttcctgcggagccaggagtacaagaaataccagacaaacaagacaaccggcaacaccgataagagagccttcgtcgagacctggcagtccttttaccggaagaagcttaaggaggtgtggaaacctgccgtgcggtctggcggatctggcggaggctcctagcaaggtgcccgtgaccttcggcgacctggccatctacttcagccaggaggagtgggagtggctgagccccatccagaaggacctgtacgaggacgtgatgctggagaactaccagaacctggtgagcctgggcctgagcttcaggaggcccaacgtgatcaccctgctggagaagggcaaggccccctgggtggtggagcccgtgaggaagaggaggggcctggacagcggcttcaagtgcggatctggctccggcagcggccccaagaaaaagagaaaagtctaagctgccttctgcggggcttgccttctggccatgcccttcttctctcccttgcacctgtacctcttggtctttgaataaagcctgagtaggaaggctagcaaaaaaaaaaaaaaaaaaaaaaaaaaaaaaaaaaaaaaaaaaaaaaaaaaaaaaaaaaaaaaaaaaaaaaaaaaaaaaaa

SEQ ID NO: 15980 - RNA, 9485 nt, synthetic construct
  source 1..9485: mol_type = other RNA
aggaaataagagagaaaagaagagtaagaagaaatataagagccaccatggcccctaagaagaagcgtaaagtgagccggatggaacgcctcgtctacgaggtgcggcagaagtgcagaaacatcgaggacatctgcatctcctgcggatctctgaacgtgaccctggagcacccactgttcatcggcggcatgtgccagaactgtaaaaactgttttctggagtgtgcctatcaatacgacgatgacggctaccagagctactgcaccatctgttgcggcggaagagaggtgctgatgtgtggaaataacaactgctgccggtgcttctgcgtggaatgcgtggacctgctggtgggccccggcgccgcccaggccgctattaaggaagatccttggaactgctacatgtgcggccacaagggcacatacggcctgctgagacggagagaggactggcctagcagactgcagatgttcttcgccaataaccacgaccaggagttcgacccccctaaggtgtaccctcccgtccccgccgagaagagaaagcccatccgggtcctgagcctgttcgatggcatcgccaccggtctgctggtgctgaaggacctgggcatccaggtggataggtacattgcctccgaggtgtgcgaggactccatcaccgtgggaatggtgcgtcatcagggcaagatcatgtacgtgggcgacgtgcggagcgtgacacagaagcatatccaggagtggggccctttcgacctggtgatcggcggcagcccttgcaatgacctgagcatcgtgaacccagcccggaagggcctgtacgagggaaccggcagactgttcttcgagttttacagactgctgcacgacgcccggcctaaggaaggcgacgaccggcccttcttttggctgttcgagaatgtggtggccatgggagtcagcgacaagcgggatattagccggttcctggagagcaaccccgtgatgatcgatgccaaggaagtgagcgccgcccaccgggccagatacttctggggcaatctgcctggcatgaacagacccctggccagcaccgtgaacgacaagctggagctgcaggagtgcctggagcacggccggatcgccaagttcagcaaggtgagaaccatcaccacccgaagcaacagcatcaaacaaggcaaggaccagcactttcctgtgttcatgaacgagaaggaggacatcctgtggtgtaccgagatggagagagtgttcgggttcccagtccactacacagatgtcagcaacatgtctagactggccagacagagactgctgggaagaagctggtccgtccctgtgatcagacacctgttcgcccctctgaaggagtacttcgcctgcgtgagcagcggcaacagcaacgccaacagccggggccccagcttctctagcggcctggtgccactgtccctgagagggagccacatgggccccatggagatctacaaaaccgtgagcgcctggaagcggcagcctgtgcgcgtgctgagcctgtttcggaatatcgataaagtcctgaaaagcctgggattcctggagagcggctctggctccggcggtggcaccctgaagtacgtggaggatgtgacaaacgtggtcagacgggatgtggagaagtggggccccttcgatctggtgtacggcagcacccaacccctgggcagctcttgtgaccggtgccctggctggtacatgtttcagttccaccggatcctgcagtacgccctgccgagacaggagtcccagcggccattcttttggattttcatggacaacttgctgctgaccgaggatgaccaggaaactaccactcggttcctgcagaccgaagccgtgaccctgcaggacgtgagaggccgggactaccagaacgccatgcgggtgtggtccaacatccctggactgaaaagcaagcacgcacctctgacccctaaagaagaggagtacctgcaggcccaggtgcggagcagaagcaagctggacgcccctaaggtggatctgctggtgaagaattgcctcctgcccctgagagagtacttcaagtatttcagccagaatagtctgcccctgggaggcagcggcggcggcgccctggtgacatttgaggacgtcgccgtgcggttcacccaggaggaatgggctctgctggatccttctcagaaaatcctgtaccgggacgtgatgagagagacataccggaatctgacctccgtgggcatcaactgggaatgttgggaccttgaagcctgcttcagaagcctgggaagaaacctgagagtgcaggtggtgaagagaaagtgcgagctgaccaacagcggcccctgcgccgagggcggcccaagcagcggcgcccctcctcccagcggcggcagcccagccggctccccaacctctaccgaggagggcacctctgagtccgccacccccgagagcggccctggcacctccaccgagcccagcgagggcagcgcacccggcagccctgccggcagccccacctccacagaggagggaaccagcaccgagcccagcgaaggcagcgccccaggcaccagcaccgagcctagtgagcaggagattaaacggatcaacaagatcagaagaagacttgtgaaagacagcaacaccaagaaggccggcaagacaggccccatgaaaaccctgctggttagagtgatgacacccgatctgagagagcggctggaaaacctgagaaagaagcctgaaaatatcccccagcccatcagcaatacatctagagccaacctgaataagctgctgaccgattacaccgaaatgaagaaggcgatcctgcatgtgtactgggaagagttccagaaggaccctgtgggcctgatgagccgggtggcccagcctgccagcaagaagatcgatcagaacaagctgaaacctgagatggacgagaagggcaacctgaccaccgccggctttgcctgctctcagtgtggccagcccctgttcgtgtacaagctggagcaggtgtctgagaagggcaaggcttacaccaactacttcggacggtgcaatgtggccgagcacgaaaagctgatcctgctggcccagctgaagcccgagaaggatagcgacgaagccgtgacatatagcctgggaaagtttgggcagagggccctggatttctacagcattcatgtgaccaaggagtccacccaccccgtgaagcccctggcccagatcgccggaaacagatacgcctccggacctgtgggaaaggccctgagcgacgcatgtatgggcacaatcgcctccttcctgtctaagtaccaggacatcatcatcgaacaccagaaggtggtgaagggcaaccagaagagactggagagcctgcgggagctggccggcaaggaaaacctggaataccctagcgtgaccctgccacctcagcctcacaccaaggagggcgttgatgcctacaacgaagtgatcgcccgggtgcgaatgtgggtgaacctgaacctgtggcagaagctgaagctaagcagagatgatgccaagcctctgctgagactgaagggattcccttcctttcctctggtcgagagacaggccaacgaagtggactggtgggacatggtgtgtaacgtgaagaagctgatcaacgagaaaaaggaggatggcaaggtgttttggcagaatctggctggctacaagagacaggaagccctgagaccatacctgagcagcgaggaagatcggaagaagggaaagaaattcgctcggtaccagctgggcgacctgctgctgcacctggaaaagaagcacggcgaggactggggaaaggtgtacgacgaggcctgggagcggattgacaagaaagtggaaggcctgagcaagcacatcaagctggaagaggaacggagaagcgaggacgcccagagcaaggccgccctgaccgactggctgcgggctaaggccagcttcgtgatcgagggcctgaaggaggccgacaaggacgagttctgcagatgcgagctgaagctgcagaagtggtacggggacctgcggggaaagcccttcgccatcgaagccgagaacagcatcctggacatcagcggcttcagcaagcagtacaactgtgccttcatctggcagaaggacggcgtgaagaagctgaacctgtacctgatcatcaactacttcaagggcggcaagctgcggttcaagaagatcaaacctgaagccttcgaagccaacagattctacaccgtgatcaacaaaaagagcggcgagatcgtgcccatggaggtgaacttcaacttcgacgaccccaacctgatcatcctgcctctggcctttggcaagagacagggcagagaattcatctggaacgacctgctgtccctggaaaccggcagcctgaagctggccaacggaagagtgatcgagaagacactgtacaacagaagaacccggcaggatgagcctgccctgttcgtggccctgaccttcgagcggcgggaggtcctggactcctccaatatcaaaccaatgaacctgatcggcgtggcaagaggcgaaaacatccccgccgtgatcgccctgaccgaccccgagggctgcccactgagccggtttaaggatagcctgggaaacccaacccacatcctgagaatcggcgagagctataaggagaagcagcggaccatccaggccaagaaggaggtggagcagcggagagccggcggctacagccggaagtacgccagcaaagccaagaatctggcagacgatatggtgagaaacaccgctagagatctgctgtactacgccgtgacccaggatgccatgctgatcttcgccaacctgagccggggcttcggccggcagggcaagcggaccttcatggccgagagacagtacacacggatggaggactggctgaccgccaagctggcctacgagggcctgagcaagacctacctgtccaagacactggcccagtacacctccaagacatgcagcaactgtgggtttaccatcaccagcgccgactacgacagggtgctggagaagctgaagaagacagcaacaggctggatgaccacaattaacggcaaggagctgaaggtggagggccagattacctactacaacagatacaagagacagaacgtagtcaaggacctgtccgtcgagctggatagactgagcgaagaatctgtgaacaacgacatctcctcctggacaaagggcagaagcggagaagctctgagcctcctgaagaaaagattctcccatagacccgtgcaggagaagttcgtgtgcctgaactgcggcttcgagacacacgcagccgagcaagccgccctgaacatcgccagatcctggctgttcctgcggagccaggagtacaagaaataccagacaaacaagacaaccggcaacaccgataagagagccttcgtcgagacctggcagtccttttaccggaagaagcttaaggaggtgtggaaacctgccgtgcggtctggcggatctggcggaggctcctaccagaggcccgtgagcttcaaggacgtggtggtgggcttcacccaggaggagtggcacaggctgaaccccgcccagagggccctgtacagggacgtgatgctggagacctacagcaacctggtgagcgtgggctacgagggcaccaagccctacgtgatcctgaggctggagcaggaggaggccccctggatctgcgaggccgcctgccccggctgccactgcagggagaacatctggcagggcggcccaagcagcggcgcccctcctcccagcggcggcagcccagccggctccccaacctctaccgaggagggcacctctgagtccgccacccccgagagcggccctggcacctccaccgagcccagcgagggcagcgcacccggcagccctgccggcagccccacctccacagaggagggaaccagcaccgagcccagcgaaggcagcgccccaggcaccagcaccgagcctagtgagcaggagattaaacggatcaacaagatcagaagaagacttgtgaaagacagcaacaccaagaaggccggcaagacaggccccatgaaaaccctgctggttagagtgatgacacccgatctgagagagcggctggaaaacctgagaaagaagcctgaaaatatcccccagcccatcagcaatacatctagagccaacctgaataagctgctgaccgattacaccgaaatgaagaaggcgatcctgcatgtgtactgggaagagttccagaaggaccctgtgggcctgatgagccgggtggcccagcctgccagcaagaagatcgatcagaacaagctgaaacctgagatggacgagaagggcaacctgaccaccgccggctttgcctgctctcagtgtggccagcccctgttcgtgtacaagctggagcaggtgtctgagaagggcaaggcttacaccaactacttcggacggtgcaatgtggccgagcacgaaaagctgatcctgctggcccagctgaagcccgagaaggatagcgacgaagccgtgacatatagcctgggaaagtttgggcagagggccctggatttctacagcattcatgtgaccaaggagtccacccaccccgtgaagcccctggcccagatcgccggaaacagatacgcctccggacctgtgggaaaggccctgagcgacgcatgtatgggcacaatcgcctccttcctgtctaagtaccaggacatcatcatcgaacaccagaaggtggtgaagggcaaccagaagagactggagagcctgcgggagctggccggcaaggaaaacctggaataccctagcgtgaccctgccacctcagcctcacaccaaggagggcgttgatgcctacaacgaagtgatcgcccgggtgcgaatgtgggtgaacctgaacctgtggcagaagctgaagctaagcagagatgatgccaagcctctgctgagactgaagggattcccttcctttcctctggtcgagagacaggccaacgaagtggactggtgggacatggtgtgtaacgtgaagaagctgatcaacgagaaaaaggaggatggcaaggtgttttggcagaatctggctggctacaagagacaggaagccctgagaccatacctgagcagcgaggaagatcggaagaagggaaagaaattcgctcggtaccagctgggcgacctgctgctgcacctggaaaagaagcacggcgaggactggggaaaggtgtacgacgaggcctgggagcggattgacaagaaagtggaaggcctgagcaagcacatcaagctggaagaggaacggagaagcgaggacgcccagagcaaggccgccctgaccgactggctgcgggctaaggccagcttcgtgatcgagggcctgaaggaggccgacaaggacgagttctgcagatgcgagctgaagctgcagaagtggtacggggacctgcggggaaagcccttcgccatcgaagccgagaacagcatcctggacatcagcggcttcagcaagcagtacaactgtgccttcatctggcagaaggacggcgtgaagaagctgaacctgtacctgatcatcaactacttcaagggcggcaagctgcggttcaagaagatcaaacctgaagccttcgaagccaacagattctacaccgtgatcaacaaaaagagcggcgagatcgtgcccatggaggtgaacttcaacttcgacgaccccaacctgatcatcctgcctctggcctttggcaagagacagggcagagaattcatctggaacgacctgctgtccctggaaaccggcagcctgaagctggccaacggaagagtgatcgagaagacactgtacaacagaagaacccggcaggatgagcctgccctgttcgtggccctgaccttcgagcggcgggaggtcctggactcctccaatatcaaaccaatgaacctgatcggcgtggcaagaggcgaaaacatccccgccgtgatcgccctgaccgaccccgagggctgcccactgagccggtttaaggatagcctgggaaacccaacccacatcctgagaatcggcgagagctataaggagaagcagcggaccatccaggccaagaaggaggtggagcagcggagagccggcggctacagccggaagtacgccagcaaagccaagaatctggcagacgatatggtgagaaacaccgctagagatctgctgtactacgccgtgacccaggatgccatgctgatcttcgccaacctgagccggggcttcggccggcagggcaagcggaccttcatggccgagagacagtacacacggatggaggactggctgaccgccaagctggcctacgagggcctgagcaagacctacctgtccaagacactggcccagtacacctccaagacatgcagcaactgtgggtttaccatcaccagcgccgactacgacagggtgctggagaagctgaagaagacagcaacaggctggatgaccacaattaacggcaaggagctgaaggtggagggccagattacctactacaacagatacaagagacagaacgtagtcaaggacctgtccgtcgagctggatagactgagcgaagaatctgtgaacaacgacatctcctcctggacaaagggcagaagcggagaagctctgagcctcctgaagaaaagattctcccatagacccgtgcaggagaagttcgtgtgcctgaactgcggcttcgagacacacgcagccgagcaagccgccctgaacatcgccagatcctggctgttcctgcggagccaggagtacaagaaataccagacaaacaagacaaccggcaacaccgataagagagccttcgtcgagacctggcagtccttttaccggaagaagcttaaggaggtgtggaaacctgccgtgcggtctggcggatctggcggaggctccttaccagaggcccgtgagcttcaaggacgtggtggtgggcttcacccaggaggagtggcacaggctgaaccccgcccagagggccctgtacagggacgtgatgctggagacctacagcaacctggtgagcgtgggctacgagggcaccaagccctacgtgatcctgaggctggagcaggaggaggccccctggatctgcgaggccgcctgccccggctgccactgcagggagaacatctggcagggatctggctccggcagcggccccaagaaaaagagaaaagtctaagctgccttctgcggggcttgccttctggccatgcccttcttctctcccttgcacctgtacctcttggtctttgaataaagcctgagtaggaaggctagcaaaaaaaaaaaaaaaaaaaaaaaaaaaaaaaaaaaaaaaaaaaaaaaaaaaaaaaaaaaaaaaaaaaaaaaaaaaaaaaa

SEQ ID NO: 15981 - RNA, 9485 nt, synthetic construct
  source 1..9485: mol_type = other RNA
aggaaataagagagaaaagaagagtaagaagaaatataagagccaccatggcccctaagaagaagcgtaaagtgagccggatggaacgcctcgtctacgaggtgcggcagaagtgcagaaacatcgaggacatctgcatctcctgcggatctctgaacgtgaccctggagcacccactgttcatcggcggcatgtgccagaactgtaaaaactgttttctggagtgtgcctatcaatacgacgatgacggctaccagagctactgcaccatctgttgcggcggaagagaggtgctgatgtgtggaaataacaactgctgccggtgcttctgcgtggaatgcgtggacctgctggtgggccccggcgccgcccaggccgctattaaggaagatccttggaactgctacatgtgcggccacaagggcacatacggcctgctgagacggagagaggactggcctagcagactgcagatgttcttcgccaataaccacgaccaggagttcgacccccctaaggtgtaccctcccgtccccgccgagaagagaaagcccatccgggtcctgagcctgttcgatggcatcgccaccggtctgctggtgctgaaggacctgggcatccaggtggataggtacattgcctccgaggtgtgcgaggactccatcaccgtgggaatggtgcgtcatcagggcaagatcatgtacgtgggcgacgtgcggagcgtgacacagaagcatatccaggagtggggccctttcgacctggtgatcggcggcagcccttgcaatgacctgagcatcgtgaacccagcccggaagggcctgtacgagggaaccggcagactgttcttcgagttttacagactgctgcacgacgcccggcctaaggaaggcgacgaccggcccttcttttggctgttcgagaatgtggtggccatgggagtcagcgacaagcgggatattagccggttcctggagagcaaccccgtgatgatcgatgccaaggaagtgagcgccgcccaccgggccagatacttctggggcaatctgcctggcatgaacagacccctggccagcaccgtgaacgacaagctggagctgcaggagtgcctggagcacggccggatcgccaagttcagcaaggtgagaaccatcaccacccgaagcaacagcatcaaacaaggcaaggaccagcactttcctgtgttcatgaacgagaaggaggacatcctgtggtgtaccgagatggagagagtgttcgggttcccagtccactacacagatgtcagcaacatgtctagactggccagacagagactgctgggaagaagctggtccgtccctgtgatcagacacctgttcgcccctctgaaggagtacttcgcctgcgtgagcagcggcaacagcaacgccaacagccggggccccagcttctctagcggcctggtgccactgtccctgagagggagccacatgggccccatggagatctacaaaaccgtgagcgcctggaagcggcagcctgtgcgcgtgctgagcctgtttcggaatatcgataaagtcctgaaaagcctgggattcctggagagcggctctggctccggcggtggcaccctgaagtacgtggaggatgtgacaaacgtggtcagacgggatgtggagaagtggggccccttcgatctggtgtacggcagcacccaacccctgggcagctcttgtgaccggtgccctggctggtacatgtttcagttccaccggatcctgcagtacgccctgccgagacaggagtcccagcggccattcttttggattttcatggacaacttgctgctgaccgaggatgaccaggaaactaccactcggttcctgcagaccgaagccgtgaccctgcaggacgtgagaggccgggactaccagaacgccatgcgggtgtggtccaacatccctggactgaaaagcaagcacgcacctctgacccctaaagaagaggagtacctgcaggcccaggtgcggagcagaagcaagctggacgcccctaaggtggatctgctggtgaagaattgcctcctgcccctgagagagtacttcaagtatttcagccagaatagtctgcccctgggaggcagcggcggcggcgccctggtgacatttgaggacgtcgccgtgcggttcacccaggaggaatgggctctgctggatccttctcagaaaatcctgtaccgggacgtgatgagagagacataccggaatctgacctccgtgggcatcaactgggaatgttgggaccttgaagcctgcttcagaagcctgggaagaaacctgagagtgcaggtggtgaagagaaagtgcgagctgaccaacagcggcccctgcgccgagggcggcccaagcagcggcgcccctcctcccagcggcggcagcccagccggctccccaacctctaccgaggagggcacctctgagtccgccacccccgagagcggccctggcacctccaccgagcccagcgagggcagcgcacccggcagccctgccggcagccccacctccacagaggagggaaccagcaccgagcccagcgaaggcagcgccccaggcaccagcaccgagcctagtgagcaggagattaaacggatcaacaagatcagaagaagacttgtgaaagacagcaacaccaagaaggccggcaagacaggccccatgaaaaccctgctggttagagtgatgacacccgatctgagagagcggctggaaaacctgagaaagaagcctgaaaatatcccccagcccatcagcaatacatctagagccaacctgaataagctgctgaccgattacaccgaaatgaagaaggcgatcctgcatgtgtactgggaagagttccagaaggaccctgtgggcctgatgagccgggtggcccagcctgccagcaagaagatcgatcagaacaagctgaaacctgagatggacgagaagggcaacctgaccaccgccggctttgcctgctctcagtgtggccagcccctgttcgtgtacaagctggagcaggtgtctgagaagggcaaggcttacaccaactacttcggacggtgcaatgtggccgagcacgaaaagctgatcctgctggcccagctgaagcccgagaaggatagcgacgaagccgtgacatatagcctgggaaagtttgggcagagggccctggatttctacagcattcatgtgaccaaggagtccacccaccccgtgaagcccctggcccagatcgccggaaacagatacgcctccggacctgtgggaaaggccctgagcgacgcatgtatgggcacaatcgcctccttcctgtctaagtaccaggacatcatcatcgaacaccagaaggtggtgaagggcaaccagaagagactggagagcctgcgggagctggccggcaaggaaaacctggaataccctagcgtgaccctgccacctcagcctcacaccaaggagggcgttgatgcctacaacgaagtgatcgcccgggtgcgaatgtgggtgaacctgaacctgtggcagaagctgaagctaagcagagatgatgccaagcctctgctgagactgaagggattcccttcctttcctctggtcgagagacaggccaacgaagtggactggtgggacatggtgtgtaacgtgaagaagctgatcaacgagaaaaaggaggatggcaaggtgttttggcagaatctggctggctacaagagacaggaagccctgagaccatacctgagcagcgaggaagatcggaagaagggaaagaaattcgctcggtaccagctgggcgacctgctgctgcacctggaaaagaagcacggcgaggactggggaaaggtgtacgacgaggcctgggagcggattgacaagaaagtggaaggcctgagcaagcacatcaagctggaagaggaacggagaagcgaggacgcccagagcaaggccgccctgaccgactggctgcgggctaaggccagcttcgtgatcgagggcctgaaggaggccgacaaggacgagttctgcagatgcgagctgaagctgcagaagtggtacggggacctgcggggaaagcccttcgccatcgaagccgagaacagcatcctggacatcagcggcttcagcaagcagtacaactgtgccttcatctggcagaaggacggcgtgaagaagctgaacctgtacctgatcatcaactacttcaagggcggcaagctgcggttcaagaagatcaaacctgaagccttcgaagccaacagattctacaccgtgatcaacaaaaagagcggcgagatcgtgcccatggaggtgaacttcaacttcgacgaccccaacctgatcatcctgcctctggcctttggcaagagacagggcagagaattcatctggaacgacctgctgtccctggaaaccggcagcctgaagctggccaacggaagagtgatcgagaagacactgtacaacagaagaacccggcaggatgagcctgccctgttcgtggccctgaccttcgagcggcgggaggtcctggactcctccaatatcaaaccaatgaacctgatcggcgtggcaagaggcgaaaacatccccgccgtgatcgccctgaccgaccccgagggctgcccactgagccggtttaaggatagcctgggaaacccaacccacatcctgagaatcggcgagagctataaggagaagcagcggaccatccaggccaagaaggaggtggagcagcggagagccggcggctacagccggaagtacgccagcaaagccaagaatctggcagacgatatggtgagaaacaccgctagagatctgctgtactacgccgtgacccaggatgccatgctgatcttcgccaacctgagccggggcttcggccggcagggcaagcggaccttcatggccgagagacagtacacacggatggaggactggctgaccgccaagctggcctacgagggcctgagcaagacctacctgtccaagacactggcccagtacacctccaagacatgcagcaactgtgggtttaccatcaccagcgccgactacgacagggtgctggagaagctgaagaagacagcaacaggctggatgaccacaattaacggcaaggagctgaaggtggagggccagattacctactacaacagatacaagagacagaacgtagtcaaggacctgtccgtcgagctggatagactgagcgaagaatctgtgaacaacgacatctcctcctggacaaagggcagaagcggagaagctctgagcctcctgaagaaaagattctcccatagacccgtgcaggagaagttcgtgtgcctgaactgcggcttcgagacacacgcagccgagcaagccgccctgaacatcgccagatcctggctgttcctgcggagccaggagtacaagaaataccagacaaacaagacaaccggcaacaccgataagagagccttcgtcgagacctggcagtccttttaccggaagaagcttaaggaggtgtggaaacctgccgtgcggtctggcggatctggcggaggctccatgaccttcgaggacgtggccgtggagttcaccaggtgggagtggggccagctggaccccacccagaaggacgtgtacagggaggtgatgctggagaacttcaagaacctggccagcctgggcttccccatgagcaagccctacgtgatctgcaggctggaggagggcgaggagccctgcatcctggagagggagatcagcaccggcgcccccgccgactgggagaggaggaggcaggccaagggcggcccaagcagcggcgcccctcctcccagcggcggcagcccagccggctccccaacctctaccgaggagggcacctctgagtccgccacccccgagagcggccctggcacctccaccgagcccagcgagggcagcgcacccggcagccctgccggcagccccacctccacagaggagggaaccagcaccgagcccagcgaaggcagcgccccaggcaccagcaccgagcctagtgagcaggagattaaacggatcaacaagatcagaagaagacttgtgaaagacagcaacaccaagaaggccggcaagacaggccccatgaaaaccctgctggttagagtgatgacacccgatctgagagagcggctggaaaacctgagaaagaagcctgaaaatatcccccagcccatcagcaatacatctagagccaacctgaataagctgctgaccgattacaccgaaatgaagaaggcgatcctgcatgtgtactgggaagagttccagaaggaccctgtgggcctgatgagccgggtggcccagcctgccagcaagaagatcgatcagaacaagctgaaacctgagatggacgagaagggcaacctgaccaccgccggctttgcctgctctcagtgtggccagcccctgttcgtgtacaagctggagcaggtgtctgagaagggcaaggcttacaccaactacttcggacggtgcaatgtggccgagcacgaaaagctgatcctgctggcccagctgaagcccgagaaggatagcgacgaagccgtgacatatagcctgggaaagtttgggcagagggccctggatttctacagcattcatgtgaccaaggagtccacccaccccgtgaagcccctggcccagatcgccggaaacagatacgcctccggacctgtgggaaaggccctgagcgacgcatgtatgggcacaatcgcctccttcctgtctaagtaccaggacatcatcatcgaacaccagaaggtggtgaagggcaaccagaagagactggagagcctgcgggagctggccggcaaggaaaacctggaataccctagcgtgaccctgccacctcagcctcacaccaaggagggcgttgatgcctacaacgaagtgatcgcccgggtgcgaatgtgggtgaacctgaacctgtggcagaagctgaagctaagcagagatgatgccaagcctctgctgagactgaagggattcccttcctttcctctggtcgagagacaggccaacgaagtggactggtgggacatggtgtgtaacgtgaagaagctgatcaacgagaaaaaggaggatggcaaggtgttttggcagaatctggctggctacaagagacaggaagccctgagaccatacctgagcagcgaggaagatcggaagaagggaaagaaattcgctcggtaccagctgggcgacctgctgctgcacctggaaaagaagcacggcgaggactggggaaaggtgtacgacgaggcctgggagcggattgacaagaaagtggaaggcctgagcaagcacatcaagctggaagaggaacggagaagcgaggacgcccagagcaaggccgccctgaccgactggctgcgggctaaggccagcttcgtgatcgagggcctgaaggaggccgacaaggacgagttctgcagatgcgagctgaagctgcagaagtggtacggggacctgcggggaaagcccttcgccatcgaagccgagaacagcatcctggacatcagcggcttcagcaagcagtacaactgtgccttcatctggcagaaggacggcgtgaagaagctgaacctgtacctgatcatcaactacttcaagggcggcaagctgcggttcaagaagatcaaacctgaagccttcgaagccaacagattctacaccgtgatcaacaaaaagagcggcgagatcgtgcccatggaggtgaacttcaacttcgacgaccccaacctgatcatcctgcctctggcctttggcaagagacagggcagagaattcatctggaacgacctgctgtccctggaaaccggcagcctgaagctggccaacggaagagtgatcgagaagacactgtacaacagaagaacccggcaggatgagcctgccctgttcgtggccctgaccttcgagcggcgggaggtcctggactcctccaatatcaaaccaatgaacctgatcggcgtggcaagaggcgaaaacatccccgccgtgatcgccctgaccgaccccgagggctgcccactgagccggtttaaggatagcctgggaaacccaacccacatcctgagaatcggcgagagctataaggagaagcagcggaccatccaggccaagaaggaggtggagcagcggagagccggcggctacagccggaagtacgccagcaaagccaagaatctggcagacgatatggtgagaaacaccgctagagatctgctgtactacgccgtgacccaggatgccatgctgatcttcgccaacctgagccggggcttcggccggcagggcaagcggaccttcatggccgagagacagtacacacggatggaggactggctgaccgccaagctggcctacgagggcctgagcaagacctacctgtccaagacactggcccagtacacctccaagacatgcagcaactgtgggtttaccatcaccagcgccgactacgacagggtgctggagaagctgaagaagacagcaacaggctggatgaccacaattaacggcaaggagctgaaggtggagggccagattacctactacaacagatacaagagacagaacgtagtcaaggacctgtccgtcgagctggatagactgagcgaagaatctgtgaacaacgacatctcctcctggacaaagggcagaagcggagaagctctgagcctcctgaagaaaagattctcccatagacccgtgcaggagaagttcgtgtgcctgaactgcggcttcgagacacacgcagccgagcaagccgccctgaacatcgccagatcctggctgttcctgcggagccaggagtacaagaaataccagacaaacaagacaaccggcaacaccgataagagagccttcgtcgagacctggcagtccttttaccggaagaagcttaaggaggtgtggaaacctgccgtgcggtctggcggatctggcggaggctcctatgaccttcgaggacgtggccgtggagttcaccaggtgggagtggggccagctggaccccacccagaaggacgtgtacagggaggtgatgctggagaacttcaagaacctggccagcctgggcttccccatgagcaagccctacgtgatctgcaggctggaggagggcgaggagccctgcatcctggagagggagatcagcaccggcgcccccgccgactgggagaggaggaggcaggccaagggatctggctccggcagcggccccaagaaaaagagaaaagtctaagctgccttctgcggggcttgccttctggccatgcccttcttctctcccttgcacctgtacctcttggtctttgaataaagcctgagtaggaaggctagcaaaaaaaaaaaaaaaaaaaaaaaaaaaaaaaaaaaaaaaaaaaaaaaaaaaaaaaaaaaaaaaaaaaaaaaaaaaaaaaa

SEQ ID NO: 15982 - RNA, 9485 nt, synthetic construct
  source 1..9485: mol_type = other RNA
aggaaataagagagaaaagaagagtaagaagaaatataagagccaccatggcccctaagaagaagcgtaaagtgagccggatggaacgcctcgtctacgaggtgcggcagaagtgcagaaacatcgaggacatctgcatctcctgcggatctctgaacgtgaccctggagcacccactgttcatcggcggcatgtgccagaactgtaaaaactgttttctggagtgtgcctatcaatacgacgatgacggctaccagagctactgcaccatctgttgcggcggaagagaggtgctgatgtgtggaaataacaactgctgccggtgcttctgcgtggaatgcgtggacctgctggtgggccccggcgccgcccaggccgctattaaggaagatccttggaactgctacatgtgcggccacaagggcacatacggcctgctgagacggagagaggactggcctagcagactgcagatgttcttcgccaataaccacgaccaggagttcgacccccctaaggtgtaccctcccgtccccgccgagaagagaaagcccatccgggtcctgagcctgttcgatggcatcgccaccggtctgctggtgctgaaggacctgggcatccaggtggataggtacattgcctccgaggtgtgcgaggactccatcaccgtgggaatggtgcgtcatcagggcaagatcatgtacgtgggcgacgtgcggagcgtgacacagaagcatatccaggagtggggccctttcgacctggtgatcggcggcagcccttgcaatgacctgagcatcgtgaacccagcccggaagggcctgtacgagggaaccggcagactgttcttcgagttttacagactgctgcacgacgcccggcctaaggaaggcgacgaccggcccttcttttggctgttcgagaatgtggtggccatgggagtcagcgacaagcgggatattagccggttcctggagagcaaccccgtgatgatcgatgccaaggaagtgagcgccgcccaccgggccagatacttctggggcaatctgcctggcatgaacagacccctggccagcaccgtgaacgacaagctggagctgcaggagtgcctggagcacggccggatcgccaagttcagcaaggtgagaaccatcaccacccgaagcaacagcatcaaacaaggcaaggaccagcactttcctgtgttcatgaacgagaaggaggacatcctgtggtgtaccgagatggagagagtgttcgggttcccagtccactacacagatgtcagcaacatgtctagactggccagacagagactgctgggaagaagctggtccgtccctgtgatcagacacctgttcgcccctctgaaggagtacttcgcctgcgtgagcagcggcaacagcaacgccaacagccggggccccagcttctctagcggcctggtgccactgtccctgagagggagccacatgggccccatggagatctacaaaaccgtgagcgcctggaagcggcagcctgtgcgcgtgctgagcctgtttcggaatatcgataaagtcctgaaaagcctgggattcctggagagcggctctggctccggcggtggcaccctgaagtacgtggaggatgtgacaaacgtggtcagacgggatgtggagaagtggggccccttcgatctggtgtacggcagcacccaacccctgggcagctcttgtgaccggtgccctggctggtacatgtttcagttccaccggatcctgcagtacgccctgccgagacaggagtcccagcggccattcttttggattttcatggacaacttgctgctgaccgaggatgaccaggaaactaccactcggttcctgcagaccgaagccgtgaccctgcaggacgtgagaggccgggactaccagaacgccatgcgggtgtggtccaacatccctggactgaaaagcaagcacgcacctctgacccctaaagaagaggagtacctgcaggcccaggtgcggagcagaagcaagctggacgcccctaaggtggatctgctggtgaagaattgcctcctgcccctgagagagtacttcaagtatttcagccagaatagtctgcccctgggaggcagcggcggcggcgccctggtgacatttgaggacgtcgccgtgcggttcacccaggaggaatgggctctgctggatccttctcagaaaatcctgtaccgggacgtgatgagagagacataccggaatctgacctccgtgggcatcaactgggaatgttgggaccttgaagcctgcttcagaagcctgggaagaaacctgagagtgcaggtggtgaagagaaagtgcgagctgaccaacagcggcccctgcgccgagggcggcccaagcagcggcgcccctcctcccagcggcggcagcccagccggctccccaacctctaccgaggagggcacctctgagtccgccacccccgagagcggccctggcacctccaccgagcccagcgagggcagcgcacccggcagccctgccggcagccccacctccacagaggagggaaccagcaccgagcccagcgaaggcagcgccccaggcaccagcaccgagcctagtgagcaggagattaaacggatcaacaagatcagaagaagacttgtgaaagacagcaacaccaagaaggccggcaagacaggccccatgaaaaccctgctggttagagtgatgacacccgatctgagagagcggctggaaaacctgagaaagaagcctgaaaatatcccccagcccatcagcaatacatctagagccaacctgaataagctgctgaccgattacaccgaaatgaagaaggcgatcctgcatgtgtactgggaagagttccagaaggaccctgtgggcctgatgagccgggtggcccagcctgccagcaagaagatcgatcagaacaagctgaaacctgagatggacgagaagggcaacctgaccaccgccggctttgcctgctctcagtgtggccagcccctgttcgtgtacaagctggagcaggtgtctgagaagggcaaggcttacaccaactacttcggacggtgcaatgtggccgagcacgaaaagctgatcctgctggcccagctgaagcccgagaaggatagcgacgaagccgtgacatatagcctgggaaagtttgggcagagggccctggatttctacagcattcatgtgaccaaggagtccacccaccccgtgaagcccctggcccagatcgccggaaacagatacgcctccggacctgtgggaaaggccctgagcgacgcatgtatgggcacaatcgcctccttcctgtctaagtaccaggacatcatcatcgaacaccagaaggtggtgaagggcaaccagaagagactggagagcctgcgggagctggccggcaaggaaaacctggaataccctagcgtgaccctgccacctcagcctcacaccaaggagggcgttgatgcctacaacgaagtgatcgcccgggtgcgaatgtgggtgaacctgaacctgtggcagaagctgaagctaagcagagatgatgccaagcctctgctgagactgaagggattcccttcctttcctctggtcgagagacaggccaacgaagtggactggtgggacatggtgtgtaacgtgaagaagctgatcaacgagaaaaaggaggatggcaaggtgttttggcagaatctggctggctacaagagacaggaagccctgagaccatacctgagcagcgaggaagatcggaagaagggaaagaaattcgctcggtaccagctgggcgacctgctgctgcacctggaaaagaagcacggcgaggactggggaaaggtgtacgacgaggcctgggagcggattgacaagaaagtggaaggcctgagcaagcacatcaagctggaagaggaacggagaagcgaggacgcccagagcaaggccgccctgaccgactggctgcgggctaaggccagcttcgtgatcgagggcctgaaggaggccgacaaggacgagttctgcagatgcgagctgaagctgcagaagtggtacggggacctgcggggaaagcccttcgccatcgaagccgagaacagcatcctggacatcagcggcttcagcaagcagtacaactgtgccttcatctggcagaaggacggcgtgaagaagctgaacctgtacctgatcatcaactacttcaagggcggcaagctgcggttcaagaagatcaaacctgaagccttcgaagccaacagattctacaccgtgatcaacaaaaagagcggcgagatcgtgcccatggaggtgaacttcaacttcgacgaccccaacctgatcatcctgcctctggcctttggcaagagacagggcagagaattcatctggaacgacctgctgtccctggaaaccggcagcctgaagctggccaacggaagagtgatcgagaagacactgtacaacagaagaacccggcaggatgagcctgccctgttcgtggccctgaccttcgagcggcgggaggtcctggactcctccaatatcaaaccaatgaacctgatcggcgtggcaagaggcgaaaacatccccgccgtgatcgccctgaccgaccccgagggctgcccactgagccggtttaaggatagcctgggaaacccaacccacatcctgagaatcggcgagagctataaggagaagcagcggaccatccaggccaagaaggaggtggagcagcggagagccggcggctacagccggaagtacgccagcaaagccaagaatctggcagacgatatggtgagaaacaccgctagagatctgctgtactacgccgtgacccaggatgccatgctgatcttcgccaacctgagccggggcttcggccggcagggcaagcggaccttcatggccgagagacagtacacacggatggaggactggctgaccgccaagctggcctacgagggcctgagcaagacctacctgtccaagacactggcccagtacacctccaagacatgcagcaactgtgggtttaccatcaccagcgccgactacgacagggtgctggagaagctgaagaagacagcaacaggctggatgaccacaattaacggcaaggagctgaaggtggagggccagattacctactacaacagatacaagagacagaacgtagtcaaggacctgtccgtcgagctggatagactgagcgaagaatctgtgaacaacgacatctcctcctggacaaagggcagaagcggagaagctctgagcctcctgaagaaaagattctcccatagacccgtgcaggagaagttcgtgtgcctgaactgcggcttcgagacacacgcagccgagcaagccgccctgaacatcgccagatcctggctgttcctgcggagccaggagtacaagaaataccagacaaacaagacaaccggcaacaccgataagagagccttcgtcgagacctggcagtccttttaccggaagaagcttaaggaggtgtggaaacctgccgtgcggtctggcggatctggcggaggctccagctacgagggcagcgtgagcttcagggacgtggccatcgacttcagcagggaggagtggaggcacctggacctgagccagaggaacctgtacagggacgtgatgctggagacctacagccacctgctgagcgtgggctaccaggtgcccgaggccgaggtggtgatgctggagcagggcaaggagccctgggccctgcagggcgagaggcccaggcacagctgccccggcgagaagctgtggggcggcccaagcagcggcgcccctcctcccagcggcggcagcccagccggctccccaacctctaccgaggagggcacctctgagtccgccacccccgagagcggccctggcacctccaccgagcccagcgagggcagcgcacccggcagccctgccggcagccccacctccacagaggagggaaccagcaccgagcccagcgaaggcagcgccccaggcaccagcaccgagcctagtgagcaggagattaaacggatcaacaagatcagaagaagacttgtgaaagacagcaacaccaagaaggccggcaagacaggccccatgaaaaccctgctggttagagtgatgacacccgatctgagagagcggctggaaaacctgagaaagaagcctgaaaatatcccccagcccatcagcaatacatctagagccaacctgaataagctgctgaccgattacaccgaaatgaagaaggcgatcctgcatgtgtactgggaagagttccagaaggaccctgtgggcctgatgagccgggtggcccagcctgccagcaagaagatcgatcagaacaagctgaaacctgagatggacgagaagggcaacctgaccaccgccggctttgcctgctctcagtgtggccagcccctgttcgtgtacaagctggagcaggtgtctgagaagggcaaggcttacaccaactacttcggacggtgcaatgtggccgagcacgaaaagctgatcctgctggcccagctgaagcccgagaaggatagcgacgaagccgtgacatatagcctgggaaagtttgggcagagggccctggatttctacagcattcatgtgaccaaggagtccacccaccccgtgaagcccctggcccagatcgccggaaacagatacgcctccggacctgtgggaaaggccctgagcgacgcatgtatgggcacaatcgcctccttcctgtctaagtaccaggacatcatcatcgaacaccagaaggtggtgaagggcaaccagaagagactggagagcctgcgggagctggccggcaaggaaaacctggaataccctagcgtgaccctgccacctcagcctcacaccaaggagggcgttgatgcctacaacgaagtgatcgcccgggtgcgaatgtgggtgaacctgaacctgtggcagaagctgaagctaagcagagatgatgccaagcctctgctgagactgaagggattcccttcctttcctctggtcgagagacaggccaacgaagtggactggtgggacatggtgtgtaacgtgaagaagctgatcaacgagaaaaaggaggatggcaaggtgttttggcagaatctggctggctacaagagacaggaagccctgagaccatacctgagcagcgaggaagatcggaagaagggaaagaaattcgctcggtaccagctgggcgacctgctgctgcacctggaaaagaagcacggcgaggactggggaaaggtgtacgacgaggcctgggagcggattgacaagaaagtggaaggcctgagcaagcacatcaagctggaagaggaacggagaagcgaggacgcccagagcaaggccgccctgaccgactggctgcgggctaaggccagcttcgtgatcgagggcctgaaggaggccgacaaggacgagttctgcagatgcgagctgaagctgcagaagtggtacggggacctgcggggaaagcccttcgccatcgaagccgagaacagcatcctggacatcagcggcttcagcaagcagtacaactgtgccttcatctggcagaaggacggcgtgaagaagctgaacctgtacctgatcatcaactacttcaagggcggcaagctgcggttcaagaagatcaaacctgaagccttcgaagccaacagattctacaccgtgatcaacaaaaagagcggcgagatcgtgcccatggaggtgaacttcaacttcgacgaccccaacctgatcatcctgcctctggcctttggcaagagacagggcagagaattcatctggaacgacctgctgtccctggaaaccggcagcctgaagctggccaacggaagagtgatcgagaagacactgtacaacagaagaacccggcaggatgagcctgccctgttcgtggccctgaccttcgagcggcgggaggtcctggactcctccaatatcaaaccaatgaacctgatcggcgtggcaagaggcgaaaacatccccgccgtgatcgccctgaccgaccccgagggctgcccactgagccggtttaaggatagcctgggaaacccaacccacatcctgagaatcggcgagagctataaggagaagcagcggaccatccaggccaagaaggaggtggagcagcggagagccggcggctacagccggaagtacgccagcaaagccaagaatctggcagacgatatggtgagaaacaccgctagagatctgctgtactacgccgtgacccaggatgccatgctgatcttcgccaacctgagccggggcttcggccggcagggcaagcggaccttcatggccgagagacagtacacacggatggaggactggctgaccgccaagctggcctacgagggcctgagcaagacctacctgtccaagacactggcccagtacacctccaagacatgcagcaactgtgggtttaccatcaccagcgccgactacgacagggtgctggagaagctgaagaagacagcaacaggctggatgaccacaattaacggcaaggagctgaaggtggagggccagattacctactacaacagatacaagagacagaacgtagtcaaggacctgtccgtcgagctggatagactgagcgaagaatctgtgaacaacgacatctcctcctggacaaagggcagaagcggagaagctctgagcctcctgaagaaaagattctcccatagacccgtgcaggagaagttcgtgtgcctgaactgcggcttcgagacacacgcagccgagcaagccgccctgaacatcgccagatcctggctgttcctgcggagccaggagtacaagaaataccagacaaacaagacaaccggcaacaccgataagagagccttcgtcgagacctggcagtccttttaccggaagaagcttaaggaggtgtggaaacctgccgtgcggtctggcggatctggcggaggctcctagctacgagggcagcgtgagcttcagggacgtggccatcgacttcagcagggaggagtggaggcacctggacctgagccagaggaacctgtacagggacgtgatgctggagacctacagccacctgctgagcgtgggctaccaggtgcccgaggccgaggtggtgatgctggagcagggcaaggagccctgggccctgcagggcgagaggcccaggcacagctgccccggcgagaagctgtggggatctggctccggcagcggccccaagaaaaagagaaaagtctaagctgccttctgcggggcttgccttctggccatgcccttcttctctcccttgcacctgtacctcttggtctttgaataaagcctgagtaggaaggctagcaaaaaaaaaaaaaaaaaaaaaaaaaaaaaaaaaaaaaaaaaaaaaaaaaaaaaaaaaaaaaaaaaaaaaaaaaaaaaaaa

SEQ ID NO: 15983 - RNA, 9485 nt, synthetic construct
  source 1..9485: mol_type = other RNA
aggaaataagagagaaaagaagagtaagaagaaatataagagccaccatggcccctaagaagaagcgtaaagtgagccggatggaacgcctcgtctacgaggtgcggcagaagtgcagaaacatcgaggacatctgcatctcctgcggatctctgaacgtgaccctggagcacccactgttcatcggcggcatgtgccagaactgtaaaaactgttttctggagtgtgcctatcaatacgacgatgacggctaccagagctactgcaccatctgttgcggcggaagagaggtgctgatgtgtggaaataacaactgctgccggtgcttctgcgtggaatgcgtggacctgctggtgggccccggcgccgcccaggccgctattaaggaagatccttggaactgctacatgtgcggccacaagggcacatacggcctgctgagacggagagaggactggcctagcagactgcagatgttcttcgccaataaccacgaccaggagttcgacccccctaaggtgtaccctcccgtccccgccgagaagagaaagcccatccgggtcctgagcctgttcgatggcatcgccaccggtctgctggtgctgaaggacctgggcatccaggtggataggtacattgcctccgaggtgtgcgaggactccatcaccgtgggaatggtgcgtcatcagggcaagatcatgtacgtgggcgacgtgcggagcgtgacacagaagcatatccaggagtggggccctttcgacctggtgatcggcggcagcccttgcaatgacctgagcatcgtgaacccagcccggaagggcctgtacgagggaaccggcagactgttcttcgagttttacagactgctgcacgacgcccggcctaaggaaggcgacgaccggcccttcttttggctgttcgagaatgtggtggccatgggagtcagcgacaagcgggatattagccggttcctggagagcaaccccgtgatgatcgatgccaaggaagtgagcgccgcccaccgggccagatacttctggggcaatctgcctggcatgaacagacccctggccagcaccgtgaacgacaagctggagctgcaggagtgcctggagcacggccggatcgccaagttcagcaaggtgagaaccatcaccacccgaagcaacagcatcaaacaaggcaaggaccagcactttcctgtgttcatgaacgagaaggaggacatcctgtggtgtaccgagatggagagagtgttcgggttcccagtccactacacagatgtcagcaacatgtctagactggccagacagagactgctgggaagaagctggtccgtccctgtgatcagacacctgttcgcccctctgaaggagtacttcgcctgcgtgagcagcggcaacagcaacgccaacagccggggccccagcttctctagcggcctggtgccactgtccctgagagggagccacatgggccccatggagatctacaaaaccgtgagcgcctggaagcggcagcctgtgcgcgtgctgagcctgtttcggaatatcgataaagtcctgaaaagcctgggattcctggagagcggctctggctccggcggtggcaccctgaagtacgtggaggatgtgacaaacgtggtcagacgggatgtggagaagtggggccccttcgatctggtgtacggcagcacccaacccctgggcagctcttgtgaccggtgccctggctggtacatgtttcagttccaccggatcctgcagtacgccctgccgagacaggagtcccagcggccattcttttggattttcatggacaacttgctgctgaccgaggatgaccaggaaactaccactcggttcctgcagaccgaagccgtgaccctgcaggacgtgagaggccgggactaccagaacgccatgcgggtgtggtccaacatccctggactgaaaagcaagcacgcacctctgacccctaaagaagaggagtacctgcaggcccaggtgcggagcagaagcaagctggacgcccctaaggtggatctgctggtgaagaattgcctcctgcccctgagagagtacttcaagtatttcagccagaatagtctgcccctgggaggcagcggcggcggcgccctggtgacatttgaggacgtcgccgtgcggttcacccaggaggaatgggctctgctggatccttctcagaaaatcctgtaccgggacgtgatgagagagacataccggaatctgacctccgtgggcatcaactgggaatgttgggaccttgaagcctgcttcagaagcctgggaagaaacctgagagtgcaggtggtgaagagaaagtgcgagctgaccaacagcggcccctgcgccgagggcggcccaagcagcggcgcccctcctcccagcggcggcagcccagccggctccccaacctctaccgaggagggcacctctgagtccgccacccccgagagcggccctggcacctccaccgagcccagcgagggcagcgcacccggcagccctgccggcagccccacctccacagaggagggaaccagcaccgagcccagcgaaggcagcgccccaggcaccagcaccgagcctagtgagcaggagattaaacggatcaacaagatcagaagaagacttgtgaaagacagcaacaccaagaaggccggcaagacaggccccatgaaaaccctgctggttagagtgatgacacccgatctgagagagcggctggaaaacctgagaaagaagcctgaaaatatcccccagcccatcagcaatacatctagagccaacctgaataagctgctgaccgattacaccgaaatgaagaaggcgatcctgcatgtgtactgggaagagttccagaaggaccctgtgggcctgatgagccgggtggcccagcctgccagcaagaagatcgatcagaacaagctgaaacctgagatggacgagaagggcaacctgaccaccgccggctttgcctgctctcagtgtggccagcccctgttcgtgtacaagctggagcaggtgtctgagaagggcaaggcttacaccaactacttcggacggtgcaatgtggccgagcacgaaaagctgatcctgctggcccagctgaagcccgagaaggatagcgacgaagccgtgacatatagcctgggaaagtttgggcagagggccctggatttctacagcattcatgtgaccaaggagtccacccaccccgtgaagcccctggcccagatcgccggaaacagatacgcctccggacctgtgggaaaggccctgagcgacgcatgtatgggcacaatcgcctccttcctgtctaagtaccaggacatcatcatcgaacaccagaaggtggtgaagggcaaccagaagagactggagagcctgcgggagctggccggcaaggaaaacctggaataccctagcgtgaccctgccacctcagcctcacaccaaggagggcgttgatgcctacaacgaagtgatcgcccgggtgcgaatgtgggtgaacctgaacctgtggcagaagctgaagctaagcagagatgatgccaagcctctgctgagactgaagggattcccttcctttcctctggtcgagagacaggccaacgaagtggactggtgggacatggtgtgtaacgtgaagaagctgatcaacgagaaaaaggaggatggcaaggtgttttggcagaatctggctggctacaagagacaggaagccctgagaccatacctgagcagcgaggaagatcggaagaagggaaagaaattcgctcggtaccagctgggcgacctgctgctgcacctggaaaagaagcacggcgaggactggggaaaggtgtacgacgaggcctgggagcggattgacaagaaagtggaaggcctgagcaagcacatcaagctggaagaggaacggagaagcgaggacgcccagagcaaggccgccctgaccgactggctgcgggctaaggccagcttcgtgatcgagggcctgaaggaggccgacaaggacgagttctgcagatgcgagctgaagctgcagaagtggtacggggacctgcggggaaagcccttcgccatcgaagccgagaacagcatcctggacatcagcggcttcagcaagcagtacaactgtgccttcatctggcagaaggacggcgtgaagaagctgaacctgtacctgatcatcaactacttcaagggcggcaagctgcggttcaagaagatcaaacctgaagccttcgaagccaacagattctacaccgtgatcaacaaaaagagcggcgagatcgtgcccatggaggtgaacttcaacttcgacgaccccaacctgatcatcctgcctctggcctttggcaagagacagggcagagaattcatctggaacgacctgctgtccctggaaaccggcagcctgaagctggccaacggaagagtgatcgagaagacactgtacaacagaagaacccggcaggatgagcctgccctgttcgtggccctgaccttcgagcggcgggaggtcctggactcctccaatatcaaaccaatgaacctgatcggcgtggcaagaggcgaaaacatccccgccgtgatcgccctgaccgaccccgagggctgcccactgagccggtttaaggatagcctgggaaacccaacccacatcctgagaatcggcgagagctataaggagaagcagcggaccatccaggccaagaaggaggtggagcagcggagagccggcggctacagccggaagtacgccagcaaagccaagaatctggcagacgatatggtgagaaacaccgctagagatctgctgtactacgccgtgacccaggatgccatgctgatcttcgccaacctgagccggggcttcggccggcagggcaagcggaccttcatggccgagagacagtacacacggatggaggactggctgaccgccaagctggcctacgagggcctgagcaagacctacctgtccaagacactggcccagtacacctccaagacatgcagcaactgtgggtttaccatcaccagcgccgactacgacagggtgctggagaagctgaagaagacagcaacaggctggatgaccacaattaacggcaaggagctgaaggtggagggccagattacctactacaacagatacaagagacagaacgtagtcaaggacctgtccgtcgagctggatagactgagcgaagaatctgtgaacaacgacatctcctcctggacaaagggcagaagcggagaagctctgagcctcctgaagaaaagattctcccatagacccgtgcaggagaagttcgtgtgcctgaactgcggcttcgagacacacgcagccgagcaagccgccctgaacatcgccagatcctggctgttcctgcggagccaggagtacaagaaataccagacaaacaagacaaccggcaacaccgataagagagccttcgtcgagacctggcagtccttttaccggaagaagcttaaggaggtgtggaaacctgccgtgcggtctggcggatctggcggaggctccttccagaccctgctggccttcgaggacgtggccgtgttcttcagcgaggaggagtgggagctgctggacgagctgcagaaggaggtgtacaagaacaccatgagggagaactacgagaccctgctgagcctgggcctgaccaacatgaagcccgagatcatcgccaagatcgacgccggcgaggcccccagcgtgcagaacgccagctacctggagaagaggggcaagaagagcgccgccggcggcggcccaagcagcggcgcccctcctcccagcggcggcagcccagccggctccccaacctctaccgaggagggcacctctgagtccgccacccccgagagcggccctggcacctccaccgagcccagcgagggcagcgcacccggcagccctgccggcagccccacctccacagaggagggaaccagcaccgagcccagcgaaggcagcgccccaggcaccagcaccgagcctagtgagcaggagattaaacggatcaacaagatcagaagaagacttgtgaaagacagcaacaccaagaaggccggcaagacaggccccatgaaaaccctgctggttagagtgatgacacccgatctgagagagcggctggaaaacctgagaaagaagcctgaaaatatcccccagcccatcagcaatacatctagagccaacctgaataagctgctgaccgattacaccgaaatgaagaaggcgatcctgcatgtgtactgggaagagttccagaaggaccctgtgggcctgatgagccgggtggcccagcctgccagcaagaagatcgatcagaacaagctgaaacctgagatggacgagaagggcaacctgaccaccgccggctttgcctgctctcagtgtggccagcccctgttcgtgtacaagctggagcaggtgtctgagaagggcaaggcttacaccaactacttcggacggtgcaatgtggccgagcacgaaaagctgatcctgctggcccagctgaagcccgagaaggatagcgacgaagccgtgacatatagcctgggaaagtttgggcagagggccctggatttctacagcattcatgtgaccaaggagtccacccaccccgtgaagcccctggcccagatcgccggaaacagatacgcctccggacctgtgggaaaggccctgagcgacgcatgtatgggcacaatcgcctccttcctgtctaagtaccaggacatcatcatcgaacaccagaaggtggtgaagggcaaccagaagagactggagagcctgcgggagctggccggcaaggaaaacctggaataccctagcgtgaccctgccacctcagcctcacaccaaggagggcgttgatgcctacaacgaagtgatcgcccgggtgcgaatgtgggtgaacctgaacctgtggcagaagctgaagctaagcagagatgatgccaagcctctgctgagactgaagggattcccttcctttcctctggtcgagagacaggccaacgaagtggactggtgggacatggtgtgtaacgtgaagaagctgatcaacgagaaaaaggaggatggcaaggtgttttggcagaatctggctggctacaagagacaggaagccctgagaccatacctgagcagcgaggaagatcggaagaagggaaagaaattcgctcggtaccagctgggcgacctgctgctgcacctggaaaagaagcacggcgaggactggggaaaggtgtacgacgaggcctgggagcggattgacaagaaagtggaaggcctgagcaagcacatcaagctggaagaggaacggagaagcgaggacgcccagagcaaggccgccctgaccgactggctgcgggctaaggccagcttcgtgatcgagggcctgaaggaggccgacaaggacgagttctgcagatgcgagctgaagctgcagaagtggtacggggacctgcggggaaagcccttcgccatcgaagccgagaacagcatcctggacatcagcggcttcagcaagcagtacaactgtgccttcatctggcagaaggacggcgtgaagaagctgaacctgtacctgatcatcaactacttcaagggcggcaagctgcggttcaagaagatcaaacctgaagccttcgaagccaacagattctacaccgtgatcaacaaaaagagcggcgagatcgtgcccatggaggtgaacttcaacttcgacgaccccaacctgatcatcctgcctctggcctttggcaagagacagggcagagaattcatctggaacgacctgctgtccctggaaaccggcagcctgaagctggccaacggaagagtgatcgagaagacactgtacaacagaagaacccggcaggatgagcctgccctgttcgtggccctgaccttcgagcggcgggaggtcctggactcctccaatatcaaaccaatgaacctgatcggcgtggcaagaggcgaaaacatccccgccgtgatcgccctgaccgaccccgagggctgcccactgagccggtttaaggatagcctgggaaacccaacccacatcctgagaatcggcgagagctataaggagaagcagcggaccatccaggccaagaaggaggtggagcagcggagagccggcggctacagccggaagtacgccagcaaagccaagaatctggcagacgatatggtgagaaacaccgctagagatctgctgtactacgccgtgacccaggatgccatgctgatcttcgccaacctgagccggggcttcggccggcagggcaagcggaccttcatggccgagagacagtacacacggatggaggactggctgaccgccaagctggcctacgagggcctgagcaagacctacctgtccaagacactggcccagtacacctccaagacatgcagcaactgtgggtttaccatcaccagcgccgactacgacagggtgctggagaagctgaagaagacagcaacaggctggatgaccacaattaacggcaaggagctgaaggtggagggccagattacctactacaacagatacaagagacagaacgtagtcaaggacctgtccgtcgagctggatagactgagcgaagaatctgtgaacaacgacatctcctcctggacaaagggcagaagcggagaagctctgagcctcctgaagaaaagattctcccatagacccgtgcaggagaagttcgtgtgcctgaactgcggcttcgagacacacgcagccgagcaagccgccctgaacatcgccagatcctggctgttcctgcggagccaggagtacaagaaataccagacaaacaagacaaccggcaacaccgataagagagccttcgtcgagacctggcagtccttttaccggaagaagcttaaggaggtgtggaaacctgccgtgcggtctggcggatctggcggaggctcctttccagaccctgctggccttcgaggacgtggccgtgttcttcagcgaggaggagtgggagctgctggacgagctgcagaaggaggtgtacaagaacaccatgagggagaactacgagaccctgctgagcctgggcctgaccaacatgaagcccgagatcatcgccaagatcgacgccggcgaggcccccagcgtgcagaacgccagctacctggagaagaggggcaagaagagcgccgccggcggatctggctccggcagcggccccaagaaaaagagaaaagtctaagctgccttctgcggggcttgccttctggccatgcccttcttctctcccttgcacctgtacctcttggtctttgaataaagcctgagtaggaaggctagcaaaaaaaaaaaaaaaaaaaaaaaaaaaaaaaaaaaaaaaaaaaaaaaaaaaaaaaaaaaaaaaaaaaaaaaaaaaaaaaa

SEQ ID NO: 15984 - RNA, 9485 nt, synthetic construct
  source 1..9485: mol_type = other RNA
aggaaataagagagaaaagaagagtaagaagaaatataagagccaccatggcccctaagaagaagcgtaaagtgagccggatggaacgcctcgtctacgaggtgcggcagaagtgcagaaacatcgaggacatctgcatctcctgcggatctctgaacgtgaccctggagcacccactgttcatcggcggcatgtgccagaactgtaaaaactgttttctggagtgtgcctatcaatacgacgatgacggctaccagagctactgcaccatctgttgcggcggaagagaggtgctgatgtgtggaaataacaactgctgccggtgcttctgcgtggaatgcgtggacctgctggtgggccccggcgccgcccaggccgctattaaggaagatccttggaactgctacatgtgcggccacaagggcacatacggcctgctgagacggagagaggactggcctagcagactgcagatgttcttcgccaataaccacgaccaggagttcgacccccctaaggtgtaccctcccgtccccgccgagaagagaaagcccatccgggtcctgagcctgttcgatggcatcgccaccggtctgctggtgctgaaggacctgggcatccaggtggataggtacattgcctccgaggtgtgcgaggactccatcaccgtgggaatggtgcgtcatcagggcaagatcatgtacgtgggcgacgtgcggagcgtgacacagaagcatatccaggagtggggccctttcgacctggtgatcggcggcagcccttgcaatgacctgagcatcgtgaacccagcccggaagggcctgtacgagggaaccggcagactgttcttcgagttttacagactgctgcacgacgcccggcctaaggaaggcgacgaccggcccttcttttggctgttcgagaatgtggtggccatgggagtcagcgacaagcgggatattagccggttcctggagagcaaccccgtgatgatcgatgccaaggaagtgagcgccgcccaccgggccagatacttctggggcaatctgcctggcatgaacagacccctggccagcaccgtgaacgacaagctggagctgcaggagtgcctggagcacggccggatcgccaagttcagcaaggtgagaaccatcaccacccgaagcaacagcatcaaacaaggcaaggaccagcactttcctgtgttcatgaacgagaaggaggacatcctgtggtgtaccgagatggagagagtgttcgggttcccagtccactacacagatgtcagcaacatgtctagactggccagacagagactgctgggaagaagctggtccgtccctgtgatcagacacctgttcgcccctctgaaggagtacttcgcctgcgtgagcagcggcaacagcaacgccaacagccggggccccagcttctctagcggcctggtgccactgtccctgagagggagccacatgggccccatggagatctacaaaaccgtgagcgcctggaagcggcagcctgtgcgcgtgctgagcctgtttcggaatatcgataaagtcctgaaaagcctgggattcctggagagcggctctggctccggcggtggcaccctgaagtacgtggaggatgtgacaaacgtggtcagacgggatgtggagaagtggggccccttcgatctggtgtacggcagcacccaacccctgggcagctcttgtgaccggtgccctggctggtacatgtttcagttccaccggatcctgcagtacgccctgccgagacaggagtcccagcggccattcttttggattttcatggacaacttgctgctgaccgaggatgaccaggaaactaccactcggttcctgcagaccgaagccgtgaccctgcaggacgtgagaggccgggactaccagaacgccatgcgggtgtggtccaacatccctggactgaaaagcaagcacgcacctctgacccctaaagaagaggagtacctgcaggcccaggtgcggagcagaagcaagctggacgcccctaaggtggatctgctggtgaagaattgcctcctgcccctgagagagtacttcaagtatttcagccagaatagtctgcccctgggaggcagcggcggcggcgccctggtgacatttgaggacgtcgccgtgcggttcacccaggaggaatgggctctgctggatccttctcagaaaatcctgtaccgggacgtgatgagagagacataccggaatctgacctccgtgggcatcaactgggaatgttgggaccttgaagcctgcttcagaagcctgggaagaaacctgagagtgcaggtggtgaagagaaagtgcgagctgaccaacagcggcccctgcgccgagggcggcccaagcagcggcgcccctcctcccagcggcggcagcccagccggctccccaacctctaccgaggagggcacctctgagtccgccacccccgagagcggccctggcacctccaccgagcccagcgagggcagcgcacccggcagccctgccggcagccccacctccacagaggagggaaccagcaccgagcccagcgaaggcagcgccccaggcaccagcaccgagcctagtgagcaggagattaaacggatcaacaagatcagaagaagacttgtgaaagacagcaacaccaagaaggccggcaagacaggccccatgaaaaccctgctggttagagtgatgacacccgatctgagagagcggctggaaaacctgagaaagaagcctgaaaatatcccccagcccatcagcaatacatctagagccaacctgaataagctgctgaccgattacaccgaaatgaagaaggcgatcctgcatgtgtactgggaagagttccagaaggaccctgtgggcctgatgagccgggtggcccagcctgccagcaagaagatcgatcagaacaagctgaaacctgagatggacgagaagggcaacctgaccaccgccggctttgcctgctctcagtgtggccagcccctgttcgtgtacaagctggagcaggtgtctgagaagggcaaggcttacaccaactacttcggacggtgcaatgtggccgagcacgaaaagctgatcctgctggcccagctgaagcccgagaaggatagcgacgaagccgtgacatatagcctgggaaagtttgggcagagggccctggatttctacagcattcatgtgaccaaggagtccacccaccccgtgaagcccctggcccagatcgccggaaacagatacgcctccggacctgtgggaaaggccctgagcgacgcatgtatgggcacaatcgcctccttcctgtctaagtaccaggacatcatcatcgaacaccagaaggtggtgaagggcaaccagaagagactggagagcctgcgggagctggccggcaaggaaaacctggaataccctagcgtgaccctgccacctcagcctcacaccaaggagggcgttgatgcctacaacgaagtgatcgcccgggtgcgaatgtgggtgaacctgaacctgtggcagaagctgaagctaagcagagatgatgccaagcctctgctgagactgaagggattcccttcctttcctctggtcgagagacaggccaacgaagtggactggtgggacatggtgtgtaacgtgaagaagctgatcaacgagaaaaaggaggatggcaaggtgttttggcagaatctggctggctacaagagacaggaagccctgagaccatacctgagcagcgaggaagatcggaagaagggaaagaaattcgctcggtaccagctgggcgacctgctgctgcacctggaaaagaagcacggcgaggactggggaaaggtgtacgacgaggcctgggagcggattgacaagaaagtggaaggcctgagcaagcacatcaagctggaagaggaacggagaagcgaggacgcccagagcaaggccgccctgaccgactggctgcgggctaaggccagcttcgtgatcgagggcctgaaggaggccgacaaggacgagttctgcagatgcgagctgaagctgcagaagtggtacggggacctgcggggaaagcccttcgccatcgaagccgagaacagcatcctggacatcagcggcttcagcaagcagtacaactgtgccttcatctggcagaaggacggcgtgaagaagctgaacctgtacctgatcatcaactacttcaagggcggcaagctgcggttcaagaagatcaaacctgaagccttcgaagccaacagattctacaccgtgatcaacaaaaagagcggcgagatcgtgcccatggaggtgaacttcaacttcgacgaccccaacctgatcatcctgcctctggcctttggcaagagacagggcagagaattcatctggaacgacctgctgtccctggaaaccggcagcctgaagctggccaacggaagagtgatcgagaagacactgtacaacagaagaacccggcaggatgagcctgccctgttcgtggccctgaccttcgagcggcgggaggtcctggactcctccaatatcaaaccaatgaacctgatcggcgtggcaagaggcgaaaacatccccgccgtgatcgccctgaccgaccccgagggctgcccactgagccggtttaaggatagcctgggaaacccaacccacatcctgagaatcggcgagagctataaggagaagcagcggaccatccaggccaagaaggaggtggagcagcggagagccggcggctacagccggaagtacgccagcaaagccaagaatctggcagacgatatggtgagaaacaccgctagagatctgctgtactacgccgtgacccaggatgccatgctgatcttcgccaacctgagccggggcttcggccggcagggcaagcggaccttcatggccgagagacagtacacacggatggaggactggctgaccgccaagctggcctacgagggcctgagcaagacctacctgtccaagacactggcccagtacacctccaagacatgcagcaactgtgggtttaccatcaccagcgccgactacgacagggtgctggagaagctgaagaagacagcaacaggctggatgaccacaattaacggcaaggagctgaaggtggagggccagattacctactacaacagatacaagagacagaacgtagtcaaggacctgtccgtcgagctggatagactgagcgaagaatctgtgaacaacgacatctcctcctggacaaagggcagaagcggagaagctctgagcctcctgaagaaaagattctcccatagacccgtgcaggagaagttcgtgtgcctgaactgcggcttcgagacacacgcagccgagcaagccgccctgaacatcgccagatcctggctgttcctgcggagccaggagtacaagaaataccagacaaacaagacaaccggcaacaccgataagagagccttcgtcgagacctggcagtccttttaccggaagaagcttaaggaggtgtggaaacctgccgtgcggtctggcggatctggcggaggctcccaccaggagagcctgaccttcaaggacgtggccgtgaacttcacccaggaggagtggcaccacgtggacgccgcccagaggaggctgtacaaggacgtgatgctggagaactacagccacctggtgagcctgggctaccaggtgagcaagcccgaggtgatcttcaagctggagcagggcgaggagccctggatcgccgagggcgagatccagaggcccgtgtgccccgactggaagaccaggggcggcccaagcagcggcgcccctcctcccagcggcggcagcccagccggctccccaacctctaccgaggagggcacctctgagtccgccacccccgagagcggccctggcacctccaccgagcccagcgagggcagcgcacccggcagccctgccggcagccccacctccacagaggagggaaccagcaccgagcccagcgaaggcagcgccccaggcaccagcaccgagcctagtgagcaggagattaaacggatcaacaagatcagaagaagacttgtgaaagacagcaacaccaagaaggccggcaagacaggccccatgaaaaccctgctggttagagtgatgacacccgatctgagagagcggctggaaaacctgagaaagaagcctgaaaatatcccccagcccatcagcaatacatctagagccaacctgaataagctgctgaccgattacaccgaaatgaagaaggcgatcctgcatgtgtactgggaagagttccagaaggaccctgtgggcctgatgagccgggtggcccagcctgccagcaagaagatcgatcagaacaagctgaaacctgagatggacgagaagggcaacctgaccaccgccggctttgcctgctctcagtgtggccagcccctgttcgtgtacaagctggagcaggtgtctgagaagggcaaggcttacaccaactacttcggacggtgcaatgtggccgagcacgaaaagctgatcctgctggcccagctgaagcccgagaaggatagcgacgaagccgtgacatatagcctgggaaagtttgggcagagggccctggatttctacagcattcatgtgaccaaggagtccacccaccccgtgaagcccctggcccagatcgccggaaacagatacgcctccggacctgtgggaaaggccctgagcgacgcatgtatgggcacaatcgcctccttcctgtctaagtaccaggacatcatcatcgaacaccagaaggtggtgaagggcaaccagaagagactggagagcctgcgggagctggccggcaaggaaaacctggaataccctagcgtgaccctgccacctcagcctcacaccaaggagggcgttgatgcctacaacgaagtgatcgcccgggtgcgaatgtgggtgaacctgaacctgtggcagaagctgaagctaagcagagatgatgccaagcctctgctgagactgaagggattcccttcctttcctctggtcgagagacaggccaacgaagtggactggtgggacatggtgtgtaacgtgaagaagctgatcaacgagaaaaaggaggatggcaaggtgttttggcagaatctggctggctacaagagacaggaagccctgagaccatacctgagcagcgaggaagatcggaagaagggaaagaaattcgctcggtaccagctgggcgacctgctgctgcacctggaaaagaagcacggcgaggactggggaaaggtgtacgacgaggcctgggagcggattgacaagaaagtggaaggcctgagcaagcacatcaagctggaagaggaacggagaagcgaggacgcccagagcaaggccgccctgaccgactggctgcgggctaaggccagcttcgtgatcgagggcctgaaggaggccgacaaggacgagttctgcagatgcgagctgaagctgcagaagtggtacggggacctgcggggaaagcccttcgccatcgaagccgagaacagcatcctggacatcagcggcttcagcaagcagtacaactgtgccttcatctggcagaaggacggcgtgaagaagctgaacctgtacctgatcatcaactacttcaagggcggcaagctgcggttcaagaagatcaaacctgaagccttcgaagccaacagattctacaccgtgatcaacaaaaagagcggcgagatcgtgcccatggaggtgaacttcaacttcgacgaccccaacctgatcatcctgcctctggcctttggcaagagacagggcagagaattcatctggaacgacctgctgtccctggaaaccggcagcctgaagctggccaacggaagagtgatcgagaagacactgtacaacagaagaacccggcaggatgagcctgccctgttcgtggccctgaccttcgagcggcgggaggtcctggactcctccaatatcaaaccaatgaacctgatcggcgtggcaagaggcgaaaacatccccgccgtgatcgccctgaccgaccccgagggctgcccactgagccggtttaaggatagcctgggaaacccaacccacatcctgagaatcggcgagagctataaggagaagcagcggaccatccaggccaagaaggaggtggagcagcggagagccggcggctacagccggaagtacgccagcaaagccaagaatctggcagacgatatggtgagaaacaccgctagagatctgctgtactacgccgtgacccaggatgccatgctgatcttcgccaacctgagccggggcttcggccggcagggcaagcggaccttcatggccgagagacagtacacacggatggaggactggctgaccgccaagctggcctacgagggcctgagcaagacctacctgtccaagacactggcccagtacacctccaagacatgcagcaactgtgggtttaccatcaccagcgccgactacgacagggtgctggagaagctgaagaagacagcaacaggctggatgaccacaattaacggcaaggagctgaaggtggagggccagattacctactacaacagatacaagagacagaacgtagtcaaggacctgtccgtcgagctggatagactgagcgaagaatctgtgaacaacgacatctcctcctggacaaagggcagaagcggagaagctctgagcctcctgaagaaaagattctcccatagacccgtgcaggagaagttcgtgtgcctgaactgcggcttcgagacacacgcagccgagcaagccgccctgaacatcgccagatcctggctgttcctgcggagccaggagtacaagaaataccagacaaacaagacaaccggcaacaccgataagagagccttcgtcgagacctggcagtccttttaccggaagaagcttaaggaggtgtggaaacctgccgtgcggtctggcggatctggcggaggctcctcaccaggagagcctgaccttcaaggacgtggccgtgaacttcacccaggaggagtggcaccacgtggacgccgcccagaggaggctgtacaaggacgtgatgctggagaactacagccacctggtgagcctgggctaccaggtgagcaagcccgaggtgatcttcaagctggagcagggcgaggagccctggatcgccgagggcgagatccagaggcccgtgtgccccgactggaagaccaggggatctggctccggcagcggccccaagaaaaagagaaaagtctaagctgccttctgcggggcttgccttctggccatgcccttcttctctcccttgcacctgtacctcttggtctttgaataaagcctgagtaggaaggctagcaaaaaaaaaaaaaaaaaaaaaaaaaaaaaaaaaaaaaaaaaaaaaaaaaaaaaaaaaaaaaaaaaaaaaaaaaaaaaaaa

SEQ ID NO: 15985 - RNA, 9485 nt, synthetic construct
  source 1..9485: mol_type = other RNA
aggaaataagagagaaaagaagagtaagaagaaatataagagccaccatggcccctaagaagaagcgtaaagtgagccggatggaacgcctcgtctacgaggtgcggcagaagtgcagaaacatcgaggacatctgcatctcctgcggatctctgaacgtgaccctggagcacccactgttcatcggcggcatgtgccagaactgtaaaaactgttttctggagtgtgcctatcaatacgacgatgacggctaccagagctactgcaccatctgttgcggcggaagagaggtgctgatgtgtggaaataacaactgctgccggtgcttctgcgtggaatgcgtggacctgctggtgggccccggcgccgcccaggccgctattaaggaagatccttggaactgctacatgtgcggccacaagggcacatacggcctgctgagacggagagaggactggcctagcagactgcagatgttcttcgccaataaccacgaccaggagttcgacccccctaaggtgtaccctcccgtccccgccgagaagagaaagcccatccgggtcctgagcctgttcgatggcatcgccaccggtctgctggtgctgaaggacctgggcatccaggtggataggtacattgcctccgaggtgtgcgaggactccatcaccgtgggaatggtgcgtcatcagggcaagatcatgtacgtgggcgacgtgcggagcgtgacacagaagcatatccaggagtggggccctttcgacctggtgatcggcggcagcccttgcaatgacctgagcatcgtgaacccagcccggaagggcctgtacgagggaaccggcagactgttcttcgagttttacagactgctgcacgacgcccggcctaaggaaggcgacgaccggcccttcttttggctgttcgagaatgtggtggccatgggagtcagcgacaagcgggatattagccggttcctggagagcaaccccgtgatgatcgatgccaaggaagtgagcgccgcccaccgggccagatacttctggggcaatctgcctggcatgaacagacccctggccagcaccgtgaacgacaagctggagctgcaggagtgcctggagcacggccggatcgccaagttcagcaaggtgagaaccatcaccacccgaagcaacagcatcaaacaaggcaaggaccagcactttcctgtgttcatgaacgagaaggaggacatcctgtggtgtaccgagatggagagagtgttcgggttcccagtccactacacagatgtcagcaacatgtctagactggccagacagagactgctgggaagaagctggtccgtccctgtgatcagacacctgttcgcccctctgaaggagtacttcgcctgcgtgagcagcggcaacagcaacgccaacagccggggccccagcttctctagcggcctggtgccactgtccctgagagggagccacatgggccccatggagatctacaaaaccgtgagcgcctggaagcggcagcctgtgcgcgtgctgagcctgtttcggaatatcgataaagtcctgaaaagcctgggattcctggagagcggctctggctccggcggtggcaccctgaagtacgtggaggatgtgacaaacgtggtcagacgggatgtggagaagtggggccccttcgatctggtgtacggcagcacccaacccctgggcagctcttgtgaccggtgccctggctggtacatgtttcagttccaccggatcctgcagtacgccctgccgagacaggagtcccagcggccattcttttggattttcatggacaacttgctgctgaccgaggatgaccaggaaactaccactcggttcctgcagaccgaagccgtgaccctgcaggacgtgagaggccgggactaccagaacgccatgcgggtgtggtccaacatccctggactgaaaagcaagcacgcacctctgacccctaaagaagaggagtacctgcaggcccaggtgcggagcagaagcaagctggacgcccctaaggtggatctgctggtgaagaattgcctcctgcccctgagagagtacttcaagtatttcagccagaatagtctgcccctgggaggcagcggcggcggcgccctggtgacatttgaggacgtcgccgtgcggttcacccaggaggaatgggctctgctggatccttctcagaaaatcctgtaccgggacgtgatgagagagacataccggaatctgacctccgtgggcatcaactgggaatgttgggaccttgaagcctgcttcagaagcctgggaagaaacctgagagtgcaggtggtgaagagaaagtgcgagctgaccaacagcggcccctgcgccgagggcggcccaagcagcggcgcccctcctcccagcggcggcagcccagccggctccccaacctctaccgaggagggcacctctgagtccgccacccccgagagcggccctggcacctccaccgagcccagcgagggcagcgcacccggcagccctgccggcagccccacctccacagaggagggaaccagcaccgagcccagcgaaggcagcgccccaggcaccagcaccgagcctagtgagcaggagattaaacggatcaacaagatcagaagaagacttgtgaaagacagcaacaccaagaaggccggcaagacaggccccatgaaaaccctgctggttagagtgatgacacccgatctgagagagcggctggaaaacctgagaaagaagcctgaaaatatcccccagcccatcagcaatacatctagagccaacctgaataagctgctgaccgattacaccgaaatgaagaaggcgatcctgcatgtgtactgggaagagttccagaaggaccctgtgggcctgatgagccgggtggcccagcctgccagcaagaagatcgatcagaacaagctgaaacctgagatggacgagaagggcaacctgaccaccgccggctttgcctgctctcagtgtggccagcccctgttcgtgtacaagctggagcaggtgtctgagaagggcaaggcttacaccaactacttcggacggtgcaatgtggccgagcacgaaaagctgatcctgctggcccagctgaagcccgagaaggatagcgacgaagccgtgacatatagcctgggaaagtttgggcagagggccctggatttctacagcattcatgtgaccaaggagtccacccaccccgtgaagcccctggcccagatcgccggaaacagatacgcctccggacctgtgggaaaggccctgagcgacgcatgtatgggcacaatcgcctccttcctgtctaagtaccaggacatcatcatcgaacaccagaaggtggtgaagggcaaccagaagagactggagagcctgcgggagctggccggcaaggaaaacctggaataccctagcgtgaccctgccacctcagcctcacaccaaggagggcgttgatgcctacaacgaagtgatcgcccgggtgcgaatgtgggtgaacctgaacctgtggcagaagctgaagctaagcagagatgatgccaagcctctgctgagactgaagggattcccttcctttcctctggtcgagagacaggccaacgaagtggactggtgggacatggtgtgtaacgtgaagaagctgatcaacgagaaaaaggaggatggcaaggtgttttggcagaatctggctggctacaagagacaggaagccctgagaccatacctgagcagcgaggaagatcggaagaagggaaagaaattcgctcggtaccagctgggcgacctgctgctgcacctggaaaagaagcacggcgaggactggggaaaggtgtacgacgaggcctgggagcggattgacaagaaagtggaaggcctgagcaagcacatcaagctggaagaggaacggagaagcgaggacgcccagagcaaggccgccctgaccgactggctgcgggctaaggccagcttcgtgatcgagggcctgaaggaggccgacaaggacgagttctgcagatgcgagctgaagctgcagaagtggtacggggacctgcggggaaagcccttcgccatcgaagccgagaacagcatcctggacatcagcggcttcagcaagcagtacaactgtgccttcatctggcagaaggacggcgtgaagaagctgaacctgtacctgatcatcaactacttcaagggcggcaagctgcggttcaagaagatcaaacctgaagccttcgaagccaacagattctacaccgtgatcaacaaaaagagcggcgagatcgtgcccatggaggtgaacttcaacttcgacgaccccaacctgatcatcctgcctctggcctttggcaagagacagggcagagaattcatctggaacgacctgctgtccctggaaaccggcagcctgaagctggccaacggaagagtgatcgagaagacactgtacaacagaagaacccggcaggatgagcctgccctgttcgtggccctgaccttcgagcggcgggaggtcctggactcctccaatatcaaaccaatgaacctgatcggcgtggcaagaggcgaaaacatccccgccgtgatcgccctgaccgaccccgagggctgcccactgagccggtttaaggatagcctgggaaacccaacccacatcctgagaatcggcgagagctataaggagaagcagcggaccatccaggccaagaaggaggtggagcagcggagagccggcggctacagccggaagtacgccagcaaagccaagaatctggcagacgatatggtgagaaacaccgctagagatctgctgtactacgccgtgacccaggatgccatgctgatcttcgccaacctgagccggggcttcggccggcagggcaagcggaccttcatggccgagagacagtacacacggatggaggactggctgaccgccaagctggcctacgagggcctgagcaagacctacctgtccaagacactggcccagtacacctccaagacatgcagcaactgtgggtttaccatcaccagcgccgactacgacagggtgctggagaagctgaagaagacagcaacaggctggatgaccacaattaacggcaaggagctgaaggtggagggccagattacctactacaacagatacaagagacagaacgtagtcaaggacctgtccgtcgagctggatagactgagcgaagaatctgtgaacaacgacatctcctcctggacaaagggcagaagcggagaagctctgagcctcctgaagaaaagattctcccatagacccgtgcaggagaagttcgtgtgcctgaactgcggcttcgagacacacgcagccgagcaagccgccctgaacatcgccagatcctggctgttcctgcggagccaggagtacaagaaataccagacaaacaagacaaccggcaacaccgataagagagccttcgtcgagacctggcagtccttttaccggaagaagcttaaggaggtgtggaaacctgccgtgcggtctggcggatctggcggaggctccaagcccggcgccgtgagcttcgccgacgtggccgtgtacttcagcagggaggagtggggctgcctgaggcccgcccagagggccctgtacagggacgtgatgagggagacctacggccacctgggcgccctgggcgtgggcggcagcaagcccgccctgatcagctgggtggaggagaaggccgagctgtgggaccccgccgcccaggaccccgaggtggccaagtgccccaccgaggccgacggcggcccaagcagcggcgcccctcctcccagcggcggcagcccagccggctccccaacctctaccgaggagggcacctctgagtccgccacccccgagagcggccctggcacctccaccgagcccagcgagggcagcgcacccggcagccctgccggcagccccacctccacagaggagggaaccagcaccgagcccagcgaaggcagcgccccaggcaccagcaccgagcctagtgagcaggagattaaacggatcaacaagatcagaagaagacttgtgaaagacagcaacaccaagaaggccggcaagacaggccccatgaaaaccctgctggttagagtgatgacacccgatctgagagagcggctggaaaacctgagaaagaagcctgaaaatatcccccagcccatcagcaatacatctagagccaacctgaataagctgctgaccgattacaccgaaatgaagaaggcgatcctgcatgtgtactgggaagagttccagaaggaccctgtgggcctgatgagccgggtggcccagcctgccagcaagaagatcgatcagaacaagctgaaacctgagatggacgagaagggcaacctgaccaccgccggctttgcctgctctcagtgtggccagcccctgttcgtgtacaagctggagcaggtgtctgagaagggcaaggcttacaccaactacttcggacggtgcaatgtggccgagcacgaaaagctgatcctgctggcccagctgaagcccgagaaggatagcgacgaagccgtgacatatagcctgggaaagtttgggcagagggccctggatttctacagcattcatgtgaccaaggagtccacccaccccgtgaagcccctggcccagatcgccggaaacagatacgcctccggacctgtgggaaaggccctgagcgacgcatgtatgggcacaatcgcctccttcctgtctaagtaccaggacatcatcatcgaacaccagaaggtggtgaagggcaaccagaagagactggagagcctgcgggagctggccggcaaggaaaacctggaataccctagcgtgaccctgccacctcagcctcacaccaaggagggcgttgatgcctacaacgaagtgatcgcccgggtgcgaatgtgggtgaacctgaacctgtggcagaagctgaagctaagcagagatgatgccaagcctctgctgagactgaagggattcccttcctttcctctggtcgagagacaggccaacgaagtggactggtgggacatggtgtgtaacgtgaagaagctgatcaacgagaaaaaggaggatggcaaggtgttttggcagaatctggctggctacaagagacaggaagccctgagaccatacctgagcagcgaggaagatcggaagaagggaaagaaattcgctcggtaccagctgggcgacctgctgctgcacctggaaaagaagcacggcgaggactggggaaaggtgtacgacgaggcctgggagcggattgacaagaaagtggaaggcctgagcaagcacatcaagctggaagaggaacggagaagcgaggacgcccagagcaaggccgccctgaccgactggctgcgggctaaggccagcttcgtgatcgagggcctgaaggaggccgacaaggacgagttctgcagatgcgagctgaagctgcagaagtggtacggggacctgcggggaaagcccttcgccatcgaagccgagaacagcatcctggacatcagcggcttcagcaagcagtacaactgtgccttcatctggcagaaggacggcgtgaagaagctgaacctgtacctgatcatcaactacttcaagggcggcaagctgcggttcaagaagatcaaacctgaagccttcgaagccaacagattctacaccgtgatcaacaaaaagagcggcgagatcgtgcccatggaggtgaacttcaacttcgacgaccccaacctgatcatcctgcctctggcctttggcaagagacagggcagagaattcatctggaacgacctgctgtccctggaaaccggcagcctgaagctggccaacggaagagtgatcgagaagacactgtacaacagaagaacccggcaggatgagcctgccctgttcgtggccctgaccttcgagcggcgggaggtcctggactcctccaatatcaaaccaatgaacctgatcggcgtggcaagaggcgaaaacatccccgccgtgatcgccctgaccgaccccgagggctgcccactgagccggtttaaggatagcctgggaaacccaacccacatcctgagaatcggcgagagctataaggagaagcagcggaccatccaggccaagaaggaggtggagcagcggagagccggcggctacagccggaagtacgccagcaaagccaagaatctggcagacgatatggtgagaaacaccgctagagatctgctgtactacgccgtgacccaggatgccatgctgatcttcgccaacctgagccggggcttcggccggcagggcaagcggaccttcatggccgagagacagtacacacggatggaggactggctgaccgccaagctggcctacgagggcctgagcaagacctacctgtccaagacactggcccagtacacctccaagacatgcagcaactgtgggtttaccatcaccagcgccgactacgacagggtgctggagaagctgaagaagacagcaacaggctggatgaccacaattaacggcaaggagctgaaggtggagggccagattacctactacaacagatacaagagacagaacgtagtcaaggacctgtccgtcgagctggatagactgagcgaagaatctgtgaacaacgacatctcctcctggacaaagggcagaagcggagaagctctgagcctcctgaagaaaagattctcccatagacccgtgcaggagaagttcgtgtgcctgaactgcggcttcgagacacacgcagccgagcaagccgccctgaacatcgccagatcctggctgttcctgcggagccaggagtacaagaaataccagacaaacaagacaaccggcaacaccgataagagagccttcgtcgagacctggcagtccttttaccggaagaagcttaaggaggtgtggaaacctgccgtgcggtctggcggatctggcggaggctcctaagcccggcgccgtgagcttcgccgacgtggccgtgtacttcagcagggaggagtggggctgcctgaggcccgcccagagggccctgtacagggacgtgatgagggagacctacggccacctgggcgccctgggcgtgggcggcagcaagcccgccctgatcagctgggtggaggagaaggccgagctgtgggaccccgccgcccaggaccccgaggtggccaagtgccccaccgaggccgacggatctggctccggcagcggccccaagaaaaagagaaaagtctaagctgccttctgcggggcttgccttctggccatgcccttcttctctcccttgcacctgtacctcttggtctttgaataaagcctgagtaggaaggctagcaaaaaaaaaaaaaaaaaaaaaaaaaaaaaaaaaaaaaaaaaaaaaaaaaaaaaaaaaaaaaaaaaaaaaaaaaaaaaaaa

SEQ ID NO: 15986 - RNA, 9485 nt, synthetic construct
  source 1..9485: mol_type = other RNA
aggaaataagagagaaaagaagagtaagaagaaatataagagccaccatggcccctaagaagaagcgtaaagtgagccggatggaacgcctcgtctacgaggtgcggcagaagtgcagaaacatcgaggacatctgcatctcctgcggatctctgaacgtgaccctggagcacccactgttcatcggcggcatgtgccagaactgtaaaaactgttttctggagtgtgcctatcaatacgacgatgacggctaccagagctactgcaccatctgttgcggcggaagagaggtgctgatgtgtggaaataacaactgctgccggtgcttctgcgtggaatgcgtggacctgctggtgggccccggcgccgcccaggccgctattaaggaagatccttggaactgctacatgtgcggccacaagggcacatacggcctgctgagacggagagaggactggcctagcagactgcagatgttcttcgccaataaccacgaccaggagttcgacccccctaaggtgtaccctcccgtccccgccgagaagagaaagcccatccgggtcctgagcctgttcgatggcatcgccaccggtctgctggtgctgaaggacctgggcatccaggtggataggtacattgcctccgaggtgtgcgaggactccatcaccgtgggaatggtgcgtcatcagggcaagatcatgtacgtgggcgacgtgcggagcgtgacacagaagcatatccaggagtggggccctttcgacctggtgatcggcggcagcccttgcaatgacctgagcatcgtgaacccagcccggaagggcctgtacgagggaaccggcagactgttcttcgagttttacagactgctgcacgacgcccggcctaaggaaggcgacgaccggcccttcttttggctgttcgagaatgtggtggccatgggagtcagcgacaagcgggatattagccggttcctggagagcaaccccgtgatgatcgatgccaaggaagtgagcgccgcccaccgggccagatacttctggggcaatctgcctggcatgaacagacccctggccagcaccgtgaacgacaagctggagctgcaggagtgcctggagcacggccggatcgccaagttcagcaaggtgagaaccatcaccacccgaagcaacagcatcaaacaaggcaaggaccagcactttcctgtgttcatgaacgagaaggaggacatcctgtggtgtaccgagatggagagagtgttcgggttcccagtccactacacagatgtcagcaacatgtctagactggccagacagagactgctgggaagaagctggtccgtccctgtgatcagacacctgttcgcccctctgaaggagtacttcgcctgcgtgagcagcggcaacagcaacgccaacagccggggccccagcttctctagcggcctggtgccactgtccctgagagggagccacatgggccccatggagatctacaaaaccgtgagcgcctggaagcggcagcctgtgcgcgtgctgagcctgtttcggaatatcgataaagtcctgaaaagcctgggattcctggagagcggctctggctccggcggtggcaccctgaagtacgtggaggatgtgacaaacgtggtcagacgggatgtggagaagtggggccccttcgatctggtgtacggcagcacccaacccctgggcagctcttgtgaccggtgccctggctggtacatgtttcagttccaccggatcctgcagtacgccctgccgagacaggagtcccagcggccattcttttggattttcatggacaacttgctgctgaccgaggatgaccaggaaactaccactcggttcctgcagaccgaagccgtgaccctgcaggacgtgagaggccgggactaccagaacgccatgcgggtgtggtccaacatccctggactgaaaagcaagcacgcacctctgacccctaaagaagaggagtacctgcaggcccaggtgcggagcagaagcaagctggacgcccctaaggtggatctgctggtgaagaattgcctcctgcccctgagagagtacttcaagtatttcagccagaatagtctgcccctgggaggcagcggcggcggcgccctggtgacatttgaggacgtcgccgtgcggttcacccaggaggaatgggctctgctggatccttctcagaaaatcctgtaccgggacgtgatgagagagacataccggaatctgacctccgtgggcatcaactgggaatgttgggaccttgaagcctgcttcagaagcctgggaagaaacctgagagtgcaggtggtgaagagaaagtgcgagctgaccaacagcggcccctgcgccgagggcggcccaagcagcggcgcccctcctcccagcggcggcagcccagccggctccccaacctctaccgaggagggcacctctgagtccgccacccccgagagcggccctggcacctccaccgagcccagcgagggcagcgcacccggcagccctgccggcagccccacctccacagaggagggaaccagcaccgagcccagcgaaggcagcgccccaggcaccagcaccgagcctagtgagcaggagattaaacggatcaacaagatcagaagaagacttgtgaaagacagcaacaccaagaaggccggcaagacaggccccatgaaaaccctgctggttagagtgatgacacccgatctgagagagcggctggaaaacctgagaaagaagcctgaaaatatcccccagcccatcagcaatacatctagagccaacctgaataagctgctgaccgattacaccgaaatgaagaaggcgatcctgcatgtgtactgggaagagttccagaaggaccctgtgggcctgatgagccgggtggcccagcctgccagcaagaagatcgatcagaacaagctgaaacctgagatggacgagaagggcaacctgaccaccgccggctttgcctgctctcagtgtggccagcccctgttcgtgtacaagctggagcaggtgtctgagaagggcaaggcttacaccaactacttcggacggtgcaatgtggccgagcacgaaaagctgatcctgctggcccagctgaagcccgagaaggatagcgacgaagccgtgacatatagcctgggaaagtttgggcagagggccctggatttctacagcattcatgtgaccaaggagtccacccaccccgtgaagcccctggcccagatcgccggaaacagatacgcctccggacctgtgggaaaggccctgagcgacgcatgtatgggcacaatcgcctccttcctgtctaagtaccaggacatcatcatcgaacaccagaaggtggtgaagggcaaccagaagagactggagagcctgcgggagctggccggcaaggaaaacctggaataccctagcgtgaccctgccacctcagcctcacaccaaggagggcgttgatgcctacaacgaagtgatcgcccgggtgcgaatgtgggtgaacctgaacctgtggcagaagctgaagctaagcagagatgatgccaagcctctgctgagactgaagggattcccttcctttcctctggtcgagagacaggccaacgaagtggactggtgggacatggtgtgtaacgtgaagaagctgatcaacgagaaaaaggaggatggcaaggtgttttggcagaatctggctggctacaagagacaggaagccctgagaccatacctgagcagcgaggaagatcggaagaagggaaagaaattcgctcggtaccagctgggcgacctgctgctgcacctggaaaagaagcacggcgaggactggggaaaggtgtacgacgaggcctgggagcggattgacaagaaagtggaaggcctgagcaagcacatcaagctggaagaggaacggagaagcgaggacgcccagagcaaggccgccctgaccgactggctgcgggctaaggccagcttcgtgatcgagggcctgaaggaggccgacaaggacgagttctgcagatgcgagctgaagctgcagaagtggtacggggacctgcggggaaagcccttcgccatcgaagccgagaacagcatcctggacatcagcggcttcagcaagcagtacaactgtgccttcatctggcagaaggacggcgtgaagaagctgaacctgtacctgatcatcaactacttcaagggcggcaagctgcggttcaagaagatcaaacctgaagccttcgaagccaacagattctacaccgtgatcaacaaaaagagcggcgagatcgtgcccatggaggtgaacttcaacttcgacgaccccaacctgatcatcctgcctctggcctttggcaagagacagggcagagaattcatctggaacgacctgctgtccctggaaaccggcagcctgaagctggccaacggaagagtgatcgagaagacactgtacaacagaagaacccggcaggatgagcctgccctgttcgtggccctgaccttcgagcggcgggaggtcctggactcctccaatatcaaaccaatgaacctgatcggcgtggcaagaggcgaaaacatccccgccgtgatcgccctgaccgaccccgagggctgcccactgagccggtttaaggatagcctgggaaacccaacccacatcctgagaatcggcgagagctataaggagaagcagcggaccatccaggccaagaaggaggtggagcagcggagagccggcggctacagccggaagtacgccagcaaagccaagaatctggcagacgatatggtgagaaacaccgctagagatctgctgtactacgccgtgacccaggatgccatgctgatcttcgccaacctgagccggggcttcggccggcagggcaagcggaccttcatggccgagagacagtacacacggatggaggactggctgaccgccaagctggcctacgagggcctgagcaagacctacctgtccaagacactggcccagtacacctccaagacatgcagcaactgtgggtttaccatcaccagcgccgactacgacagggtgctggagaagctgaagaagacagcaacaggctggatgaccacaattaacggcaaggagctgaaggtggagggccagattacctactacaacagatacaagagacagaacgtagtcaaggacctgtccgtcgagctggatagactgagcgaagaatctgtgaacaacgacatctcctcctggacaaagggcagaagcggagaagctctgagcctcctgaagaaaagattctcccatagacccgtgcaggagaagttcgtgtgcctgaactgcggcttcgagacacacgcagccgagcaagccgccctgaacatcgccagatcctggctgttcctgcggagccaggagtacaagaaataccagacaaacaagacaaccggcaacaccgataagagagccttcgtcgagacctggcagtccttttaccggaagaagcttaaggaggtgtggaaacctgccgtgcggtctggcggatctggcggaggctccgcccacatgagcctgagcttcagggacgtggccatcgacctgagccaggaggagtgggagtgcctggaccccgtgcagagggccctgtacagggacgtgatgctggagaactacagcaacctggtgagcctgggctgcagcacccccaagcccgacatgatcaccctgctggagcaggagaaggagccctggatgatcatgagggagggcaccggcagctggttcaccggcctggagagcaagggcggcccaagcagcggcgcccctcctcccagcggcggcagcccagccggctccccaacctctaccgaggagggcacctctgagtccgccacccccgagagcggccctggcacctccaccgagcccagcgagggcagcgcacccggcagccctgccggcagccccacctccacagaggagggaaccagcaccgagcccagcgaaggcagcgccccaggcaccagcaccgagcctagtgagcaggagattaaacggatcaacaagatcagaagaagacttgtgaaagacagcaacaccaagaaggccggcaagacaggccccatgaaaaccctgctggttagagtgatgacacccgatctgagagagcggctggaaaacctgagaaagaagcctgaaaatatcccccagcccatcagcaatacatctagagccaacctgaataagctgctgaccgattacaccgaaatgaagaaggcgatcctgcatgtgtactgggaagagttccagaaggaccctgtgggcctgatgagccgggtggcccagcctgccagcaagaagatcgatcagaacaagctgaaacctgagatggacgagaagggcaacctgaccaccgccggctttgcctgctctcagtgtggccagcccctgttcgtgtacaagctggagcaggtgtctgagaagggcaaggcttacaccaactacttcggacggtgcaatgtggccgagcacgaaaagctgatcctgctggcccagctgaagcccgagaaggatagcgacgaagccgtgacatatagcctgggaaagtttgggcagagggccctggatttctacagcattcatgtgaccaaggagtccacccaccccgtgaagcccctggcccagatcgccggaaacagatacgcctccggacctgtgggaaaggccctgagcgacgcatgtatgggcacaatcgcctccttcctgtctaagtaccaggacatcatcatcgaacaccagaaggtggtgaagggcaaccagaagagactggagagcctgcgggagctggccggcaaggaaaacctggaataccctagcgtgaccctgccacctcagcctcacaccaaggagggcgttgatgcctacaacgaagtgatcgcccgggtgcgaatgtgggtgaacctgaacctgtggcagaagctgaagctaagcagagatgatgccaagcctctgctgagactgaagggattcccttcctttcctctggtcgagagacaggccaacgaagtggactggtgggacatggtgtgtaacgtgaagaagctgatcaacgagaaaaaggaggatggcaaggtgttttggcagaatctggctggctacaagagacaggaagccctgagaccatacctgagcagcgaggaagatcggaagaagggaaagaaattcgctcggtaccagctgggcgacctgctgctgcacctggaaaagaagcacggcgaggactggggaaaggtgtacgacgaggcctgggagcggattgacaagaaagtggaaggcctgagcaagcacatcaagctggaagaggaacggagaagcgaggacgcccagagcaaggccgccctgaccgactggctgcgggctaaggccagcttcgtgatcgagggcctgaaggaggccgacaaggacgagttctgcagatgcgagctgaagctgcagaagtggtacggggacctgcggggaaagcccttcgccatcgaagccgagaacagcatcctggacatcagcggcttcagcaagcagtacaactgtgccttcatctggcagaaggacggcgtgaagaagctgaacctgtacctgatcatcaactacttcaagggcggcaagctgcggttcaagaagatcaaacctgaagccttcgaagccaacagattctacaccgtgatcaacaaaaagagcggcgagatcgtgcccatggaggtgaacttcaacttcgacgaccccaacctgatcatcctgcctctggcctttggcaagagacagggcagagaattcatctggaacgacctgctgtccctggaaaccggcagcctgaagctggccaacggaagagtgatcgagaagacactgtacaacagaagaacccggcaggatgagcctgccctgttcgtggccctgaccttcgagcggcgggaggtcctggactcctccaatatcaaaccaatgaacctgatcggcgtggcaagaggcgaaaacatccccgccgtgatcgccctgaccgaccccgagggctgcccactgagccggtttaaggatagcctgggaaacccaacccacatcctgagaatcggcgagagctataaggagaagcagcggaccatccaggccaagaaggaggtggagcagcggagagccggcggctacagccggaagtacgccagcaaagccaagaatctggcagacgatatggtgagaaacaccgctagagatctgctgtactacgccgtgacccaggatgccatgctgatcttcgccaacctgagccggggcttcggccggcagggcaagcggaccttcatggccgagagacagtacacacggatggaggactggctgaccgccaagctggcctacgagggcctgagcaagacctacctgtccaagacactggcccagtacacctccaagacatgcagcaactgtgggtttaccatcaccagcgccgactacgacagggtgctggagaagctgaagaagacagcaacaggctggatgaccacaattaacggcaaggagctgaaggtggagggccagattacctactacaacagatacaagagacagaacgtagtcaaggacctgtccgtcgagctggatagactgagcgaagaatctgtgaacaacgacatctcctcctggacaaagggcagaagcggagaagctctgagcctcctgaagaaaagattctcccatagacccgtgcaggagaagttcgtgtgcctgaactgcggcttcgagacacacgcagccgagcaagccgccctgaacatcgccagatcctggctgttcctgcggagccaggagtacaagaaataccagacaaacaagacaaccggcaacaccgataagagagccttcgtcgagacctggcagtccttttaccggaagaagcttaaggaggtgtggaaacctgccgtgcggtctggcggatctggcggaggctcctgcccacatgagcctgagcttcagggacgtggccatcgacctgagccaggaggagtgggagtgcctggaccccgtgcagagggccctgtacagggacgtgatgctggagaactacagcaacctggtgagcctgggctgcagcacccccaagcccgacatgatcaccctgctggagcaggagaaggagccctggatgatcatgagggagggcaccggcagctggttcaccggcctggagagcaagggatctggctccggcagcggccccaagaaaaagagaaaagtctaagctgccttctgcggggcttgccttctggccatgcccttcttctctcccttgcacctgtacctcttggtctttgaataaagcctgagtaggaaggctagcaaaaaaaaaaaaaaaaaaaaaaaaaaaaaaaaaaaaaaaaaaaaaaaaaaaaaaaaaaaaaaaaaaaaaaaaaaaaaaaa

SEQ ID NO: 15987 - RNA, 9485 nt, synthetic construct
  source 1..9485: mol_type = other RNA
aggaaataagagagaaaagaagagtaagaagaaatataagagccaccatggcccctaagaagaagcgtaaagtgagccggatggaacgcctcgtctacgaggtgcggcagaagtgcagaaacatcgaggacatctgcatctcctgcggatctctgaacgtgaccctggagcacccactgttcatcggcggcatgtgccagaactgtaaaaactgttttctggagtgtgcctatcaatacgacgatgacggctaccagagctactgcaccatctgttgcggcggaagagaggtgctgatgtgtggaaataacaactgctgccggtgcttctgcgtggaatgcgtggacctgctggtgggccccggcgccgcccaggccgctattaaggaagatccttggaactgctacatgtgcggccacaagggcacatacggcctgctgagacggagagaggactggcctagcagactgcagatgttcttcgccaataaccacgaccaggagttcgacccccctaaggtgtaccctcccgtccccgccgagaagagaaagcccatccgggtcctgagcctgttcgatggcatcgccaccggtctgctggtgctgaaggacctgggcatccaggtggataggtacattgcctccgaggtgtgcgaggactccatcaccgtgggaatggtgcgtcatcagggcaagatcatgtacgtgggcgacgtgcggagcgtgacacagaagcatatccaggagtggggccctttcgacctggtgatcggcggcagcccttgcaatgacctgagcatcgtgaacccagcccggaagggcctgtacgagggaaccggcagactgttcttcgagttttacagactgctgcacgacgcccggcctaaggaaggcgacgaccggcccttcttttggctgttcgagaatgtggtggccatgggagtcagcgacaagcgggatattagccggttcctggagagcaaccccgtgatgatcgatgccaaggaagtgagcgccgcccaccgggccagatacttctggggcaatctgcctggcatgaacagacccctggccagcaccgtgaacgacaagctggagctgcaggagtgcctggagcacggccggatcgccaagttcagcaaggtgagaaccatcaccacccgaagcaacagcatcaaacaaggcaaggaccagcactttcctgtgttcatgaacgagaaggaggacatcctgtggtgtaccgagatggagagagtgttcgggttcccagtccactacacagatgtcagcaacatgtctagactggccagacagagactgctgggaagaagctggtccgtccctgtgatcagacacctgttcgcccctctgaaggagtacttcgcctgcgtgagcagcggcaacagcaacgccaacagccggggccccagcttctctagcggcctggtgccactgtccctgagagggagccacatgggccccatggagatctacaaaaccgtgagcgcctggaagcggcagcctgtgcgcgtgctgagcctgtttcggaatatcgataaagtcctgaaaagcctgggattcctggagagcggctctggctccggcggtggcaccctgaagtacgtggaggatgtgacaaacgtggtcagacgggatgtggagaagtggggccccttcgatctggtgtacggcagcacccaacccctgggcagctcttgtgaccggtgccctggctggtacatgtttcagttccaccggatcctgcagtacgccctgccgagacaggagtcccagcggccattcttttggattttcatggacaacttgctgctgaccgaggatgaccaggaaactaccactcggttcctgcagaccgaagccgtgaccctgcaggacgtgagaggccgggactaccagaacgccatgcgggtgtggtccaacatccctggactgaaaagcaagcacgcacctctgacccctaaagaagaggagtacctgcaggcccaggtgcggagcagaagcaagctggacgcccctaaggtggatctgctggtgaagaattgcctcctgcccctgagagagtacttcaagtatttcagccagaatagtctgcccctgggaggcagcggcggcggcgccctggtgacatttgaggacgtcgccgtgcggttcacccaggaggaatgggctctgctggatccttctcagaaaatcctgtaccgggacgtgatgagagagacataccggaatctgacctccgtgggcatcaactgggaatgttgggaccttgaagcctgcttcagaagcctgggaagaaacctgagagtgcaggtggtgaagagaaagtgcgagctgaccaacagcggcccctgcgccgagggcggcccaagcagcggcgcccctcctcccagcggcggcagcccagccggctccccaacctctaccgaggagggcacctctgagtccgccacccccgagagcggccctggcacctccaccgagcccagcgagggcagcgcacccggcagccctgccggcagccccacctccacagaggagggaaccagcaccgagcccagcgaaggcagcgccccaggcaccagcaccgagcctagtgagcaggagattaaacggatcaacaagatcagaagaagacttgtgaaagacagcaacaccaagaaggccggcaagacaggccccatgaaaaccctgctggttagagtgatgacacccgatctgagagagcggctggaaaacctgagaaagaagcctgaaaatatcccccagcccatcagcaatacatctagagccaacctgaataagctgctgaccgattacaccgaaatgaagaaggcgatcctgcatgtgtactgggaagagttccagaaggaccctgtgggcctgatgagccgggtggcccagcctgccagcaagaagatcgatcagaacaagctgaaacctgagatggacgagaagggcaacctgaccaccgccggctttgcctgctctcagtgtggccagcccctgttcgtgtacaagctggagcaggtgtctgagaagggcaaggcttacaccaactacttcggacggtgcaatgtggccgagcacgaaaagctgatcctgctggcccagctgaagcccgagaaggatagcgacgaagccgtgacatatagcctgggaaagtttgggcagagggccctggatttctacagcattcatgtgaccaaggagtccacccaccccgtgaagcccctggcccagatcgccggaaacagatacgcctccggacctgtgggaaaggccctgagcgacgcatgtatgggcacaatcgcctccttcctgtctaagtaccaggacatcatcatcgaacaccagaaggtggtgaagggcaaccagaagagactggagagcctgcgggagctggccggcaaggaaaacctggaataccctagcgtgaccctgccacctcagcctcacaccaaggagggcgttgatgcctacaacgaagtgatcgcccgggtgcgaatgtgggtgaacctgaacctgtggcagaagctgaagctaagcagagatgatgccaagcctctgctgagactgaagggattcccttcctttcctctggtcgagagacaggccaacgaagtggactggtgggacatggtgtgtaacgtgaagaagctgatcaacgagaaaaaggaggatggcaaggtgttttggcagaatctggctggctacaagagacaggaagccctgagaccatacctgagcagcgaggaagatcggaagaagggaaagaaattcgctcggtaccagctgggcgacctgctgctgcacctggaaaagaagcacggcgaggactggggaaaggtgtacgacgaggcctgggagcggattgacaagaaagtggaaggcctgagcaagcacatcaagctggaagaggaacggagaagcgaggacgcccagagcaaggccgccctgaccgactggctgcgggctaaggccagcttcgtgatcgagggcctgaaggaggccgacaaggacgagttctgcagatgcgagctgaagctgcagaagtggtacggggacctgcggggaaagcccttcgccatcgaagccgagaacagcatcctggacatcagcggcttcagcaagcagtacaactgtgccttcatctggcagaaggacggcgtgaagaagctgaacctgtacctgatcatcaactacttcaagggcggcaagctgcggttcaagaagatcaaacctgaagccttcgaagccaacagattctacaccgtgatcaacaaaaagagcggcgagatcgtgcccatggaggtgaacttcaacttcgacgaccccaacctgatcatcctgcctctggcctttggcaagagacagggcagagaattcatctggaacgacctgctgtccctggaaaccggcagcctgaagctggccaacggaagagtgatcgagaagacactgtacaacagaagaacccggcaggatgagcctgccctgttcgtggccctgaccttcgagcggcgggaggtcctggactcctccaatatcaaaccaatgaacctgatcggcgtggcaagaggcgaaaacatccccgccgtgatcgccctgaccgaccccgagggctgcccactgagccggtttaaggatagcctgggaaacccaacccacatcctgagaatcggcgagagctataaggagaagcagcggaccatccaggccaagaaggaggtggagcagcggagagccggcggctacagccggaagtacgccagcaaagccaagaatctggcagacgatatggtgagaaacaccgctagagatctgctgtactacgccgtgacccaggatgccatgctgatcttcgccaacctgagccggggcttcggccggcagggcaagcggaccttcatggccgagagacagtacacacggatggaggactggctgaccgccaagctggcctacgagggcctgagcaagacctacctgtccaagacactggcccagtacacctccaagacatgcagcaactgtgggtttaccatcaccagcgccgactacgacagggtgctggagaagctgaagaagacagcaacaggctggatgaccacaattaacggcaaggagctgaaggtggagggccagattacctactacaacagatacaagagacagaacgtagtcaaggacctgtccgtcgagctggatagactgagcgaagaatctgtgaacaacgacatctcctcctggacaaagggcagaagcggagaagctctgagcctcctgaagaaaagattctcccatagacccgtgcaggagaagttcgtgtgcctgaactgcggcttcgagacacacgcagccgagcaagccgccctgaacatcgccagatcctggctgttcctgcggagccaggagtacaagaaataccagacaaacaagacaaccggcaacaccgataagagagccttcgtcgagacctggcagtccttttaccggaagaagcttaaggaggtgtggaaacctgccgtgcggtctggcggatctggcggaggctccccccaggagcccgtgaccttcgaggacgtggccgtgctgttcacccccgaggagtggatgttcctggacagcgcccagaggagcctgtacagggacgtgatgctggagaactacaggaacctggccagcgtgggcgaccagctgggcaagttcagcagcttcagccacctggagcagggcgaggagtggtggcccaccgagaggagggtgttccccggcagctgccccgagcccagcctgcccggcggcccaagcagcggcgcccctcctcccagcggcggcagcccagccggctccccaacctctaccgaggagggcacctctgagtccgccacccccgagagcggccctggcacctccaccgagcccagcgagggcagcgcacccggcagccctgccggcagccccacctccacagaggagggaaccagcaccgagcccagcgaaggcagcgccccaggcaccagcaccgagcctagtgagcaggagattaaacggatcaacaagatcagaagaagacttgtgaaagacagcaacaccaagaaggccggcaagacaggccccatgaaaaccctgctggttagagtgatgacacccgatctgagagagcggctggaaaacctgagaaagaagcctgaaaatatcccccagcccatcagcaatacatctagagccaacctgaataagctgctgaccgattacaccgaaatgaagaaggcgatcctgcatgtgtactgggaagagttccagaaggaccctgtgggcctgatgagccgggtggcccagcctgccagcaagaagatcgatcagaacaagctgaaacctgagatggacgagaagggcaacctgaccaccgccggctttgcctgctctcagtgtggccagcccctgttcgtgtacaagctggagcaggtgtctgagaagggcaaggcttacaccaactacttcggacggtgcaatgtggccgagcacgaaaagctgatcctgctggcccagctgaagcccgagaaggatagcgacgaagccgtgacatatagcctgggaaagtttgggcagagggccctggatttctacagcattcatgtgaccaaggagtccacccaccccgtgaagcccctggcccagatcgccggaaacagatacgcctccggacctgtgggaaaggccctgagcgacgcatgtatgggcacaatcgcctccttcctgtctaagtaccaggacatcatcatcgaacaccagaaggtggtgaagggcaaccagaagagactggagagcctgcgggagctggccggcaaggaaaacctggaataccctagcgtgaccctgccacctcagcctcacaccaaggagggcgttgatgcctacaacgaagtgatcgcccgggtgcgaatgtgggtgaacctgaacctgtggcagaagctgaagctaagcagagatgatgccaagcctctgctgagactgaagggattcccttcctttcctctggtcgagagacaggccaacgaagtggactggtgggacatggtgtgtaacgtgaagaagctgatcaacgagaaaaaggaggatggcaaggtgttttggcagaatctggctggctacaagagacaggaagccctgagaccatacctgagcagcgaggaagatcggaagaagggaaagaaattcgctcggtaccagctgggcgacctgctgctgcacctggaaaagaagcacggcgaggactggggaaaggtgtacgacgaggcctgggagcggattgacaagaaagtggaaggcctgagcaagcacatcaagctggaagaggaacggagaagcgaggacgcccagagcaaggccgccctgaccgactggctgcgggctaaggccagcttcgtgatcgagggcctgaaggaggccgacaaggacgagttctgcagatgcgagctgaagctgcagaagtggtacggggacctgcggggaaagcccttcgccatcgaagccgagaacagcatcctggacatcagcggcttcagcaagcagtacaactgtgccttcatctggcagaaggacggcgtgaagaagctgaacctgtacctgatcatcaactacttcaagggcggcaagctgcggttcaagaagatcaaacctgaagccttcgaagccaacagattctacaccgtgatcaacaaaaagagcggcgagatcgtgcccatggaggtgaacttcaacttcgacgaccccaacctgatcatcctgcctctggcctttggcaagagacagggcagagaattcatctggaacgacctgctgtccctggaaaccggcagcctgaagctggccaacggaagagtgatcgagaagacactgtacaacagaagaacccggcaggatgagcctgccctgttcgtggccctgaccttcgagcggcgggaggtcctggactcctccaatatcaaaccaatgaacctgatcggcgtggcaagaggcgaaaacatccccgccgtgatcgccctgaccgaccccgagggctgcccactgagccggtttaaggatagcctgggaaacccaacccacatcctgagaatcggcgagagctataaggagaagcagcggaccatccaggccaagaaggaggtggagcagcggagagccggcggctacagccggaagtacgccagcaaagccaagaatctggcagacgatatggtgagaaacaccgctagagatctgctgtactacgccgtgacccaggatgccatgctgatcttcgccaacctgagccggggcttcggccggcagggcaagcggaccttcatggccgagagacagtacacacggatggaggactggctgaccgccaagctggcctacgagggcctgagcaagacctacctgtccaagacactggcccagtacacctccaagacatgcagcaactgtgggtttaccatcaccagcgccgactacgacagggtgctggagaagctgaagaagacagcaacaggctggatgaccacaattaacggcaaggagctgaaggtggagggccagattacctactacaacagatacaagagacagaacgtagtcaaggacctgtccgtcgagctggatagactgagcgaagaatctgtgaacaacgacatctcctcctggacaaagggcagaagcggagaagctctgagcctcctgaagaaaagattctcccatagacccgtgcaggagaagttcgtgtgcctgaactgcggcttcgagacacacgcagccgagcaagccgccctgaacatcgccagatcctggctgttcctgcggagccaggagtacaagaaataccagacaaacaagacaaccggcaacaccgataagagagccttcgtcgagacctggcagtccttttaccggaagaagcttaaggaggtgtggaaacctgccgtgcggtctggcggatctggcggaggctcctccccaggagcccgtgaccttcgaggacgtggccgtgctgttcacccccgaggagtggatgttcctggacagcgcccagaggagcctgtacagggacgtgatgctggagaactacaggaacctggccagcgtgggcgaccagctgggcaagttcagcagcttcagccacctggagcagggcgaggagtggtggcccaccgagaggagggtgttccccggcagctgccccgagcccagcctgcccggatctggctccggcagcggccccaagaaaaagagaaaagtctaagctgccttctgcggggcttgccttctggccatgcccttcttctctcccttgcacctgtacctcttggtctttgaataaagcctgagtaggaaggctagcaaaaaaaaaaaaaaaaaaaaaaaaaaaaaaaaaaaaaaaaaaaaaaaaaaaaaaaaaaaaaaaaaaaaaaaaaaaaaaaa

SEQ ID NO: 15988 - RNA, 9485 nt, synthetic construct
  source 1..9485: mol_type = other RNA
aggaaataagagagaaaagaagagtaagaagaaatataagagccaccatggcccctaagaagaagcgtaaagtgagccggatggaacgcctcgtctacgaggtgcggcagaagtgcagaaacatcgaggacatctgcatctcctgcggatctctgaacgtgaccctggagcacccactgttcatcggcggcatgtgccagaactgtaaaaactgttttctggagtgtgcctatcaatacgacgatgacggctaccagagctactgcaccatctgttgcggcggaagagaggtgctgatgtgtggaaataacaactgctgccggtgcttctgcgtggaatgcgtggacctgctggtgggccccggcgccgcccaggccgctattaaggaagatccttggaactgctacatgtgcggccacaagggcacatacggcctgctgagacggagagaggactggcctagcagactgcagatgttcttcgccaataaccacgaccaggagttcgacccccctaaggtgtaccctcccgtccccgccgagaagagaaagcccatccgggtcctgagcctgttcgatggcatcgccaccggtctgctggtgctgaaggacctgggcatccaggtggataggtacattgcctccgaggtgtgcgaggactccatcaccgtgggaatggtgcgtcatcagggcaagatcatgtacgtgggcgacgtgcggagcgtgacacagaagcatatccaggagtggggccctttcgacctggtgatcggcggcagcccttgcaatgacctgagcatcgtgaacccagcccggaagggcctgtacgagggaaccggcagactgttcttcgagttttacagactgctgcacgacgcccggcctaaggaaggcgacgaccggcccttcttttggctgttcgagaatgtggtggccatgggagtcagcgacaagcgggatattagccggttcctggagagcaaccccgtgatgatcgatgccaaggaagtgagcgccgcccaccgggccagatacttctggggcaatctgcctggcatgaacagacccctggccagcaccgtgaacgacaagctggagctgcaggagtgcctggagcacggccggatcgccaagttcagcaaggtgagaaccatcaccacccgaagcaacagcatcaaacaaggcaaggaccagcactttcctgtgttcatgaacgagaaggaggacatcctgtggtgtaccgagatggagagagtgttcgggttcccagtccactacacagatgtcagcaacatgtctagactggccagacagagactgctgggaagaagctggtccgtccctgtgatcagacacctgttcgcccctctgaaggagtacttcgcctgcgtgagcagcggcaacagcaacgccaacagccggggccccagcttctctagcggcctggtgccactgtccctgagagggagccacatgggccccatggagatctacaaaaccgtgagcgcctggaagcggcagcctgtgcgcgtgctgagcctgtttcggaatatcgataaagtcctgaaaagcctgggattcctggagagcggctctggctccggcggtggcaccctgaagtacgtggaggatgtgacaaacgtggtcagacgggatgtggagaagtggggccccttcgatctggtgtacggcagcacccaacccctgggcagctcttgtgaccggtgccctggctggtacatgtttcagttccaccggatcctgcagtacgccctgccgagacaggagtcccagcggccattcttttggattttcatggacaacttgctgctgaccgaggatgaccaggaaactaccactcggttcctgcagaccgaagccgtgaccctgcaggacgtgagaggccgggactaccagaacgccatgcgggtgtggtccaacatccctggactgaaaagcaagcacgcacctctgacccctaaagaagaggagtacctgcaggcccaggtgcggagcagaagcaagctggacgcccctaaggtggatctgctggtgaagaattgcctcctgcccctgagagagtacttcaagtatttcagccagaatagtctgcccctgggaggcagcggcggcggcgccctggtgacatttgaggacgtcgccgtgcggttcacccaggaggaatgggctctgctggatccttctcagaaaatcctgtaccgggacgtgatgagagagacataccggaatctgacctccgtgggcatcaactgggaatgttgggaccttgaagcctgcttcagaagcctgggaagaaacctgagagtgcaggtggtgaagagaaagtgcgagctgaccaacagcggcccctgcgccgagggcggcccaagcagcggcgcccctcctcccagcggcggcagcccagccggctccccaacctctaccgaggagggcacctctgagtccgccacccccgagagcggccctggcacctccaccgagcccagcgagggcagcgcacccggcagccctgccggcagccccacctccacagaggagggaaccagcaccgagcccagcgaaggcagcgccccaggcaccagcaccgagcctagtgagcaggagattaaacggatcaacaagatcagaagaagacttgtgaaagacagcaacaccaagaaggccggcaagacaggccccatgaaaaccctgctggttagagtgatgacacccgatctgagagagcggctggaaaacctgagaaagaagcctgaaaatatcccccagcccatcagcaatacatctagagccaacctgaataagctgctgaccgattacaccgaaatgaagaaggcgatcctgcatgtgtactgggaagagttccagaaggaccctgtgggcctgatgagccgggtggcccagcctgccagcaagaagatcgatcagaacaagctgaaacctgagatggacgagaagggcaacctgaccaccgccggctttgcctgctctcagtgtggccagcccctgttcgtgtacaagctggagcaggtgtctgagaagggcaaggcttacaccaactacttcggacggtgcaatgtggccgagcacgaaaagctgatcctgctggcccagctgaagcccgagaaggatagcgacgaagccgtgacatatagcctgggaaagtttgggcagagggccctggatttctacagcattcatgtgaccaaggagtccacccaccccgtgaagcccctggcccagatcgccggaaacagatacgcctccggacctgtgggaaaggccctgagcgacgcatgtatgggcacaatcgcctccttcctgtctaagtaccaggacatcatcatcgaacaccagaaggtggtgaagggcaaccagaagagactggagagcctgcgggagctggccggcaaggaaaacctggaataccctagcgtgaccctgccacctcagcctcacaccaaggagggcgttgatgcctacaacgaagtgatcgcccgggtgcgaatgtgggtgaacctgaacctgtggcagaagctgaagctaagcagagatgatgccaagcctctgctgagactgaagggattcccttcctttcctctggtcgagagacaggccaacgaagtggactggtgggacatggtgtgtaacgtgaagaagctgatcaacgagaaaaaggaggatggcaaggtgttttggcagaatctggctggctacaagagacaggaagccctgagaccatacctgagcagcgaggaagatcggaagaagggaaagaaattcgctcggtaccagctgggcgacctgctgctgcacctggaaaagaagcacggcgaggactggggaaaggtgtacgacgaggcctgggagcggattgacaagaaagtggaaggcctgagcaagcacatcaagctggaagaggaacggagaagcgaggacgcccagagcaaggccgccctgaccgactggctgcgggctaaggccagcttcgtgatcgagggcctgaaggaggccgacaaggacgagttctgcagatgcgagctgaagctgcagaagtggtacggggacctgcggggaaagcccttcgccatcgaagccgagaacagcatcctggacatcagcggcttcagcaagcagtacaactgtgccttcatctggcagaaggacggcgtgaagaagctgaacctgtacctgatcatcaactacttcaagggcggcaagctgcggttcaagaagatcaaacctgaagccttcgaagccaacagattctacaccgtgatcaacaaaaagagcggcgagatcgtgcccatggaggtgaacttcaacttcgacgaccccaacctgatcatcctgcctctggcctttggcaagagacagggcagagaattcatctggaacgacctgctgtccctggaaaccggcagcctgaagctggccaacggaagagtgatcgagaagacactgtacaacagaagaacccggcaggatgagcctgccctgttcgtggccctgaccttcgagcggcgggaggtcctggactcctccaatatcaaaccaatgaacctgatcggcgtggcaagaggcgaaaacatccccgccgtgatcgccctgaccgaccccgagggctgcccactgagccggtttaaggatagcctgggaaacccaacccacatcctgagaatcggcgagagctataaggagaagcagcggaccatccaggccaagaaggaggtggagcagcggagagccggcggctacagccggaagtacgccagcaaagccaagaatctggcagacgatatggtgagaaacaccgctagagatctgctgtactacgccgtgacccaggatgccatgctgatcttcgccaacctgagccggggcttcggccggcagggcaagcggaccttcatggccgagagacagtacacacggatggaggactggctgaccgccaagctggcctacgagggcctgagcaagacctacctgtccaagacactggcccagtacacctccaagacatgcagcaactgtgggtttaccatcaccagcgccgactacgacagggtgctggagaagctgaagaagacagcaacaggctggatgaccacaattaacggcaaggagctgaaggtggagggccagattacctactacaacagatacaagagacagaacgtagtcaaggacctgtccgtcgagctggatagactgagcgaagaatctgtgaacaacgacatctcctcctggacaaagggcagaagcggagaagctctgagcctcctgaagaaaagattctcccatagacccgtgcaggagaagttcgtgtgcctgaactgcggcttcgagacacacgcagccgagcaagccgccctgaacatcgccagatcctggctgttcctgcggagccaggagtacaagaaataccagacaaacaagacaaccggcaacaccgataagagagccttcgtcgagacctggcagtccttttaccggaagaagcttaaggaggtgtggaaacctgccgtgcggtctggcggatctggcggaggctcctggcaggagcccgtgaccttcgaggacgtggccgtgtacctgagccacgccgagtgggacgccatggcccccgagcagagggagctgtactgcagcgtgatgctggacaactaccagctgctggccagcctgggctaccccggccccaagcccgacatcgtgtacaggctggagaggggcgaggagccctggggctgcgccccccagagccccctgagctgggacggccccaggagccccagcggcggcccaagcagcggcgcccctcctcccagcggcggcagcccagccggctccccaacctctaccgaggagggcacctctgagtccgccacccccgagagcggccctggcacctccaccgagcccagcgagggcagcgcacccggcagccctgccggcagccccacctccacagaggagggaaccagcaccgagcccagcgaaggcagcgccccaggcaccagcaccgagcctagtgagcaggagattaaacggatcaacaagatcagaagaagacttgtgaaagacagcaacaccaagaaggccggcaagacaggccccatgaaaaccctgctggttagagtgatgacacccgatctgagagagcggctggaaaacctgagaaagaagcctgaaaatatcccccagcccatcagcaatacatctagagccaacctgaataagctgctgaccgattacaccgaaatgaagaaggcgatcctgcatgtgtactgggaagagttccagaaggaccctgtgggcctgatgagccgggtggcccagcctgccagcaagaagatcgatcagaacaagctgaaacctgagatggacgagaagggcaacctgaccaccgccggctttgcctgctctcagtgtggccagcccctgttcgtgtacaagctggagcaggtgtctgagaagggcaaggcttacaccaactacttcggacggtgcaatgtggccgagcacgaaaagctgatcctgctggcccagctgaagcccgagaaggatagcgacgaagccgtgacatatagcctgggaaagtttgggcagagggccctggatttctacagcattcatgtgaccaaggagtccacccaccccgtgaagcccctggcccagatcgccggaaacagatacgcctccggacctgtgggaaaggccctgagcgacgcatgtatgggcacaatcgcctccttcctgtctaagtaccaggacatcatcatcgaacaccagaaggtggtgaagggcaaccagaagagactggagagcctgcgggagctggccggcaaggaaaacctggaataccctagcgtgaccctgccacctcagcctcacaccaaggagggcgttgatgcctacaacgaagtgatcgcccgggtgcgaatgtgggtgaacctgaacctgtggcagaagctgaagctaagcagagatgatgccaagcctctgctgagactgaagggattcccttcctttcctctggtcgagagacaggccaacgaagtggactggtgggacatggtgtgtaacgtgaagaagctgatcaacgagaaaaaggaggatggcaaggtgttttggcagaatctggctggctacaagagacaggaagccctgagaccatacctgagcagcgaggaagatcggaagaagggaaagaaattcgctcggtaccagctgggcgacctgctgctgcacctggaaaagaagcacggcgaggactggggaaaggtgtacgacgaggcctgggagcggattgacaagaaagtggaaggcctgagcaagcacatcaagctggaagaggaacggagaagcgaggacgcccagagcaaggccgccctgaccgactggctgcgggctaaggccagcttcgtgatcgagggcctgaaggaggccgacaaggacgagttctgcagatgcgagctgaagctgcagaagtggtacggggacctgcggggaaagcccttcgccatcgaagccgagaacagcatcctggacatcagcggcttcagcaagcagtacaactgtgccttcatctggcagaaggacggcgtgaagaagctgaacctgtacctgatcatcaactacttcaagggcggcaagctgcggttcaagaagatcaaacctgaagccttcgaagccaacagattctacaccgtgatcaacaaaaagagcggcgagatcgtgcccatggaggtgaacttcaacttcgacgaccccaacctgatcatcctgcctctggcctttggcaagagacagggcagagaattcatctggaacgacctgctgtccctggaaaccggcagcctgaagctggccaacggaagagtgatcgagaagacactgtacaacagaagaacccggcaggatgagcctgccctgttcgtggccctgaccttcgagcggcgggaggtcctggactcctccaatatcaaaccaatgaacctgatcggcgtggcaagaggcgaaaacatccccgccgtgatcgccctgaccgaccccgagggctgcccactgagccggtttaaggatagcctgggaaacccaacccacatcctgagaatcggcgagagctataaggagaagcagcggaccatccaggccaagaaggaggtggagcagcggagagccggcggctacagccggaagtacgccagcaaagccaagaatctggcagacgatatggtgagaaacaccgctagagatctgctgtactacgccgtgacccaggatgccatgctgatcttcgccaacctgagccggggcttcggccggcagggcaagcggaccttcatggccgagagacagtacacacggatggaggactggctgaccgccaagctggcctacgagggcctgagcaagacctacctgtccaagacactggcccagtacacctccaagacatgcagcaactgtgggtttaccatcaccagcgccgactacgacagggtgctggagaagctgaagaagacagcaacaggctggatgaccacaattaacggcaaggagctgaaggtggagggccagattacctactacaacagatacaagagacagaacgtagtcaaggacctgtccgtcgagctggatagactgagcgaagaatctgtgaacaacgacatctcctcctggacaaagggcagaagcggagaagctctgagcctcctgaagaaaagattctcccatagacccgtgcaggagaagttcgtgtgcctgaactgcggcttcgagacacacgcagccgagcaagccgccctgaacatcgccagatcctggctgttcctgcggagccaggagtacaagaaataccagacaaacaagacaaccggcaacaccgataagagagccttcgtcgagacctggcagtccttttaccggaagaagcttaaggaggtgtggaaacctgccgtgcggtctggcggatctggcggaggctccttggcaggagcccgtgaccttcgaggacgtggccgtgtacctgagccacgccgagtgggacgccatggcccccgagcagagggagctgtactgcagcgtgatgctggacaactaccagctgctggccagcctgggctaccccggccccaagcccgacatcgtgtacaggctggagaggggcgaggagccctggggctgcgccccccagagccccctgagctgggacggccccaggagccccagcggatctggctccggcagcggccccaagaaaaagagaaaagtctaagctgccttctgcggggcttgccttctggccatgcccttcttctctcccttgcacctgtacctcttggtctttgaataaagcctgagtaggaaggctagcaaaaaaaaaaaaaaaaaaaaaaaaaaaaaaaaaaaaaaaaaaaaaaaaaaaaaaaaaaaaaaaaaaaaaaaaaaaaaaaa
